United States Patent Application Publication US 2011/0182862 A1 - sequence listing, part 8

SEQ ID NO: 10517 - DNA, 4360 bp, Muscodor strobelii
  misc_feature: SGI EST ID NO. CUFF.24812.0
  misc_feature: Variant of the nucleotide sequence at SEQ ID NO 10515
atggaaatggccggtgttacttgtttgacaggcgcgacaattatccagctggctagatcgctcgtcgagcgacttggacgaccccttgaactggatacagatggtatctggtgcatgttgccagctacattccccgaaaacttcgcattcaaactcaagaacggcaaaaagctggccatctcgtatccctgtgttatgttgaaccatctcgttcacgacaaattcaccaacgatcaataccagaccctggtagatcccaagtcattcaaatacgagacgcacagcgataactccattttcttcgaagtcgatggcccttacaaagctatgattcttcctacctccaaagaagaagacaaaaatttgaagaagcgatatgctgtgttcaacgacgacggcagtcttgctgaactcaaaggtttcgaggtcaagcggagaggtgagctgaagctcatcaaaatctttcagcagcaaatcttcaagttcttcttggagggtacgacattgactgagtgctacacggctgttgccaaagtcgcaaacaaatggttagatgtcttatacagtaaaggctcaacgcttgccgatgaagagttcatcgatctcatttgtgaaaatagaagcatgtcgaagacactggaggaatatggtaatcagaaatccacttcaattaccactgccaagcgtctggcagagttcttgggagagcagatggtcaaggacaaaggtctcaactgcaaatatatcatctgcgccagacctcgcaatgcgcctgtcaccgagcgtgctgttcccgtcgctattttctctgccgagcccgagatcaagcggagattcttgacgaaatggttgaaagaagaacccaccgacatggatccgcgagcattgctcgactgggactactacctcgagcgtctgggctcagttatccagaagctcatcaccattcctgcggcattgcagaaagtccgcaacccggttccacgagtcgcccatccggattggctccaacgaaggatcaatatcaaggatgataagatgaagcagaagaagctcacggatctctttgtaaaagcgccgctcagcgacattacaaacctcaatgggtccagactcgatgatctggaagactacggagcaaaacttctcaagccaaagaccacgacggctgtgatacaagcatctcaggcagcgcctactgcggccaagcggaaatctccagagcctgagaaagagagcttggatccctttgcagctctgccgaaggtgatgcccaacccgtctgagaactactcagcctggttagagtaccaaaagaagaaatggaagatccagaagcaggctcgcattcggcggcgtcatctctttggcgatcgtcgcgggaatgtcggcagcaatctccaacagactttccgcaaccaagcagaggtcactttcagacatacttggcaacttcttcaacttcgaacaactgacaatcccggtattgtgactgcattcgtgctgattgatgccaaggttcatgcactcaaggtcaaagtccctcgaacagtattcctaaacctaaaaggcaaggatttacccgatatcgaagtcgagggctgtgatgttgaacaagtcaaccacactctgcccaacggtcatccctcagctcatttattcaaaatcactgtacctgaagatatatactttgccgaggccgaaaagttttcgctgttgttcaaccacccaagtgtggagggcgtatatgaaaagcaggtgcctttgaatgtcagggcggtcctccaacttggtaatctctgtaccatcgatcagagccaagctggcgttctaggtaaaggattggagcaagggttcgatctttccggcttgatgagaccacttaagccaaagccttacctggatacaaacccgctagcctatgtctatatctcgcacatcacagctggcgagcgacaaattttcggtgtcttctcgaccacgagtgatcaagcgcacatcgtgattctccagaagaccaaagacgccaactcagaacttcctaacgtcacgaagatttactctgacctgcgaaccaagagactacaggaagatgaaggcagcaactggcaagagtgcttcgaataccaggagaaactcaattttagagttacgcaagtgacaacgcgaaggaaagcccatctagagattggtgacttggtcaagaagatgaagaaggatgagacgaagccaatgatgcttgttattcagtcatctcaacgcaacctccttgtccacgacgtccccgtactggcggactttccaatactccctcttcgatatgaccaggcagatagctctcttccaccattggttggcagtctgtcgttgccagacggcttgtctcacattatctaagtctcgggtcttgggtactgcatcttactgctctagcaagatatggtgatataccgctctgcaacctggagcgggatgatcccagatttctcattgacattgcatatgcacgacgattacaaatgaataatgttgtgctttggtggtcgtctggacccagaccggaccacgcaggatacgagcaagacgatgtgacaggtcctctggattctgtagcaatgccctctgtcaataatccgggcacttatgcatctgtttgcatcgacctcgaagttcgtaatctaactatcaacactatactcacctcgtccatcatcaatgaactcgaagggtccgactctattgcattcaatcctgcagcagatgctggcccttcggatggatcggagatgcttcactcggagtcagcatttgcgaatgcgggcgtccttgtactccgagagatggtcaagtcttggtggaccgaagcgtgcaaagacagtcccatggccgaccttctggttcaacatcttgtgcgctgggtcgagtcgccagactcattcatgtatgaccgcgccttgcattactacgtacagatgatgagccgcaaggcattgctccaattaatggcagacttcagacgcgttgggtcacaagtcgtctttgctaactccaaccgactacttctccaaacgacaaaatctgaggttggcaatgcttatgcctacagtcaatacatcctaaagagcatcaagagcaaaccactattccacttcatcgacctcgaaatcaaagaatactgggattacctagtctggtatgacgaatacaactacggtggcaagggatgtcaagaagtagtggaagcagagcaacagagcctcgaaacaatcatgtgctggcagatgaagacgtttctccccatccgccttcaagacacattccagcactgggtcgtcgaattcattcagctcatgcacagcatcaaacggccgcataacggggaccctgactcgacgcgtcgaaccacacaactaccattccgcagcctcacgccaagtcaggatgtggacgacaaagacaaacctgaaataatcctaaccaagagctttgaacgcccactaaagaaggaaaatccaaaatctcatatccacacaagcgcgggagatgctacaccccgaactcgcttccgactggtctttcccgcttctcccggggaatagcaacacgtcacaaaccagtactaaaaatgccgtattggaacttgtgaagtcattgatgcaggttctgtcactcgataagaacatatccacggaagcacgcctcctgcgtcgagatctcctagccttcttcgacgtgcgagaattctcccgagcaggcgcgttcaccaacccttcttcctccttaaaagtcccgcaatggagctgtggagagtgtacattggcgagagactgggatctctgtcgtgacgaatctctccttcccgatctcacgactctagcttccgaacaccaaaccgacggcgaaacgctaaacagtgagctgcgtaaagcggccgcggcaaggccgtggaattgtcagttttgtggagcggagttcgagaggaggtttatcgaggagaaattattggctgatgtgggcaagtggttggtcgagtggacgacgcaggatgtgaagtgtgagcgctgtggtagtgtcaggttgaatgagtttatggagcattgtacttgttctggctcctggggggagagcgtgaagagggaggatcttgtggcgaggttgagggtttatgggggtgttgctgagtggtttgggatgagaatgcttggagttatggttggggaggtgcttggtgggttgtaagtgtttttttctgtgttggagagttggtgtacggtgttcagtttgttttaggatggcgtctgggtgtctttagttttagggtgatatatttaatttcgtttcagaaatcagatgacgtgtg

SEQ ID NO: 10518 - DNA, 6054 bp, Muscodor strobelii
  misc_feature: SGI cDNA ID NO. 563342
  misc_feature: Encodes the peptide sequence at SEQ ID NO 10519
atgcctaacaccagcctccggaaacctcaaaaaggcttccgccgcggcggaaagcaagcctaccatggcgtcactcgcacacgcaccttcgccgccacctcccgcaccgaaggcacctctgccgacgagagggcagaacgcaacgccctggcacagcaaattgatgagtccatgggctttgtacggcatgaagccggccgtatgcgggaaggctggctggtcaacgtccagcccaccactatagccctcgatgacgaccgtgtgccgggtggtcgagcagccctggactgctactttatcgaggaggacgggcagacattcaaaggcacgatcgagtacgaaccatacttcctcatcgctgttcgcaaggggcgagagagcgaggttgaagaatggctgaagcgtgtgcccggaggtggcgtggtgcgctcggtgagaaaagtagagaaagaggatctctccatgcccaatcacttgctgggctaccgccgcacttttctcgagctgcgctttgggaatgtgcaggacttaatgtcggccaggagagatatcatgcccattgcggagaggaatcgcaaggccatgggcacagttgatgtatatgccgaggtcgcatccgaacaagccggattcgacctctttgatgattcacgtgatgacgatagacgacataatgcttccttttctgacgccagcgactacattgtcgatattagagaatttgatgttccataccatgtacgagtaatgatagatatgaatatacgagtagggaaatggtacttcgttgatgcaaaacacggagtcaccaccataaaactcaacgaagagcgccttgtacaggcagatcccgtcataatggctttcgatattgaaacgacaaaactacccctgaaattccccgatgctgcgatagatcagattatgatgatatcgtacatgattgacggccaaggtttcctcatcacaaatcgggagattgtttctgaagacatttccgattttgaatacacaccgaaaccagaatatcccggccaattcatgattttcaatgagcccgacgaaaaaggtgtgatagagcggtttttcctacacgtcaaggaagcgagaccgaccgtcatcgccacatacaatggtgactttttcgattggccctttgtagaagctcgagcgagtgtcaatggtatcgacatgtatcgagaaatcggttggaagaaagacagcgaagatatttataagtgcacatacggcgttcatatggattgtttcgcctgggtaaaccgagattcctaccttccacaaggtagtcgaggtttaaaggccgtcaccgtggccaagctcggctacgatccagacgaactcgatcccgaattaatgacaccatatgccgccgagagaccacaaacccttgccgagtattcagtttcagatgctgttgccacatactatttgtacatgaagtacatccacccttttatcttttcattgtgtactatcttgccgctaggaggcgatgatacgttacgcaaaggtacaggtactttgtgcgaaatgttgttgatggtgcaggcttaccaaggtgagattgtattaccgaacaaacatgtatcgccgaaagaatcattctgggatgggcatctattggacgcagaaacttatgttggtggtcacgtcgagagtatcgaagccggtgtatttcgtgcagacatccccgtcaatttcgccgtggatccaggagcagtcgacgaacttctgcgcgatcttgataacgcactcaaattcgtggttgagatcgaagagaaaaaatctctcgacgacgttacgaattacgacgaagtccgggaccagattgcatcacggttaaaccagctaaaggaaacgccaaatcgaaatgaacgacctctgatttaccatttggacgttgcgtccatgtatcctaacatcatgactacaaatcgacttcaacccgattctatgattcaagagtcagattgcgcggcctgtgacttcaacaggccaggcaagacttgtgatcgacgacttccttgggcttggagaggcgaatatctaccagcaaaacgagacgagtacaacatgatccggcatgcattagaaaatgaaacgttccctccgaaatacccaaataaacctaggcgaacattccaagaactaccggaagacgagcaagctggtctcatccggaaacgcttgacaacttacagtcaaaaagtctaccacaagatccgtgaccaaaccacgattgtgcgcgaggccatcatttgtcaaagagagaatcccttctatatcgataccgtccgagacttcagagacagacggtatgattacaaaggcaaagcaaaagtctggaaaggcaaaacagagtcgctcaagtcttcaggcgctagcaatcaggagattgatagtgccaagaagatgattgtcctattcgactctttgcagctggcacacaaagtcattttgaactcattttatggctatgtcatgagaaagggatccagatggtactctatggaaatggccggtgttacttgtttgacaggcgcgacaattatccagctggctagatcgctcgtcgagcgacttggacgaccccttgaactggatacagatggtatctggtgcatgttgccagctacattccccgaaaacttcgcattcaaactcaagaacggcaaaaagctggccatctcgtatccctgtgttatgttgaaccatctcgttcacgacaaattcaccaacgatcaataccagaccctggtagatcccaagtcattcaaatacgagacgcacagcgataactccattttcttcgaagtcgatggcccttacaaagctatgattcttcctacctccaaagaagaagacaaaaatttgaagaagcgatatgctgtgttcaacgacgacggcagtcttgctgaactcaaaggtttcgaggtcaagcggagaggtgagctgaagctcatcaaaatctttcagcagcaaatcttcaagttcttcttggagggtacgacattgactgagtgctacacggctgttgccaaagtcgcaaacaaatggttagatgtcttatacagtaaaggctcaacgcttgccgatgaagagttcatcgatctcatttgtgaaaatagaagcatgtcgaagacactggaggaatatggtaatcagaaatccacttcaattaccactgccaagcgtctggcagagttcttgggagagcagatggtcaaggacaaaggtctcaactgcaaatatatcatctgcgccagacctcgcaatgcgcctgtcaccgagcgtgctgttcccgtcgctattttctctgccgagcccgagatcaagcggagattcttgacgaaatggttgaaagaagaacccaccgacatggatccgcgagcattgctcgactgggactactacctcgagcgtctgggctcagttatccagaagctcatcaccattcctgcggcattgcagaaagtccgcaacccggttccacgagtcgcccatccggattggctccaacgaaggatcaatatcaaggatgataagatgaagcagaagaagctcacggatctctttgtaaaagcgccgctcagcgacattacaaacctcaatgggtccagactcgatgatctggaagactacggagcaaaacttctcaagccaaagaccacgacggctgtgatacaagcatctcaggcagcgcctactgcggccaagcggaaatctccagagcctgagaaagagagcttggatccctttgcagctctgccgaaggtgatgcccaacccgtctgagaactactcagcctggttagagtaccaaaagaagaaatggaagatccagaagcaggctcgcattcggcggcgtcatctctttggcgatcgtcgcgggaatgtcggcagcaatctccaacagactttccgcaaccaagcagaggtcactttcagacatacttggcaacttcttcaacttcgaacaactgacaatcccggtattgtgactgcattcgtgctgattgatgccaaggttcatgcactcaaggtcaaagtccctcgaacagtattcctaaacctaaaaggcaaggatttacccgatatcgaagtcgagggctgtgatgttgaacaagtcaaccacactctgcccaacggtcatccctcagctcatttattcaaaatcactgtacctgaagatatatactttgccgaggccgaaaagttttcgctgttgttcaaccacccaagtgtggagggcgtatatgaaaagcaggtgcctttgaatgtcagggcggtcctccaacttggtaatctctgtaccatcgatcagagccaagctggcgttctaggtaaaggattggagcaagggttcgatctttccggcttgatgagaccacttaagccaaagccttacctggatacaaacccgctagcctatgtctatatctcgcacatcacagctggcgagcgacaaattttcggtgtcttctcgaccacgagtgatcaagcgcacatcgtgattctccagaagaccaaagacgccaactcagaacttcctaacgtcacgaagatttactctgacctgcgaaccaagagactacaggaagatgaaggcagcaactggcaagagtgcttcgaataccaggagaaactcaattttagagttacgcaagtgacaacgcgaaggaaagcccatctagagattggtgacttggtcaagaagatgaagaaggatgagacgaagccaatgatgcttgttattcagtcatctcaacgcaacctccttgtccacgacgtccccgtactggcggactttccaatactccctcttcgatatgaccaggcagatagctctcttccaccattggttggcacaagatatggtgatataccgctctgcaacctggagcgggatgatcccagatttctcattgacattgcatatgcacgacgattacaaatgaataatgttgtgctttggtggtcgtctggacccagaccggaccacgcaggatacgagcaagacgatgtgacaggtcctctggattctgtagcaatgccctctgtcaataatccgggcacttatgcatctgtttgcatcgacctcgaagttcgtaatctaactatcaacactatactcacctcgtccatcatcaatgaactcgaagggtccgactctattgcattcaatcctgcagcagatgctggcccttcggatggatcggagatgcttcactcggagtcagcatttgcgaatgcgggcgtccttgtactccgagagatggtcaagtcttggtggaccgaagcgtgcaaagacagtcccatggccgaccttctggttcaacatcttgtgcgctgggtcgagtcgccagactcattcatgtatgaccgcgccttgcattactacgtacagatgatgagccgcaaggcattgctccaattaatggcagacttcagacgcgttgggtcacaagtcgtctttgctaactccaaccgactacttctccaaacgacaaaatctgaggttggcaatgcttatgcctacagtcaatacatcctaaagagcatcaagagcaaaccactattccacttcatcgacctcgaaatcaaagaatactgggattacctagtctggtatgacgaatacaactacggtggcaagggatgtcaagaagtagtggaagcagagcaacagagcctcgaaacaatcatgtgctggcagatgaagacgtttctccccatccgccttcaagacacattccagcactgggtcgtcgaattcattcagctcatgcacagcatcaaacggccgcataacggggaccctgactcgacgcgtcgaaccacacaactaccattccgcagcctcacgccaagtcaggatgtggacgacaaagacaaacctgaaataatcctaaccaagagctttgaacgcccactaaagaaggaaaatccaaaatctcatatccacacaagcgcgggagatgctacaccccgaactcgcttccgactggtctttcccgcttctcccggggaatag

SEQ ID NO: 10519 - protein, 2017 aa, Muscodor strobelii
  misc_feature: SGI Peptide ID NO. 563342
  misc_feature (511)..(1173): Pfam Id: PF00136 Pfam Desc: DNA polymerase family B
  misc_feature (99)..(442): Pfam Id: PF03104 Pfam Desc: DNA polymerase family B, exonuclease domain
  misc_feature (1525)..(1892): Pfam Id: PF08490 Pfam Desc: Domain of function (DUF1744)
  misc_feature (1631)..(1892): Pfam Id: PF08490 Pfam Desc: Domain of function (DUF1744)
  misc_feature (1525)..(1627): Pfam Id: PF08490 Pfam Desc: Domain of function (DUF1744)
  misc_feature (1)..(1988): NCBI GI: 164425735 Blast Desc: DNA polymerase epsilon [Neurospora crassa OR74A] gi|157071041|gb|EAA26703.2| DNA polymerase epsilon [Neurospora crassa OR74A]
  misc_feature (1)..(1988): NCBI GI: 256732576 Blast Desc: [Nectria haematococca mpVI 77-13-4]
  misc_feature (1)..(2016): NCBI GI: 46123375 Blast Desc: FG06065.1 [Gibberella zeae PH-1]
  misc_feature (1)..(1988): NCBI GI: 171679864 Blast Desc: protein product [Podospora anserina] gi|170939558|emb|CAP64785.1| protein product [Podospora anserina]
  misc_feature (1)..(1988): NCBI GI: 145606913 Blast Desc: MGG_03850 [Magnaporthe grisea 70-15] gi|145014538|gb|EDJ99106.1| MGG_03850 [Magnaporthe grisea 70-15]
  misc_feature (1)..(2016): NCBI GI: 116204163 Blast Desc: conserved [Chaetomium globosum CBS 148.51] gi|88176093|gb|EAQ83561.1| conserved [Chaetomium globosum CBS 148.51]
  misc_feature (7)..(1988): NCBI GI: 156039593 Blast Desc: SS1G_11933 [Sclerotinia sclerotiorum 1980] gi|154697670|gb|EDN97408.1| SS1G_11933 [Sclerotinia sclerotiorum 1980]
  misc_feature (7)..(1988): NCBI GI: 154301328 Blast Desc: BC1G_10334 [Botryotinia fuckeliana B05.10] gi|150856235|gb|EDN31427.1| BC1G_10334 [Botryotinia fuckeliana B05.10]
  misc_feature (7)..(1988): NCBI GI: 169617538 Blast Desc: SNOG_11951 [Phaeosphaeria nodorum SN15] gi|111059243|gb|EAT80363.1| SNOG_11951 [Phaeosphaeria nodorum SN15]
  misc_feature (6)..(2016): NCBI GI: 226293599 Blast Desc: DNA polymerase epsilon catalytic subunit A [Paracoccidioides brasiliensis Pb18]
  misc_feature (37)..(2016): SWISSPROT Homolog: EC 2.7.7.7 DNA-directed DNA polymerase
MPNTSLRKPQKGFRRGGKQAYHGVTRTRTFAATSRTEGTSADERAERNALAQQIDESMGFVRHEAGRMREGWLVNVQPTTIALDDDRVPGGRAALDCYFIEEDGQTFKGTIEYEPYFLIAVRKGRESEVEEWLKRVPGGGVVRSVRKVEKEDLSMPNHLLGYRRTFLELRFGNVQDLMSARRDIMPIAERNRKAMGTVDVYAEVASEQAGFDLFDDSRDDDRRHNASFSDASDYIVDIREFDVPYHVRVMIDMNIRVGKWYFVDAKHGVTTIKLNEERLVQADPVIMAFDIETTKLPLKFPDAAIDQIMMISYMIDGQGFLITNREIVSEDISDFEYTPKPEYPGQFMIFNEPDEKGVIERFFLHVKEARPTVIATYNGDFFDWPFVEARASVNGIDMYREIGWKKDSEDIYKCTYGVHMDCFAWVNRDSYLPQGSRGLKAVTVAKLGYDPDELDPELMTPYAAERPQTLAEYSVSDAVATYYLYMKYIHPFIFSLCTILPLGGDDTLRKGTGTLCEMLLMVQAYQGEIVLPNKHVSPKESFWDGHLLDAETYVGGHVESIEAGVFRADIPVNFAVDPGAVDELLRDLDNALKFVVEIEEKKSLDDVTNYDEVRDQIASRLNQLKETPNRNERPLIYHLDVASMYPNIMTTNRLQPDSMIQESDCAACDFNRPGKTCDRRLPWAWRGEYLPAKRDEYNMIRHALENETFPPKYPNKPRRTFQELPEDEQAGLIRKRLTTYSQKVYHKIRDQTTIVREAIICQRENPFYIDTVRDFRDRRYDYKGKAKVWKGKTESLKSSGASNQEIDSAKKMIVLFDSLQLAHKVILNSFYGYVMRKGSRWYSMEMAGVTCLTGATIIQLARSLVERLGRPLELDTDGIWCMLPATFPENFAFKLKNGKKLAISYPCVMLNHLVHDKFTNDQYQTLVDPKSFKYETHSDNSIFFEVDGPYKAMILPTSKEEDKNLKKRYAVFNDDGSLAELKGFEVKRRGELKLIKIFQQQIFKFFLEGTTLTECYTAVAKVANKWLDVLYSKGSTLADEEFIDLICENRSMSKTLEEYGNQKSTSITTAKRLAEFLGEQMVKDKGLNCKYIICARPRNAPVTERAVPVAIFSAEPEIKRRFLTKWLKEEPTDMDPRALLDWDYYLERLGSVIQKLITIPAALQKVRNPVPRVAHPDWLQRRINIKDDKMKQKKLTDLFVKAPLSDITNLNGSRLDDLEDYGAKLLKPKTTTAVIQASQAAPTAAKRKSPEPEKESLDPFAALPKVMPNPSENYSAWLEYQKKKWKIQKQARIRRRHLFGDRRGNVGSNLQQTFRNQAEVTFRHTWQLLQLRTTDNPGIVTAFVLIDAKVHALKVKVPRTVFLNLKGKDLPDIEVEGCDVEQVNHTLPNGHPSAHLFKITVPEDIYFAEAEKFSLLFNHPSVEGVYEKQVPLNVRAVLQLGNLCTIDQSQAGVLGKGLEQGFDLSGLMRPLKPKPYLDTNPLAYVYISHITAGERQIFGVFSTTSDQAHIVILQKTKDANSELPNVTKIYSDLRTKRLQEDEGSNWQECFEYQEKLNFRVTQVTTRRKAHLEIGDLVKKMKKDETKPMMLVIQSSQRNLLVHDVPVLADFPILPLRYDQADSSLPPLVGTRYGDIPLCNLERDDPRFLIDIAYARRLQMNNVVLWWSSGPRPDHAGYEQDDVTGPLDSVAMPSVNNPGTYASVCIDLEVRNLTINTILTSSIINELEGSDSIAFNPAADAGPSDGSEMLHSESAFANAGVLVLREMVKSWWTEACKDSPMADLLVQHLVRWVESPDSFMYDRALHYYVQMMSRKALLQLMADFRRVGSQVVFANSNRLLLQTTKSEVGNAYAYSQYILKSIKSKPLFHFIDLEIKEYWDYLVWYDEYNYGGKGCQEVVEAEQQSLETIMCWQMKTFLPIRLQDTFQHWVVEFIQLMHSIKRPHNGDPDSTRRTTQLPFRSLTPSQDVDDKDKPEIILTKSFERPLKKENPKSHIHTSAGDATPRTRFRLVFPASPGE

SEQ ID NO: 10520 - DNA, 941 bp, Muscodor strobelii
  misc_feature: SGI EST ID NO. CUFF.24819.0
  misc_feature: Variant of the nucleotide sequence at SEQ ID NO 10518
gtagtcttttgaagcatttgtaaaagtcctttgcacattgttcctttgccaatgccgtttacaagagtgtatatccaaccctcgaatctctaattcgctgctcgagagtgagccatacgagcctgccacccctcccccccaggccaatttaccgccgactcgaccggatatgcctaacaccagcctccggaaacctcaaaaaggcttccgccgcggcggaaagcaagcctaccatggcgtcactcgcacacgcaccttcgccgccacctcccgcaccgaaggcacctctgccgacgagagggcagaacgcaacgccctggcacagcaaattgatgagtccatgggctttgtacggcatgaagccggccgtatgcgggaaggctggctggtcaacgtccagcccaccactatagccctcgatgacgaccgtgtgccgggtggtcgagcagccctggactgctactttatcgaggaggacgggcagacattcaaaggcacgatcgagtacgaaccatacttcctcatcgctgttcgcaaggggcgagagagcgaggttgaagaatggctgaagcgtgtgcccggaggtggcgtggtgcgctcggtgagaaaagtagagaaagaggatctctccatgcccaatcacttgctgggctaccgccgcacttttctcgagctgcgctttgggaatgtgcaggacttaatgtcggccaggagagatatcatgcccattgcggagaggaatcgcaaggccatgggcacagttgatgtatatgccgaggtcgcatccgaacaagccggattcgacctctttgatgattcacgtgatgacgatagacgacataatgcttccttttctgacgccagcgactacattgtcgatattagagaatttgatgttccataccatgtacgagtaatgatagatatgaatatacgagtag

SEQ ID NO: 10521 - DNA, 534 bp, Muscodor strobelii
  misc_feature: SGI cDNA ID NO. 563343
  misc_feature: Reduced expression when VOC is produced
  misc_feature: Encodes the peptide sequence at SEQ ID NO 10522
atggcacaagaagaaaacaaaccaccgccaatccgtggtcccccaccaggcgcaaccgaagtcccagaccacgtaaagaagccccagatatacgaagttttcaacgccccaacaccctccgaaactcagacacaacaaaagcaagaaccaagaccaactataaaagacgccttcgactcgataaaacccgacgagttcctaacgatacaccagcttccctgcgccagggaaggcttcatgaccggcataggcgcaggtgtcgcaataggagctgggagatatttcgtaggaggaaaggcaccaagagcagcgaactgggcattcggcgcattcttcctcggcagtataatacaatgggaatactgccaggcccagcgtcgcaaggagcgcgcagccatggcccgcgccgtggagatcatcgaccgcaagcaggccgagaagaaggcacaggccgccgaggctgcgaggttaaaaagggaggcgtacgaaaagtcacagctggagcagaaaaagagttggtacaagttttggtga

SEQ ID NO: 10522 - protein, 177 aa, Muscodor strobelii
  misc_feature: SGI Peptide ID NO. 563343
  misc_feature (38)..(177): NCBI GI: 171679866 Blast Desc: protein product [Podospora anserina] gi|170939559|emb|CAP64786.1| protein product [Podospora anserina]
  misc_feature (11)..(177): NCBI GI: 154301330 Blast Desc: BC1G_10335 [Botryotinia fuckeliana B05.10] gi|150856236|gb|EDN31428.1| BC1G_10335 [Botryotinia fuckeliana B05.10]
  misc_feature (51)..(177): NCBI GI: 46123373 Blast Desc: FG06064.1 [Gibberella zeae PH-1]
  misc_feature (51)..(177): NCBI GI: 85076542 Blast Desc: NCU04549 [Neurospora crassa OR74A] gi|28916974|gb|EAA26704.1| [Neurospora crassa OR74A]
  misc_feature (14)..(177): NCBI GI: 256733017 Blast Desc: [Nectria haematococca mpVI 77-13-4]
  misc_feature (36)..(177): NCBI GI: 39943680 Blast Desc: MGG_03851 [Magnaporthe grisea 70-15] gi|145014539|gb|EDJ99107.1| MGG_03851 [Magnaporthe grisea 70-15]
  misc_feature (51)..(145): NCBI GI: 116204161 Blast Desc: CHGG_09964 [Chaetomium globosum CBS 148.51] gi|88176092|gb|EAQ83560.1| CHGG_09964 [Chaetomium globosum CBS 148.51]
  misc_feature (28)..(177): NCBI GI: 261354549 Blast Desc: conserved [Verticillium albo-atrum VaMs.102]
  misc_feature (6)..(177): NCBI GI: 240105053 Blast Desc: CPC735_046160 [Coccidioides posadasii C735 delta SOWgp]
  misc_feature (53)..(177): NCBI GI: 261204047 Blast Desc: conserved [Ajellomyces dermatitidis SLH14081] gi|239587022|gb|EEQ69665.1| conserved [Ajellomyces dermatitidis SLH14081] gi|239608743|gb|EEQ85730.1| conserved [Ajellomyces
  misc_feature: Useful for introducing or modulating the production of volatile compounds
MAQEENKPPPIRGPPPGATEVPDHVKKPQIYEVFNAPTPSETQTQQKQEPRPTIKDAFDSIKPDEFLTIHQLPCAREGFMTGIGAGVAIGAGRYFVGGKAPRAANWAFGAFFLGSIIQWEYCQAQRRKERAAMARAVEIIDRKQAEKKAQAAEAARLKREAYEKSQLEQKKSWYKFW

SEQ ID NO: 10523 - DNA, 2979 bp, Muscodor strobelii
  misc_feature: SGI EST ID NO. CUFF.24850.1
  misc_feature: Variant of the nucleotide sequence at SEQ ID NO 10521
gaagattgaaccgacatggatgcatcatccacagcgtcatagctccagacgagctctacgggaactctacaacatcaccaaaacctcccaattgacagcccacaacgttcacacaccccataacaatggcacaagaagaaaacaaaccaccgccaatccgtggtcccccaccaggcgcaaccgaagtcccagaccacgtaaagaagccccagatatacgaagttttcaacgccccaacaccctccgaaactcagacacaacaaaagcaagaaccaagaccaactataaaagacgccttcgactcgataaaacccgacgagttcctaacgatacaccagcttccctgcgccagggaaggcttcatgaccggcataggcgcaggtgtcgcaataggagctgggagatatttcgtaggaggaaaggcaccaagagcagcgaactgggcattcggcgcattcttcctcggcagtataatacaatgggaatactgccaggcccagcgtcgcaaggagcgcgcagccatggcccgcgccgtggagatcatcgaccgcaagcaggccgagaagaaggcacaggccgccgaggctgcgaggttaaaaagggaggcgtacgaaaagtcacagctggagcagaaaaagagttggtacaagttttggtgaagatgttgggtggggttcatgtaccaaatatctaggtatttagcgtgtattgggctaatttttgcactagtaagtgtatatatcatcacaacctagaaggacagggtgtgaactcagtagctgtatataagaagtggtggatgatgttcatcatggctttagctgagccataccactacaaactatctggatagtaactcaaggcttgggtataacattcctgtcccggtcgcaaacgccaacgccatagattcgcgttcctgctgtactggctgagctggctcagtatcgcaaccttgccagatcatccgccattgtacaccggaagccatggtattacagagctgggcagtgctgtacaaaatatctgaatataaatgcccaaatcccatacaggagagctcgtttggctcgtgaacatgtttcctcgtgccccaacgccgcccctttccatgctgccggaatgaagtgctcgtagccaacgcatagccagagccgaattaatagaccagctcagtatcgtatactcctaatgcaaaagtcgccgctccgaaatcaacgcgacaatcgattcctatcatggatccagtgatgagagaaattgttaaatatagccaatacctggccttcatgtcgtaatgacagtcgtgggttctgcctcggaaaagtgaactcgcacagccgagtgtcgtctagacagctcggcaccaggctgttcccggcgacgctggttcctcctagctctggcgtcgctctcctcgcgcttcttatactcggcgagttgctgccggcgcttctgcgcacgttggtacgctacggcaggagtagggcggaatccaatgccattgatgcccgtgccatcgtcatccttgtcctcggggtcgtagatggtgatctcgtcctcgcgccaagtgagagcggctcggacagggtcgatgatgattggttcgtcatcttccttgtcggcggtctgtaccggattccttcgcttagatgagggcggtggagtgcccgtgcgctttcgacttcgagatttcgagtccgacagacggttaatcgacggatatgatttctgcaggagtccggatttcttatcctttggagaaaaggcaaactggaaatcggtgaagctggttgtgccgtgggcagtcccggataccagatccggggtagcaagaggaatgtttttctctggtgaatcattcactgacgcgagagggttgtcgattttgtccactttgttggcctcgttcatgggtctctggttggcaatatctgcgaggatattgggttgcagatcactaaatagcttggtgcgcttgcgtgtaccttcgtcatcgtctgtgtcgatttgcatcgctgcattggcgctggtgtcggcgccattaaacctgaatgttgtagtggtgtcgagcttgttttcgtggaattgcagggcatcagcaacccggctgtcacgatcggtggcagctccaactgccccacccccgctctcggcgtcgctgccggtggtggcaccctccctgctgccatccagcctcaagtctcggaacctctgagcaaccttggatcgcggactgttgcttccatcctcagctagctcctcaacttgcctgaccggatgaagcaggctgggcggttggaaagaaaagatgggtctggcctggcgatgaggggtgggcgaggcagaaaggcgcaggtctgtgatgctctcgtcccgttttcgcttgggagttggcgttggtgaagctatctcagccatgttgtccaccagctacgtaatgatgaaacggttatgttgtaactgttaagtgtaatattgcaaccagaatattcttgaaccatagaatgtgtgcgtccttgacttggcgacaggtttcgaatttgcaggtcacgaggtcactgtactgtacgagactcagaaccccgtcaggacgtggcgaaaggtgtaaggtgcagattggctgatcagtcaagtgacggctgtgcgacgatgagggcaacacaaaaccacaatcgggaatgatttgtgtggtggtggctaatgctgtggaatggtggtgaattggcgacggcagacggaaaccagacaaccagtcggagagatgcaagacctgcaagatgggagctgctacaccaccctcactgtgggcagaaggaaggaggcacagatttggtagcttcagttgatgcttgctcacattatcagtttcattattagacaacgagactgcctgtttttcgaagtctcatgaatgcagcgtcttctttattctgtcagataggaagtagctcccagctgatcattctgtgccccgtc

SEQ ID NO: 10524 - DNA, 1134 bp, Muscodor strobelii
  misc_feature: SGI cDNA ID NO. 563344
  misc_feature: Encodes the peptide sequence at SEQ ID NO 10525
atggctgagatagcttcaccaacgccaactcccaagcgaaaacgggacgagagcatcacagacctgcgcctttctgcctcgcccacccctcatcgccaggccagacccatcttttctttccaaccgcccagcctgcttcatccggtcaggcaagttgaggagctagctgaggatggaagcaacagtccgcgatccaaggttgctcagaggttccgagacttgaggctggatggcagcagggagggtgccaccaccggcagcgacgccgagagcgggggtggggcagttggagctgccaccgatcgtgacagccgggttgctgatgccctgcaattccacgaaaacaagctcgacaccactacaacattcaggtttaatggcgccgacaccagcgccaatgcagcgatgcaaatcgacacagacgatgacgaaggtacacgcaagcgcaccaagctatttagtgatctgcaacccaatatcctcgcagatattgccaaccagagacccatgaacgaggccaacaaagtggacaaaatcgacaaccctctcgcgtcagtgaatgattcaccagagaaaaacattcctcttgctaccccggatctggtatccgggactgcccacggcacaaccagcttcaccgatttccagtttgccttttctccaaaggataagaaatccggactcctgcagaaatcatatccgtcgattaaccgtctgtcggactcgaaatctcgaagtcgaaagcgcacgggcactccaccgccctcatctaagcgaaggaatccggtacagaccgccgacaaggaagatgacgaaccaatcatcatcgaccctgtccgagccgctctcacttggcgcgaggacgagatcaccatctacgaccccgaggacaaggatgacgatggcacgggcatcaatggcattggattccgccctactcctgccgtagcgtaccaacgtgcgcagaagcgccggcagcaactcgccgagtataagaagcgcgaggagagcgacgccagagctaggaggaaccagcgtcgccgggaacagcctggtgccgagctgtctagacgacactcggctgtgcgagttcacttttccgaggcagaacccacgactgtcattacgacatga

SEQ ID NO: 10525 - protein, 377 aa, Muscodor strobelii
  misc_feature: SGI Peptide ID NO. 563344
  misc_feature (226)..(377): NCBI GI: 46123371 Blast Desc: FG06063.1 [Gibberella zeae PH-1]
  misc_feature (10)..(348): NCBI GI: 261354548 Blast Desc: conserved [Verticillium albo-atrum VaMs.102]
  misc_feature (1)..(377): NCBI GI: 39943682 Blast Desc: MGG_03852 [Magnaporthe grisea 70-15] gi|145014540|gb|EDJ99108.1| MGG_03852 [Magnaporthe grisea 70-15]
  misc_feature (229)..(377): NCBI GI: 256732575 Blast Desc: NECHADRAFT_78898 [Nectria haematococca mpVI 77-13-4]
  misc_feature (3)..(363): NCBI GI: 171679868 Blast Desc: protein product [Podospora anserina] gi|170939560|emb|CAP64787.1| protein product [Podospora anserina]
  misc_feature (57)..(332): NCBI GI: 154301332 Blast Desc: BC1G_10336 [Botryotinia fuckeliana B05.10] gi|150856237|gb|EDN31429.1| BC1G_10336 [Botryotinia fuckeliana B05.10]
  misc_feature (229)..(377): NCBI GI: 156039597 Blast Desc: SS1G_11935 [Sclerotinia sclerotiorum 1980] gi|154697672|gb|EDN97410.1| SS1G_11935 [Sclerotinia sclerotiorum 1980]
  misc_feature (240)..(347): NCBI GI: 240105052 Blast Desc: CPC735_046150 [Coccidioides posadasii C735 delta SOWgp]
  misc_feature (240)..(347): NCBI GI: 119195043 Blast Desc: CIMG_01896 [Coccidioides immitis RS]
  misc_feature (257)..(366): NCBI GI: 154278277 Blast Desc: HCAG_05421 [Ajellomyces capsulatus NAm1] gi|150413539|gb|EDN08922.1| HCAG_05421 [Ajellomyces capsulatus NAm1]
MAEIASPTPTPKRKRDESITDLRLSASPTPHRQARPIFSFQPPSLLHPVRQVEELAEDGSNSPRSKVAQRFRDLRLDGSREGATTGSDAESGGGAVGAATDRDSRVADALQFHENKLDTTTTFRFNGADTSANAAMQIDTDDDEGTRKRTKLFSDLQPNILADIANQRPMNEANKVDKIDNPLASVNDSPEKNIPLATPDLVSGTAHGTTSFTDFQFAFSPKDKKSGLLQKSYPSINRLSDSKSRSRKRTGTPPPSSKRRNPVQTADKEDDEPIIIDPVRAALTWREDEITIYDPEDKDDDGTGINGIGFRPTPAVAYQRAQKRRQQLAEYKKREESDARARRNQRRREQPGAELSRRHSAVRVHFSEAEPTTVITT

SEQ ID NO: 10526 - DNA, 1029 bp, Muscodor strobelii
  misc_feature: SGI cDNA ID NO. 563345
  misc_feature: Elevated expression when VOC is produced
  misc_feature: Encodes the peptide sequence at SEQ ID NO 10527
atgtctgatgagatttccttcctgcctctaggggctataattcaatctatcgtcatcggagggacgaacattgtgcagggatttccgacacaggagctttacgcctctcataacagccccttcttcggcgagaccataggccgggttgcgaaccgtatcgaaaaggccaagatcaactccctgaacggcaaatcttacacactcgccgtaaataatggcccaaacgctttacatggaggacctaagggctggggcaagagggtatggagcggcccgaagccggtcggaattcgccaggttgccggaatcgacggcgagctaaagggtggcgagagtgtagagttcacacttacgagcgaggatggtgatgaaggttaccctggtgaggtcgtggccaaggttgtgtatactgctggcaagaccaccgagggaggtaaggagattacggtcttgggcatagagtatgaagccgagcttgttggaggtgcggaggagactgccatcaacatgactaaccatacatacttcaacctgacaggagggccatctatcgaggggacagtagtacagctctgtacaccttcatacatccccgttgacgacacgggtatccccacaggcaaacctaccacgttcgccaaggtcactacaaatgagcagtttactcttgggccgcaagagcccgacatcgatgactgtttcgttgtcgatgcggcggcctcgcccaactctgtccccatcgatacgcgaagtcggccgctggtagcactcgtcaaggctcatcaccccgagtccaagatacatctcgaagtccacagcacagagcctgcgttccagtactacactggcaagtacatcaacgttcctgaggtcgagggagtaccggcccgagctccacgaagtggtttctgtgtcgagcctagtcgtttcgtgaatgccgtcaatgttgaggactggaagaatcaagtattgttgaaaaagggtgagaagtatggcagccggactctatataaggcgtggaggcaatag

SEQ ID NO: 10527 - protein, 342 aa, Muscodor strobelii
  misc_feature: SGI Peptide ID NO. 563345
  misc_feature (1)..(338): Pfam Id: PF01263 Pfam Desc: Aldose 1-epimerase
  misc_feature (4)..(338): Pfam Id: PF01263 Pfam Desc: Aldose 1-epimerase
  misc_feature (1)..(342): NCBI GI: 116204131 Blast Desc: CHGG_09949 [Chaetomium globosum CBS 148.51] gi|88176077|gb|EAQ83545.1| CHGG_09949 [Chaetomium globosum CBS 148.51]
  misc_feature (5)..(342): NCBI GI: 171678599 Blast Desc: protein product [Podospora anserina] gi|170937369|emb|CAP62027.1| protein product [Podospora anserina]
  misc_feature (1)..(342): NCBI GI: 39943684 Blast Desc: MGG_03853 [Magnaporthe grisea 70-15] gi|145014541|gb|EDJ99109.1| MGG_03853 [Magnaporthe grisea 70-15]
  misc_feature (1)..(342): NCBI GI: 85091525 Blast Desc: NCU09705 [Neurospora crassa OR74A] gi|28920337|gb|EAA29708.1| NCU09705 [Neurospora crassa OR74A]
  misc_feature (1)..(340): NCBI GI: 46123363 Blast Desc: FG06059.1 [Gibberella zeae PH-1]
  misc_feature (1)..(342): NCBI GI: 261354547 Blast Desc: bifunctional protein GAL10 [Verticillium albo-atrum VaMs.102]
  misc_feature (1)..(340): NCBI GI: 256733015 Blast Desc: NECHADRAFT_38340 [Nectria haematococca mpVI 77-13-4]
  misc_feature (5)..(341): NCBI GI: 189200777 Blast Desc: bifunctional protein GAL10 [Pyrenophora tritici-repentis Pt-1C-BFP] gi|187983824|gb|EDU49312.1| bifunctional protein GAL10 [Pyrenophora tritici-repentis
  misc_feature (5)..(341): NCBI GI: 169617808 Blast Desc: SNOG_12085 [Phaeosphaeria nodorum SN15] gi|111059377|gb|EAT80497.1| SNOG_12085 [Phaeosphaeria nodorum SN15]
  misc_feature (1)..(342): NCBI GI: 154295186 Blast Desc: BC1G_13536 [Botryotinia fuckeliana B05.10] gi|150844219|gb|EDN19412.1| BC1G_13536 [Botryotinia fuckeliana B05.10]
  misc_feature (4)..(338): SWISSPROT Homolog: EC 5.1.3.2 UDP-glucose 4-epimerase
  misc_feature (4)..(338): SWISSPROT Homolog: EC 5.1.3.3 Aldose 1-epimerase
  misc_feature: Useful for introducing or modulating the production of volatile compounds
MSDEISFLPLGAIIQSIVIGGTNIVQGFPTQELYASHNSPFFGETIGRVANRIEKAKINSLNGKSYTLAVNNGPNALHGGPKGWGKRVWSGPKPVGIRQVAGIDGELKGGESVEFTLTSEDGDEGYPGEVVAKVVYTAGKTTEGGKEITVLGIEYEAELVGGAEETAINMTNHTYFNLTGGPSIEGTVVQLCTPSYIPVDDTGIPTGKPTTFAKVTTNEQFTLGPQEPDIDDCFVVDAAASPNSVPIDTRSRPLVALVKAHHPESKIHLEVHSTEPAFQYYTGKYINVPEVEGVPARAPRSGFCVEPSRFVNAVNVEDWKNQVLLKKGEKYGSRTLYKAWRQ

SEQ ID NO: 10528 - DNA, 3390 bp, Muscodor strobelii
  misc_feature: SGI EST ID NO. CUFF.24832.0
  misc_feature: Variant of the nucleotide sequence at SEQ ID NO 10526
tgcctcctactaccccacacccgttgcactgggaattacgactgtagaagccatgtggtcatttatataatagcctgaatatatcgtcactgcaacaggccagatagtcattacgcttcactttctgcgacacatattaagtctgaaatgaagacaatactatactgcatttgagtagaagatctgtctattctcaaccaagcgaaccactcacagacaatcggtcatcaccggcatctgattaaaccgctctggcagcatacaagatgtctgatgagatttccttcctgcctctaggggctataattcaatctatcgtcatcggagggacgaacattgtgcagggatttccgacacaggagctttacgcctctcataacagccccttcttcggcgagaccataggccgggttgcgaaccgtatcgaaaaggccaagatcaactccctgaacggcaaatcttacacactcgccgtaaataatggcccaaacgctttacatggaggacctaagggctggggcaagagggtatggagcggcccgaagccggtcggaattcgccaggttgccggaatcgacggcgagctaaagggtggcgagagtgtagagttcacacttacgagcgaggatggtgatgaaggttaccctggtgaggtcgtggccaaggttgtgtatactgctggcaagaccaccgagggaggtaaggagattacggtcttgggcatagagtatgaagccgagcttgttggaggtgcggaggagactgccatcaacatgactaaccatacatacttcaacctgacaggagggccatctatcgaggggacagtagtacagctctgtacaccttcatacatccccgttgacgacacgggtatccccacaggcaaacctaccacgttcgccaaggtcactacaaatgagcagtttactcttgggccgcaagagcccgacatcgatgactgtttcgttgtcgatgcggcggcctcgcccaactctgtccccatcgatacgcgaagtcggccgctggtagcactcgtcaaggctcatcaccccgagtccaagatacatctcgaagtccacagcacagagcctgcgttccagtactacactggcaagtacatcaacgttcctgaggtcgagggagtaccggcccgagctccacgaagtggtttctgtgtcgagcctagtcgtttcgtgaatgccgtcaatgttgaggactggaagaatcaagtattgttgaaaaagggtgagaagtatggcagccggactctatataaggcgtggaggcaatagactacaggtatacagtaccagggtcagctatcttaatcaagagatcagtggccttgtaggctctaagctccctatcatcccaaacatgtaaccagcataatttctacatcctttgccccgttttgtgcaatgtctcactaatcttcatcttcctcattctcaccctcttcttgagctggcagcggaggtgccttagcttcttgtttccgaaatagtccagctagaaactcgctcgagctagcctcctctatgctcttatcctcgcgcttgcgcaagaaacgcgggaaccgcaggctgagaccacgctcctggcttacaagcccaatagccgccgtgtacgtgggtgaaagcgtgatatctgcgaaagccatctcccaaacctcctgcggctcaaaccagacatctggatgcccagcatactcgacgaagcttggtttcgttcgtcgagtatttttgtatttgcgtctttgagtaggttccgcatcttccacgtcatcgtcttcgtcttcgtcactttcagaattattttcattttgctcgctccgtccatcgtcttcggctgcgttagattcggggtcgccagatccatcgtcgtaaaatttcttgtttgctttgtagaaggtgtccgtaaatcccgatatgcatttacacacagcttcaagggaccctgtttcttcgttgcgcacggcaagtaggatcggtgaccaccatttcgcctttcggcccattccgtgccagcccgccactgggatgaggtccagtgtgtcaaaagatgcgctgtaatctttcttcactttgagccatgaatcaagtctcttgtcaggctcatacgtggcaagaagcggcttccgccgggacgatgtcgtaggttttgttttcgatgcttgttgatttactggctcaggatttgtttccacggcgctaggagtttctactggggcagggaggttaagtaagttatctaatatcttgaccataatcccttcgcattttgaatctgtagcttgtttgaagaaatcgagcacggtctctgaatcggcagatgtagcatcgaggctgcgaacccatgtgaagcgattcggtatttcaacgaatagcgagcgtagtagacttcggcgctcacgaagcgggcgatcgagcagcggctggccattgagatacatcaaatcaaatgcaaaaagacatacgtcgatggtgatactaccaattgcaacgtcttttcgtgcacgattcgtgagagtctgaaaattcttcagctcgccagtcttctgatccacagcaactacctcaccctccattatgaagctgttaacgccctcaccacggatttgcggcacgagcgctaccaggtccggatatttgtctgtcatcacttccagatgtcgtgagaagattgacacctttccggcagagtcacagtgtacttgcgcacgctggccgtcatacttgaactcgcaggcgaaatcacgcccctgaagctttgtgagcatctcagagagatctcgcgtgatacttcccagcattgggcgtaggggtacatgcagtgttagcccgcagcgaactagtagttcgggacacacgccaatctcaagcatcaccgggattaggtcgttgtaattaggtcgtcgagcaaaacacgctttaacaacttcttctgcgcgcgaccagacttctgcgagctcctcccttttcatccgcttgagctcatcaacagaacgttggggaaagtgatcacggtctgtttcagaaagactcgagggacgagacaagagaaacgctcgcgaaagcgcaatcaggagcgtagtcttcacggcgcctatcctgagatgttggcacagtgtgcgcacgatgaatcgactttcctcccctcctcgtgcatcctgcaacaggcggtctaccagacgttgttttgtctctgcactgccctgtccctgcgcattagcaatcttgacaagagagctgtacacgcctttgatagttagaggcttcggggcacggagcgtgaagctttgcttcttcttagcctcgaatgctacatctccagcgtctccatgcttatcaaagattgctttcaaagaacgattatcaagcccgc

SEQ ID NO: 10529 - DNA, 2721 bp, Muscodor strobelii
  misc_feature: SGI cDNA ID NO. 563346
  misc_feature: Encodes the peptide sequence at SEQ ID NO 10530
atgccgagccctgcaaagaaaaggaagctcaacggcgattcaaagagcagtcttcctacacggggcctcgagtatttctttgcgaagcaagcccaacaaaatggctcagaatcaccattacagaatcaagaagtaccaaaaacggagcttgataagccagtggaggatgagatgactgacgaagagctggcccgcaaactccaagctgaatgggaccgagaggatgcagtcgcaactgcggcaggccccgcaagtgatgctatgaaacagaatgacgagacacatttgtctaccaccctctccgaaaaggatcatgcagaacatgaaaactcaaatgacccgtcgtcacggtcgccaaacccgaagatattcgagagtgccatcaagggaggcaaagggacattgtcactgcagtccgtctcagcatctgtagactcaatcacggagtccataccctttgatgaaagccctctgactttcaaccccgggcaatatctaccgcagctcaaggagcattggatcaaagagggaaatcgtgcctcatatgccctacttacgcgctgcttcgtgctagtgagcgggacatcgagtcggataaagatagtggatacgctggtcaattgtctgcgtgtacttattgaaggtaaccctgagagtctccttccagctgtgtggctatcgacgaacgccatttcaccaccatatatatctttagaactaggacttggcggctcagctatatctaaggcactgcgtcaagtctgcgggcttgataatcgttctttgaaagcaatctttgataagcatggagacgctggagatgtagcattcgaggctaagaagaagcaaagcttcacgctccgtgccccgaagcctctaactatcaaaggcgtgtacagctctcttgtcaagattgctaatgcgcagggacagggcagtgcagagacaaaacaacgtctggtagaccgcctgttgcaggatgcacgaggaggggaggaaagtcgattcatcgtgcgcacactgtgccaacatctcaggataggcgccgtgaagactacgctcctgattgcgctttcgcgagcgtttctcttgtctcgtccctcgagtctttctgaaacagaccgtgatcactttccccaacgttctgttgatgagctcaagcggatgaaaagggaggagctcgcagaagtctggtcgcgcgcagaagaagttgttaaagcgtgttttgctcgacgacctaattacaacgacctaatcccggtgatgcttgagattggcgtgtgtcccgaactactagttcgctgcgggctaacactgcatgtacccctacgcccaatgctgggaagtatcacgcgagatctctctgagatgctcacaaagcttcaggggcgtgatttcgcctgcgagttcaagtatgacggccagcgtgcgcaagtacactgtgactctgccggaaaggtgtcaatcttctcacgacatctggaagtgatgacagacaaatatccggacctggtagcgctcgtgccgcaaatccgtggtgagggcgttaacagcttcataatggagggtgaggtagttgctgtggatcagaagactggcgagctgaagaattttcagactctcacgaatcgtgcacgaaaagacgttgcaattggtagtatcaccatcgacgtatgtctttttgcatttgatttgatgtatctcaatggccagccgctgctcgatcgcccgcttcgtgagcgccgaagtctactacgctcgctattcgttgaaataccgaatcgcttcacatgggttcgcagcctcgatgctacatctgccgattcagagaccgtgctcgatttcttcaaacaagctacagattcaaaatgcgaagggattatggtcaagatattagataacttacttaacctccctgccccagtagaaactcctagcgccgtggaaacaaatcctgagccagtaaatcaacaagcatcgaaaacaaaacctacgacatcgtcccggcggaagccgcttcttgccacgtatgagcctgacaagagacttgattcatggctcaaagtgaagaaagattacagcgcatcttttgacacactggacctcatcccagtggcgggctggcacggaatgggccgaaaggcgaaatggtggtcaccgatcctacttgccgtgcgcaacgaagaaacagggtcccttgaagctgtgtgtaaatgcatatcgggatttacggacaccttctacaaagcaaacaagaaattttacgacgatggatctggcgaccccgaatctaacgcagccgaagacgatggacggagcgagcaaaatgaaaataattctgaaagtgacgaagacgaagacgatgacgtggaagatgcggaacctactcaaagacgcaaatacaaaaatactcgacgaacgaaaccaagcttcgtcgagtatgctgggcatccagatgtctggtttgagccgcaggaggtttgggagatggctttcgcagatatcacgctttcacccacgtacacggcggctattgggcttgtaagccaggagcgtggtctcagcctgcggttcccgcgtttcttgcgcaagcgcgaggataagagcatagaggaggctagctcgagcgagtttctagctggactatttcggaaacaagaagctaaggcacctccgctgccagctcaagaagagggtgagaatgaggaagatgaagattag

SEQ ID NO: 10530 - protein, 906 aa, Muscodor strobelii
  misc_feature: SGI Peptide ID NO. 563346
  misc_feature (714)..(822): Pfam Id: PF04679 Pfam Desc: ATP dependent DNA ligase C terminal region
  misc_feature (445)..(690): Pfam Id: PF01068 Pfam Desc: ATP dependent DNA ligase domain
  misc_feature (180)..(360): Pfam Id: PF04675 Pfam Desc: DNA ligase N terminus
  misc_feature (714)..(745): Pfam Id: PF04679 Pfam Desc: ATP dependent DNA ligase C terminal region
  misc_feature (445)..(630): Pfam Id: PF01068 Pfam Desc: ATP dependent DNA ligase domain
  misc_feature (671)..(690): Pfam Id: PF01068 Pfam Desc: ATP dependent DNA ligase domain
  misc_feature (1)..(906): NCBI GI: 46123877 Blast Desc: FG06316.1 [Gibberella zeae PH-1]
  misc_feature (1)..(891): NCBI GI: 145606915 Blast Desc: MGG_03854 [Magnaporthe grisea 70-15] gi|145014542|gb|EDJ99110.1| MGG_03854 [Magnaporthe grisea 70-15]
  misc_feature (1)..(890): NCBI GI: 154292012 Blast Desc: BC1G_14933 [Botryotinia fuckeliana B05.10] gi|150846352|gb|EDN21545.1| BC1G_14933 [Botryotinia fuckeliana B05.10]
  misc_feature (1)..(888): NCBI GI: 171678601 Blast Desc: protein product [Podospora anserina] gi|170937370|emb|CAP62028.1| protein product [Podospora anserina]
  misc_feature (1)..(906): NCBI GI: 169622727 Blast Desc: SNOG_14590 [Phaeosphaeria nodorum SN15] gi|111057010|gb|EAT78130.1| SNOG_14590 [Phaeosphaeria nodorum SN15]
  misc_feature (1)..(890): NCBI GI: 242784288 Blast Desc: DNA ligase I, [Talaromyces stipitatus ATCC 10500] gi|218720504|gb|EED19923.1| DNA ligase I, [Talaromyces stipitatus ATCC 10500]
  misc_feature (1)..(905): NCBI GI: 212527654 Blast Desc: DNA ligase I, [Penicillium marneffei ATCC 18224] gi|210073382|gb|EEA27469.1| DNA ligase I, [Penicillium marneffei ATCC 18224]
  misc_feature (1)..(903): NCBI GI: 238486842 Blast Desc: DNA ligase I, [Aspergillus flavus NRRL3357] gi|220699538|gb|EED55877.1| DNA ligase I, [Aspergillus flavus NRRL3357]
  misc_feature (1)..(903): NCBI GI: 169770701 Blast Desc: [Aspergillus oryzae RIB40] gi|83767679|dbj|BAE57818.1| protein product [Aspergillus oryzae]
  misc_feature (1)..(900): NCBI GI: 145232901 Blast Desc: An02g06890 [Aspergillus niger] gi|134056744|emb|CAK44233.1| protein product [Aspergillus niger]
  misc_feature (4)..(886): SWISSPROT Homolog: EC 6.5.1.1 DNA ligase (ATP)
MPSPAKKRKLNGDSKSSLPTRGLEYFFAKQAQQNGSESPLQNQEVPKTELDKPVEDEMTDEELARKLQAEWDREDAVATAAGPASDAMKQNDETHLSTTLSEKDHAEHENSNDPSSRSPNPKIFESAIKGGKGTLSLQSVSASVDSITESIPFDESPLTFNPGQYLPQLKEHWIKEGNRASYALLTRCFVLVSGTSSRIKIVDTLVNCLRVLIEGNPESLLPAVWLSTNAISPPYISLELGLGGSAISKALRQVCGLDNRSLKAIFDKHGDAGDVAFEAKKKQSFTLRAPKPLTIKGVYSSLVKIANAQGQGSAETKQRLVDRLLQDARGGEESRFIVRTLCQHLRIGAVKTTLLIALSRAFLLSRPSSLSETDRDHFPQRSVDELKRMKREELAEVWSRAEEVVKACFARRPNYNDLIPVMLEIGVCPELLVRCGLTLHVPLRPMLGSITRDLSEMLTKLQGRDFACEFKYDGQRAQVHCDSAGKVSIFSRHLEVMTDKYPDLVALVPQIRGEGVNSFIMEGEVVAVDQKTGELKNFQTLTNRARKDVAIGSITIDVCLFAFDLMYLNGQPLLDRPLRERRSLLRSLFVEIPNRFTWVRSLDATSADSETVLDFFKQATDSKCEGIMVKILDNLLNLPAPVETPSAVETNPEPVNQQASKTKPTTSSRRKPLLATYEPDKRLDSWLKVKKDYSASFDTLDLIPVAGWHGMGRKAKWWSPILLAVRNEETGSLEAVCKCISGFTDTFYKANKKFYDDGSGDPESNAAEDDGRSEQNENNSESDEDEDDDVEDAEPTQRRKYKNTRRTKPSFVEYAGHPDVWFEPQEVWEMAFADITLSPTYTAAIGLVSQERGLSLRFPRFLRKREDKSIEEASSSEFLAGLFRKQEAKAPPLPAQEEGENEEDED

SEQ ID NO: 10531 - DNA, 3006 bp, Muscodor strobelii
  misc_feature: SGI cDNA ID NO. 563347
  misc_feature: Reduced expression when VOC is produced
  misc_feature: Encodes the peptide sequence at SEQ ID NO 10532
atgccggaccccaagaacacgaccgtgggtaccgaccgtgggaaagttacctacgtcaacccgcgacgaacatcaccagagaattcaatcacactacgacaccaccgtcttgcccacgaggcatcgaaacgattctctccgactgaaattcctaatgcacactcaactaagcctgctgtcaaatcaccaagacgcaattcgtcaggagagagcaatgacactggacgaagtgacccgagaaaatggttcgatcagtctaacaccaacgctgtcgccaacacaaccccaatggacatagatccgccattctatcaaagagagacggattcgtcgaatgaggagctccatcccatgccaacgcagagccccgcgtatcgatatgttcaaggtagagggcccgtctttcgcccaggtgtcacacagagcagcagcaccggagactatcgaagcgtcattgacgacttgacgattgagaataagcgtcttcgagaagagctccggaaatataaacaaatgggccccgactccctaaagagagacaaactcttcgaggtaaaagttcatggtttgcccaattcccagaagcgtgctcttgaagcggctttacgcgattttactacacacttagatgaatcaagcacggttgcctctaagagtcgcaagaagtcatcgggcaaatctaaggaagggcactcgtctgcttcgaaacatgcttcttcgtcctcgggatccaattccaggccagttgactctgcatacgcttcaggatcgacagggttcaattcatcgtcaaaatctcttctgccgggaaataccaaagctgcacgcatacggaacaatgaaaatgtcgagaattatttacgcgacataccggaggggctctggccacgacacggcatgatgccagagaaagacaagaagaagcttgtcgtccgacgacttgagcagcttttcaccggcaaggtaggcaatactgcagaacaagtacggtatccagctcagcctcaacctattgttgaggacattgagatggaaagcaccgatcagcaggaggccgcagtacatgaggccgcgcgcgaagccacgatccgaccacgagacaagctgatgcggaagacgagccattcgcgcgagaccacttctgggtcaaacacacagtctcaatcattggaacgatcacatggcgaccaaacgaattctaactctcgggacaacgataacggcagtcgtagcggcagtggacatggcagcgggagtggaggaagaagcggtaatgccaatacgtcaccgccgaccgttgagccagctcccgagcagcgaccgacacgcccgcgcgatctagatcccgaccgtaagcaggtcccttcagaaaatatggattacatccgacacttagggctagttgcgcctgagtcgcaatctcgattctccgccagggatgtgtctcccgatgctgacggctgggtctatctaaacctactctgcaatctggcgcaactgcacatcctcaacgttacgcccgatttcattcgtaccgcagtgacggaaaagagtactaaattccaattgtctcctgacggacgcaagattagatggcgcggcggcgacgagggaacaaagttcgccagcgacagcagtggtagtaattcgctacgccgacagtccagcgaagacacagacggatcgaacgatcaagatcagcgaaagaagaggaagacccgacctaccgacaatgacgtcacaacgcagaaggggtccaaatttagtttgggtgtgcaagactccaattcgtcggaaagctttcactacaaaccgatgtttgtgcaccaccagacgtcctcttctgacgagcagccctctgctggtgatgagacgggctcgtcgtttggcatcgacgagagtaatctgggagctgtttcgcgatggaaccagagtggtgtctctacgggcgtagctcagcctccgcgcaagcgtcggcgcgatggagccatcatttattacagtggggcacccttctgcacggacctctctggcgattgtggtgaggtttcaccagatacgtatgccatgacctcatcgctatgtaaacccgacacactacaatacagcctcgcccatcgcccatattttacacgtacaacttcgggatcggcgatcccttacaaacccctgagcgacttcaaatcctacgctgctgccaatgatctcgatgtcctcgacacaccagacatgacgtctggtgagaccgacgatgatgatatcgaagccgattttccatggtcaaatctcaaccaacaggcatttctaaccaatcttgaggcaagtggtctgggggggatctctcccgacgatcactttgtcattgtggcttcgacaaagcggcccaaggtagcaacgttcgagtccgacgatgacgatgatagttcagaggatgaaatggcaaccgtgatcaaacgacgttctctagaacgctgcagtcaagacaccagcgattcaaaaactacaacggacacaatcgcgggtaagctaaatctgctgtcgacggagtctccagtgccgcttgtcacgcctaagagcccggaacctactatcgagattgaatatgtctcggtcaaaatacgtcgcttgccgcccgtgccgctaccgccacccgcattttactgcccatccagtggctcagactccgatgacgaggatagcttagacgacgaggcttacgtgtcatcagaaagaagcgttcttagcaaacgacccatggtggaaggcagccccgggtccgacaaccgtgagttgtcgggcaatgacgaggaagacgaagattcggacaaagacctcgactttgggtctcacgacaacctgctgtacgcgggtgaccgtcacttatctggactaaaagttgggcaggaacccaaaatgctacctatttcgaaggttgcgacgggtagctcagtcgctacagcgggagacgcagctagtggctacaacagctcaattgaggatgcttga

SEQ ID NO: 10532 - protein, 1001 aa, Muscodor strobelii
  misc_feature: SGI Peptide ID NO. 563347
  misc_feature (13)..(1000): Pfam Id: PF09421 Pfam Desc: Frequency clock protein
  misc_feature (354)..(899): Pfam Id: PF09421 Pfam Desc: Frequency clock protein
  misc_feature (21)..(323): Pfam Id: PF09421 Pfam Desc: Frequency clock protein
  misc_feature (18)..(1001): NCBI GI: 6016052 Blast Desc: FRQ_LEPAU RecName: Full=Frequency clock protein gi|852504|gb|AAB96844.1| frequency clock protein [Leptosphaeria australiensis]
  misc_feature (21)..(881): NCBI GI: 46123353 Blast Desc: FG06054.1 [Gibberella zeae PH-1]
  misc_feature (1)..(1000): NCBI GI: 171679583 Blast Desc: protein product [Podospora anserina] gi|170939417|emb|CAP64645.1| protein product [Podospora anserina]
  misc_feature (15)..(881): NCBI GI: 256733011 Blast Desc: NECHADRAFT_20803 [Nectria haematococca mpVI 77-13-4]
  misc_feature (21)..(994): NCBI GI: 6016053 Blast Desc: FRQ_SORFI RecName: Full=Frequency clock protein gi|530050|gb|AAA20825.1| ORF; similar to frequency gene [Sordaria fimicola]
  misc_feature (21)..(800): NCBI GI: 261355084 Blast Desc: frequency clock protein [Verticillium albo-atrum VaMs.102]
  misc_feature (21)..(994): NCBI GI: 67476450 Blast Desc: FRQ_NEUCR RecName: Full=Frequency clock protein gi|40804622|emb|CAF05882.1| period clock protein FRQ [Neurospora crassa]
  misc_feature (21)..(994): NCBI GI: 595952 Blast Desc: FRQ [Neurospora crassa]
  misc_feature (97)..(994): NCBI GI: 164426983 Blast Desc: NCU02265 [Neurospora crassa OR74A] gi|157071555|gb|EAA30673.2| NCU02265 [Neurospora crassa OR74A]
  misc_feature (133)..(889): NCBI GI: 145610785 Blast Desc: MGG_00903 [Magnaporthe grisea 70-15] gi|145018148|gb|EDK02427.1| MGG_00903 [Magnaporthe grisea 70-15]
  misc_feature: Useful for introducing or modulating the production of volatile compounds
MPDPKNTTVGTDRGKVTYVNPRRTSPENSITLRHHRLAHEASKRFSPTEIPNAHSTKPAVKSPRRNSSGESNDTGRSDPRKWFDQSNTNAVANTTPMDIDPPFYQRETDSSNEELHPMPTQSPAYRYVQGRGPVFRPGVTQSSSTGDYRSVIDDLTIENKRLREELRKYKQMGPDSLKRDKLFEVKVHGLPNSQKRALEAALRDFTTHLDESSTVASKSRKKSSGKSKEGHSSASKHASSSSGSNSRPVDSAYASGSTGFNSSSKSLLPGNTKAARIRNNENVENYLRDIPEGLWPRHGMMPEKDKKKLVVRRLEQLFTGKVGNTAEQVRYPAQPQPIVEDIEMESTDQQEAAVHEAAREATIRPRDKLMRKTSHSRETTSGSNTQSQSLERSHGDQTNSNSRDNDNGSRSGSGHGSGSGGRSGNANTSPPTVEPAPEQRPTRPRDLDPDRKQVPSENMDYIRHLGLVAPESQSRFSARDVSPDADGWVYLNLLCNLAQLHILNVTPDFIRTAVTEKSTKFQLSPDGRKIRWRGGDEGTKFASDSSGSNSLRRQSSEDTDGSNDQDQRKKRKTRPTDNDVTTQKGSKFSLGVQDSNSSESFHYKPMFVHHQTSSSDEQPSAGDETGSSFGIDESNLGAVSRWNQSGVSTGVAQPPRKRRRDGAIIYYSGAPFCTDLSGDCGEVSPDTYAMTSSLCKPDTLQYSLAHRPYFTRTTSGSAIPYKPLSDFKSYAAANDLDVLDTPDMTSGETDDDDIEADFPWSNLNQQAFLTNLEASGLGGISPDDHFVIVASTKRPKVATFESDDDDDSSEDEMATVIKRRSLERCSQDTSDSKTTTDTIAGKLNLLSTESPVPLVTPKSPEPTIEIEYVSVKIRRLPPVPLPPPAFYCPSSGSDSDDEDSLDDEAYVSSERSVLSKRPMVEGSPGSDNRELSGNDEEDEDSDKDLDFGSHDNLLYAGDRHLSGLKVGQEPKMLPISKVATGSSVATAGDAASGYNSSIEDA

SEQ ID NO: 10533 - DNA, 4520 bp, Muscodor strobelii
  misc_feature: SGI EST ID NO. CUFF.25256.0
  misc_feature: Variant of the nucleotide sequence at SEQ ID NO 10531
tctgtcgtcgcccctctgagtgacaatgccgagaatgcctgtgctgccacgcgcggcgaactctcccgtgaatgtattttttcgctgatccccattttgcctgctgtatcgaagaatttaacttgcatctgctcaattttggaatacccatcgcaattgtgtctcgggaatctcgatgctattttgacagacccttgtcctattgcttgaagcaagctgtggtctcgaacggccgtcgttcttacagatccaaacaaacctcaattctcccgtcgtataccttccctcacacactttttccaccctcacattttgtccagcggatcgagtgtgcaaacgacaaggcaacttacagatcatcgtcactcttcattcacgataccacgaacatcttatagttccgcaacaccattatccgacaacgcaacgcactcgaagccatacggcgctcttgtcggccaataatctcccccacgattaatcaaaaccattcggcttcaatcaccggccaccgtgaataaagaagacatcgtcgcaatactcatttgtgtacgtaagtataatcctgactaccgtgattatatgaccttttattctttctaccccgagcactcgtgccaaatttatgtgggcgagccttccgggtgtgcgtctcacgaagttgggtcggggtggtgtgtgctagaatacagcgcctacggcttgcgtagatcctggcttcagtgccatatgacgtcgcaccacaacatctcgtctgctgattttctctttccttcttcccctccatttctatcaacgatcaaactcaactcaactttcacaaccatttcctatcaagctgcattgcacgcttgttactaccacaatacttataaggatttgggattgatcagtggtggctattaggccagacccttcaatccaatacgcaatttgacacctattgaatttggagattccattattctagcacatcgtctctaggcgcttcgatattaactggacgcagactgccccccgaatttcggtctgatcggccaacgacttgcgattccgacaagtcgcagcgctatgtgcacgtagttgcaaattcctgaacgaaataattaatgcacaaataacgaatatgccggaccccaagaacacgaccgtgggtaccgaccgtgggaaagttacctacgtcaacccgcgacgaacatcaccagagaattcaatcacactacgacaccaccgtcttgcccacgaggcatcgaaacgattctctccgactgaaattcctaatgcacactcaactaagcctgctgtcaaatcaccaagacgcaattcgtcaggagagagcaatgacactggacgaagtgacccgagaaaatggttcgatcagtctaacaccaacgctgtcgccaacacaaccccaatggacatagatccgccattctatcaaagagagacggattcgtcgaatgaggagctccatcccatgccaacgcagagccccgcgtatcgatatgttcaaggtagagggcccgtctttcgcccaggtgtcacacagagcagcagcaccggagactatcgaagcgtcattgacgacttgacgattgagaataagcgtcttcgagaagagctccggaaatataaacaaatgggccccgactccctaaagagagacaaactcttcgaggtaaaagttcatggtttgcccaattcccagaagcgtgctcttgaagcggctttacgcgattttactacacacttagatgaatcaagcacggttgcctctaagagtcgcaagaagtcatcgggcaaatctaaggaagggcactcgtctgcttcgaaacatgcttcttcgtcctcgggatccaattccaggccagttgactctgcatacgcttcaggatcgacagggttcaattcatcgtcaaaatctcttctgccgggaaataccaaagctgcacgcatacggaacaatgaaaatgtcgagaattatttacgcgacataccggaggggctctggccacgacacggcatgatgccagagaaagacaagaagaagcttgtcgtccgacgacttgagcagcttttcaccggcaaggtaggcaatactgcagaacaagtacggtatccagctcagcctcaacctattgttgaggacattgagatggaaagcaccgatcagcaggaggccgcagtacatgaggccgcgcgcgaagccacgatccgaccacgagacaagctgatgcggaagacgagccattcgcgcgagaccacttctgggtcaaacacacagtctcaatcattggaacgatcacatggcgaccaaacgaattctaactctcgggacaacgataacggcagtcgtagcggcagtggacatggcagcgggagtggaggaagaagcggtaatgccaatacgtcaccgccgaccgttgagccagctcccgagcagcgaccgacacgcccgcgcgatctagatcccgaccgtaagcaggtcccttcagaaaatatggattacatccgacacttagggctagttgcgcctgagtcgcaatctcgattctccgccagggatgtgtctcccgatgctgacggctgggtctatctaaacctactctgcaatctggcgcaactgcacatcctcaacgttacgcccgatttcattcgtaccgcagtgacggaaaagagtactaaattccaattgtctcctgacggacgcaagattagatggcgcggcggcgacgagggaacaaagttcgccagcgacagcagtggtagtaattcgctacgccgacagtccagcgaagacacagacggatcgaacgatcaagatcagcgaaagaagaggaagacccgacctaccgacaatgacgtcacaacgcagaaggggtccaaatttagtttgggtgtgcaagactccaattcgtcggaaagctttcactacaaaccgatgtttgtgcaccaccagacgtcctcttctgacgagcagccctctgctggtgatgagacgggctcgtcgtttggcatcgacgagagtaatctgggagctgtttcgcgatggaaccagagtggtgtctctacgggcgtagctcagcctccgcgcaagcgtcggcgcgatggagccatcatttattacagtggggcacccttctgcacggacctctctggcgattgtggtgaggtttcaccagatacgtatgccatgacctcatcgctatgtaaacccgacacactacaatacagcctcgcccatcgcccatattttacacgtacaacttcgggatcggcgatcccttacaaacccctgagcgacttcaaatcctacgctgctgccaatgatctcgatgtcctcgacacaccagacatgacgtctggtgagaccgacgatgatgatatcgaagccgattttccatggtcaaatctcaaccaacaggcatttctaaccaatcttgaggcaagtggtctgggggggatctctcccgacgatcactttgtcattgtggcttcgacaaagcggcccaaggtagcaacgttcgagtccgacgatgacgatgatagttcagaggatgaaatggcaaccgtgatcaaacgacgttctctagaacgctgcagtcaagacaccagcgattcaaaaactacaacggacacaatcgcgggtaagctaaatctgctgtcgacggagtctccagtgccgcttgtcacgcctaagagcccggaacctactatcgagattgaatatgtctcggtcaaaatacgtcgcttgccgcccgtgccgctaccgccacccgcattttactgcccatccagtggctcagactccgatgacgaggatagcttagacgacgaggcttacgtgtcatcagaaagaagcgttcttagcaaacgacccatggtggaaggcagccccgggtccgacaaccgtgagttgtcgggcaatgacgaggaagacgaagattcggacaaagacctcgactttgggtctcacgacaacctgctgtacgcgggtgaccgtcacttatctggactaaaagttgggcaggaacccaaaatgctacctatttcgaaggttgcgacgggtagctcagtcgctacagcgggagacgcagctagtggctacaacagctcaattgaggatgcttgatcgtccattttgtaacgatatcaagcaaggaatttttgtggcgtgtacaaagcgagagttgagatttagcgaagcgattttgttttaagatctcgcatggtcggtgtaccccaggcgtaatggcgcttgaaatttatgggatgatacctcttttgattttcaccgttattcggcgcgcatgagaaaaggaaacaggaggagatggattaggttattaggcaaaatgtaattctgctaataccaaagaagaaagaatctacttatgaaaacaatatctcatcggcagcgaatttgtacatgatcaacgagtggtccaacattgtaaactgtacataacaagatctacctccttgtttgcattgtagtatgcggaaaaaatcaattctcc

SEQ ID NO: 10534 - DNA, 1632 bp, Muscodor strobelii
  misc_feature: SGI cDNA ID NO. 563348
  misc_feature: Reduced expression when VOC is produced
  misc_feature: Encodes the peptide sequence at SEQ ID NO 10535
atggattacatccgacacttagggctagttgcgcctgagtcgcaatctcgattctccgccagggatgtgtctcccgatgctgacggctgggtctatctaaacctactctgcaatctggcgcaactgcacatcctcaacgttacgcccgatttcattcgtaccgcagtgacggaaaagagtactaaattccaattgtctcctgacggacgcaagattagatggcgcggcggcgacgagggaacaaagttcgccagcgacagcagtggtagtaattcgctacgccgacagtccagcgaagacacagacggatcgaacgatcaagatcagcgaaagaagaggaagacccgacctaccgacaatgacgtcacaacgcagaaggggtccaaatttagtttgggtgtgcaagactccaattcgtcggaaagctttcactacaaaccgatgtttgtgcaccaccagacgtcctcttctgacgagcagccctctgctggtgatgagacgggctcgtcgtttggcatcgacgagagtaatctgggagctgtttcgcgatggaaccagagtggtgtctctacgggcgtagctcagcctccgcgcaagcgtcggcgcgatggagccatcatttattacagtggggcacccttctgcacggacctctctggcgattgtggtgaggtttcaccagatacgtatgccatgacctcatcgctatgtaaacccgacacactacaatacagcctcgcccatcgcccatattttacacgtacaacttcgggatcggcgatcccttacaaacccctgagcgacttcaaatcctacgctgctgccaatgatctcgatgtcctcgacacaccagacatgacgtctggtgagaccgacgatgatgatatcgaagccgattttccatggtcaaatctcaaccaacaggcatttctaaccaatcttgaggcaagtggtctgggggggatctctcccgacgatcactttgtcattgtggcttcgacaaagcggcccaaggtagcaacgttcgagtccgacgatgacgatgatagttcagaggatgaaatggcaaccgtgatcaaacgacgttctctagaacgctgcagtcaagacaccagcgattcaaaaactacaacggacacaatcgcgggtaagctaaatctgctgtcgacggagtctccagtgccgcttgtcacgcctaagagcccggaacctactatcgagattgaatatgtctcggtcaaaatacgtcgcttgccgcccgtgccgctaccgccacccgcattttactgcccatccagtggctcagactccgatgacgaggatagcttagacgacgaggcttacgtgtcatcagaaagaagcgttcttagcaaacgacccatggtggaaggcagccccgggtccgacaaccgtgagttgtcgggcaatgacgaggaagacgaagattcggacaaagacctcgactttgggtctcacgacaacctgctgtacgcgggtgaccgtcacttatctggactaaaagttgggcaggaacccaaaatgctacctatttcgaaggttgcgacgggtagctcagtcgctacagcgggagacgcagctagtggctacaacagctcaattgaggatgcttga

SEQ ID NO: 10535 - protein, 543 aa, Muscodor strobelii
  misc_feature: SGI Peptide ID NO. 563348
  misc_feature (1)..(542): Pfam Id: PF09421 Pfam Desc: Frequency clock protein
  misc_feature (1)..(441): Pfam Id: PF09421 Pfam Desc: Frequency clock protein
  misc_feature (1)..(423): NCBI GI: 46123353 Blast Desc: FG06054.1 [Gibberella zeae PH-1]
  misc_feature (1)..(423): NCBI GI: 256733011 Blast Desc: NECHADRAFT_20803 [Nectria haematococca mpVI 77-13-4]
  misc_feature (1)..(459): NCBI GI: 6016051 Blast Desc: FRQ_CRESP RecName: Full=Frequency clock protein gi|852502|gb|AAA68072.1| frequency clock protein [Hypocrea spinulosa]
  misc_feature (1)..(536): NCBI GI: 6016053 Blast Desc: FRQ_SORFI RecName: Full=Frequency clock protein gi|530050|gb|AAA20825.1| ORF; similar to frequency gene [Sordaria fimicola]
  misc_feature (1)..(543): NCBI GI: 6016052 Blast Desc: FRQ_LEPAU RecName: Full=Frequency clock protein gi|852504|gb|AAB96844.1| frequency clock protein [Leptosphaeria australiensis]
  misc_feature (1)..(536): NCBI GI: 67476450 Blast Desc: FRQ_NEUCR RecName: Full=Frequency clock protein gi|40804622|emb|CAF05882.1| period clock protein FRQ [Neurospora crassa]
  misc_feature (1)..(536): NCBI GI: 164426983 Blast Desc: NCU02265 [Neurospora crassa OR74A] gi|157071555|gb|EAA30673.2| NCU02265 [Neurospora crassa OR74A]
  misc_feature (1)..(536): NCBI GI: 595952 Blast Desc: FRQ [Neurospora crassa]
  misc_feature (1)..(536): NCBI GI: 226401 Blast Desc: FRQ [Neurospora crassa]
  misc_feature (1)..(542): NCBI GI: 171679583 Blast Desc: protein product [Podospora anserina] gi|170939417|emb|CAP64645.1| protein product [Podospora anserina]
  misc_feature: Useful for introducing or modulating the production of volatile compounds
MDYIRHLGLVAPESQSRFSARDVSPDADGWVYLNLLCNLAQLHILNVTPDFIRTAVTEKSTKFQLSPDGRKIRWRGGDEGTKFASDSSGSNSLRRQSSEDTDGSNDQDQRKKRKTRPTDNDVTTQKGSKFSLGVQDSNSSESFHYKPMFVHHQTSSSDEQPSAGDETGSSFGIDESNLGAVSRWNQSGVSTGVAQPPRKRRRDGAIIYYSGAPFCTDLSGDCGEVSPDTYAMTSSLCKPDTLQYSLAHRPYFTRTTSGSAIPYKPLSDFKSYAAANDLDVLDTPDMTSGETDDDDIEADFPWSNLNQQAFLTNLEASGLGGISPDDHFVIVASTKRPKVATFESDDDDDSSEDEMATVIKRRSLERCSQDTSDSKTTTDTIAGKLNLLSTESPVPLVTPKSPEPTIEIEYVSVKIRRLPPVPLPPPAFYCPSSGSDSDDEDSLDDEAYVSSERSVLSKRPMVEGSPGSDNRELSGNDEEDEDSDKDLDFGSHDNLLYAGDRHLSGLKVGQEPKMLPISKVATGSSVATAGDAASGYNSSIEDA

SEQ ID NO: 10536 - DNA, 4520 bp, Muscodor strobelii; identical to SEQ ID NO: 10533
  misc_feature: SGI EST ID NO. CUFF.25256.0
  misc_feature: Variant of the nucleotide sequence at SEQ ID NO 10534

SEQ ID NO: 10537 - DNA, 615 bp, Muscodor strobelii
  misc_feature: SGI cDNA ID NO. 563349
  misc_feature: Encodes the peptide sequence at SEQ ID NO 10538
atggcagacaagtccaaacaagacatcgtcgacaaagatgcgcccaccaacccgaggggcattccatatgcgcctttcgtcgacaaagtcgaggactatgtatcttcccgggacgaggttgagccaaccttgcgcagcttccaagaaatgatatcaaaataccagttcatggagctgaaccttcagagacggatcgcaggccttcaagacaagatgcccgatattcagaaaaccttagagactgtgcgctttctgaagacgcggacggcggaatcagatccgatcgaaacgaccttcgagctgaacgacacactgtacgctaaggcatcaataccaccgacagaggaagtgtatctgtggctaggtgcaaacgtcatgctgtcatatcctcttgacgaggccgagacacttctcacaagcaaattatcggctgcaaagcagagccatggcaactgcgaggaggatctcgagtttttgagagagcaaattactacaatggaggtaaacctagcacgcgtatataattgggatgtggtacagaaacgaaaggagaaggctgaggaagatcggaaaggaacgggctccaaagatggaaacggccagcctaatggatga

SEQ ID NO: 10538 - protein, 204 aa, Muscodor strobelii
  misc_feature: SGI Peptide ID NO. 563349
  misc_feature (54)..(176): Pfam Id: PF02996 Pfam Desc: Prefoldin subunit
  misc_feature (1)..(196): NCBI GI: 46123833 Blast Desc: FG06294.1 [Gibberella zeae PH-1]
  misc_feature (1)..(180): NCBI GI: 256732934 Blast Desc: [Nectria haematococca mpVI 77-13-4]
  misc_feature (10)..(204): NCBI GI: 154309855 Blast Desc: BC1G_06848 [Botryotinia fuckeliana B05.10] gi|150851636|gb|EDN26829.1| BC1G_06848 [Botryotinia fuckeliana B05.10]
  misc_feature (1)..(180): NCBI GI: 85094563 Blast Desc: NCU02264 [Neurospora crassa OR74A] gi|28921365|gb|EAA30672.1| NCU02264 [Neurospora crassa OR74A] gi|40804623|emb|CAF05883.1| related to prefoldin subunit 3
  misc_feature (12)..(204): NCBI GI: 169617592 Blast Desc: SNOG_11979 [Phaeosphaeria nodorum SN15] gi|160703437|gb|EAT80391.2| SNOG_11979 [Phaeosphaeria nodorum SN15]
  misc_feature (1)..(204): NCBI GI: 156039365 Blast Desc: SS1G_11819 [Sclerotinia sclerotiorum 1980] gi|154697556|gb|EDN97294.1| SS1G_11819 [Sclerotinia sclerotiorum 1980]
  misc_feature (1)..(204): NCBI GI: 169783328 Blast Desc: [Aspergillus oryzae RIB40] gi|83774870|dbj|BAE64993.1| protein product [Aspergillus oryzae]
  misc_feature (1)..(204): NCBI GI: 189194637 Blast Desc: prefoldin subunit 3 [Pyrenophora tritici-repentis Pt-1C-BFP] gi|187979221|gb|EDU45847.1| prefoldin subunit 3 [Pyrenophora tritici-repentis Pt-1C-BFP]
  misc_feature (1)..(204): NCBI GI: 121710742 Blast Desc: prefoldin subunit 3, [Aspergillus clavatus NRRL 1] gi|119401137|gb|EAW11561.1| prefoldin subunit 3, [Aspergillus clavatus NRRL 1]
  misc_feature (1)..(200): NCBI GI: 119498063 Blast Desc: prefoldin subunit 3, [Neosartorya fischeri NRRL 181] gi|119413953|gb|EAW23892.1| prefoldin subunit 3, [Neosartorya fischeri NRRL 181]
MADKSKQDIVDKDAPTNPRGIPYAPFVDKVEDYVSSRDEVEPTLRSFQEMISKYQFMELNLQRRIAGLQDKMPDIQKTLETVRFLKTRTAESDPIETTFELNDTLYAKASIPPTEEVYLWLGANVMLSYPLDEAETLLTSKLSAAKQSHGNCEEDLEFLREQITTMEVNLARVYNWDVVQKRKEKAEEDRKGTGSKDGNGQPNG

SEQ ID NO: 10539 - DNA, 1023 bp, Muscodor strobelii
  misc_feature: SGI EST ID NO. CUFF.24853.0
  misc_feature: Variant of the nucleotide sequence at SEQ ID NO 10537
ttttaatgctagagcttgaccccgacagcatcctggatgctgcaacgacgaccctcttttgaaatttcacaaggggaagggcgaagagcaatcgcccaccatggcagacaagtccaaacaagacatcgtcgacaaagatgcgcccaccaacccgaggggcattccatatgcgcctttcgtcgacaaagtcgaggactatgtatcttcccgggacgaggttgagccaaccttgcgcagcttccaagaaatgatatcaaaataccagttcatggagctgaaccttcagagacggatcgcaggccttcaagacaagatgcccgatattcagaaaaccttagagactgtgcgctttctgaagacgcggacggcggaatcagatccgatcgaaacgaccttcgagctgaacgacacactgtacgctaaggcatcaataccaccgacagaggaagtgtatctgtggctaggtgcaaacgtcatgctgtcatatcctcttgacgaggccgagacacttctcacaagcaaattatcggctgcaaagcagagccatggcaactgcgaggaggatctcgagtttttgagagagcaaattactacaatggaggtaaacctagcacgcgtatataattgggatgtggtacagaaacgaaaggagaaggctgaggaagatcggaaaggaacgggctccaaagatggaaacggccagcctaatggatgaaagtaatcaagtccacatacggaccgatacgaaagagtcgccgaagaggcaacaccctcactttggctagattaacgccagtgaggggagcagagaatgtcaagataccagggcgggtgtagcatcagagaccatcagaaagatgctataggcaagatgtcatcaaaaagctcgacgtgtttcaactcatagagagttaaaataccacaacatgaacatgaaatagtctatgccacggacagggcaacacattgcttgacactacgcccgtgagcctgtgatcaccattgacatgagacgtcttgcaa

SEQ ID NO: 10540 - DNA, 1128 bp, Muscodor strobelii
  misc_feature: SGI cDNA ID NO. 563350
  misc_feature: Reduced expression when VOC is produced
  misc_feature: Encodes the peptide sequence at SEQ ID NO 10541
atggcagacacggccaagaaagaggagaagcccaacatggagctcgatcccaagtacgaccactacgagttccctctgacctcggtcgaggcccgcgaaggccatcccggccacgtcagcgagatccaacaggcccagatcttccagctgcgctccctgctcgaggccgagggcttcacgaatcatctcgacaccttgactatgcttcggttcttgcgcgctcggaaatgggacgtcaacgccgcaaagaagatgttcgtcgagtgcgaggaatggcgaaagaacatgaccgtctgggaccccgacaagggcgtctaccgacctatgtccctcgccgactcggaacccgagaaccatcccccgcagcagccgctccagttggacgagctggtcaggacatgggacaaggacggctccttcaagcgccagctgtccaagtattacacccagtactaccacaagaccgacaaggatggccgaccgtgctatttcgagaagttgggaggagtggacttcaaggctctacggaaactcaactacacaaacgataagatgctactcaacctcgccgtcgagtacgagaagatggtcgaccccagactgcccgcctgttcgcgcaaggccggcaacctcctcgagacctcctgcagcatcctcgacgtcggtggcgtcagcttgttgaaccccggcaacatctacacctacatcaagcaggcctccgccatgagcaacaacaactaccccgagcgtctgggcaagatgtacgtcatcaacacgaactggttcatctcgaaagcctggggcatcgtcaagggcttcttggaccccgtcaccgcctccaagatccacgtcctcagcggcgactacaagaagatcctcttggagcaggtccctgccgagaacttgcctgctgcctacggcggtacttgcagctgtgaaggtggttgcgaactcagcgacgccggtccatggcaagaaaaagagtggtacaagcctgcctggtgggagaaggaacctggaaccacgaccatcgagaacgattctaccgggcctgtttcaaatgaggctcctgctgctacccctacgaccggcgcaaccgcgccggacgatgccaaagctaccgcatag

SEQ ID NO: 10541 - protein, 375 aa, Muscodor strobelii
  misc_feature: SGI Peptide ID NO. 563350
  misc_feature (149)..(333): Pfam Id: PF00650 Pfam Desc: CRAL/TRIO domain
  misc_feature (34)..(101): Pfam Id: PF03765 Pfam Desc: CRAL/TRIO, N-terminus
  misc_feature (34)..(96): Pfam Id: PF03765 Pfam Desc: CRAL/TRIO, N-terminus
  misc_feature (11)..(362): NCBI GI: 156039367 Blast Desc: SS1G_11820 [Sclerotinia sclerotiorum 1980] gi|154697557|gb|EDN97295.1| SS1G_11820 [Sclerotinia sclerotiorum 1980]
  misc_feature (12)..(338): NCBI GI: 116203509 Blast Desc: CHGG_09638 [Chaetomium globosum CBS 148.51] gi|88175766|gb|EAQ83234.1| CHGG_09638 [Chaetomium globosum CBS 148.51]
  misc_feature (13)..(361): NCBI GI: 256728941 Blast Desc: [Nectria haematococca mpVI 77-13-4]
  misc_feature (9)..(335): NCBI GI: 242767053 Blast Desc: phosphatidylinositol transporter, [Talaromyces stipitatus ATCC 10500] gi|218724490|gb|EED23907.1| phosphatidylinositol transporter, [Talaromyces stipitatus ATCC
  misc_feature (13)..(336): NCBI GI: 39973897 Blast Desc: MGG_00905 [Magnaporthe grisea 70-15] gi|145018146|gb|EDK02425.1| MGG_00905 [Magnaporthe grisea 70-15]
  misc_feature (13)..(338): NCBI GI: 85094558 Blast Desc: Sec14 cytosolic factor [Neurospora crassa OR74A] gi|28921364|gb|EAA30671.1| Sec14 cytosolic factor [Neurospora crassa OR74A] gi|40804624|emb|CAF05884.1| transfer protein SEC14
  misc_feature (18)..(359): NCBI GI: 119491949 Blast Desc: phosphatidylinositol transporter, [Neosartorya fischeri NRRL 181] gi|119411629|gb|EAW21572.1| phosphatidylinositol transporter, [Neosartorya fischeri NRRL 181]
  misc_feature (13)..(367): NCBI GI: 46138529 Blast Desc: FG10779.1 [Gibberella zeae PH-1]
  misc_feature (18)..(358): NCBI GI: 70999822 Blast Desc: phosphatidylinositol transporter [Aspergillus fumigatus Af293] gi|66852265|gb|EAL92590.1| phosphatidylinositol transporter, [Aspergillus fumigatus Af293] phosphatidylinositol
  misc_feature (15)..(335): NCBI GI: 212528174 Blast Desc: phosphatidylinositol transporter, [Penicillium marneffei ATCC 18224] gi|212528176|ref|XP_002144245.1| phosphatidylinositol transporter, [Penicillium marneffei ATCC
  misc_feature: Useful for introducing or modulating the production of volatile compounds
MADTAKKEEKPNMELDPKYDHYEFPLTSVEAREGHPGHVSEIQQAQIFQLRSLLEAEGFTNHLDTLTMLRFLRARKWDVNAAKKMFVECEEWRKNMTVWDPDKGVYRPMSLADSEPENHPPQQPLQLDELVRTWDKDGSFKRQLSKYYTQYYHKTDKDGRPCYFEKLGGVDFKALRKLNYTNDKMLLNLAVEYEKMVDPRLPACSRKAGNLLETSCSILDVGGVSLLNPGNIYTYIKQASAMSNNNYPERLGKMYVINTNWFISKAWGIVKGFLDPVTASKIHVLSGDYKKILLEQVPAENLPAAYGGTCSCEGGCELSDAGPWQEKEWYKPAWWEKEPGTTTIENDSTGPVSNEAPAATPTTGATAPDDAKATA

SEQ ID NO: 10542 - DNA, 1669 bp, Muscodor strobelii
  misc_feature: SGI EST ID NO. CUFF.24856.0
  misc_feature: Variant of the nucleotide sequence at SEQ ID NO 10540
cgaacaggtccatccaccactccaaatcttacccttttttggtattaccaactcaagggtgcgtagtttattattgctcgacgtgttggcattctttcgagcgatcaaccgacccccaggttgagcaacattccctagacaacatcttttttgcccctcttggtcgacaagcctctgtcctcgttctctcccaactttcgtcgacccctccaccctgaagcctcctacaccgacaccgacacgatggcagacacggccaagaaagaggagaagcccaacatggagctcgatcccaagtacgaccactacgagttccctctgacctcggtcgaggcccgcgaaggccatcccggccacgtcagcgagatccaacaggcccagatcttccagctgcgctccctgctcgaggccgagggcttcacgaatcatctcgacaccttgactatgcttcggttcttgcgcgctcggaaatgggacgtcaacgccgcaaagaagatgttcgtcgagtgcgaggaatggcgaaagaacatgaccgtctgggaccccgacaagggcgtctaccgacctatgtccctcgccgactcggaacccgagaaccatcccccgcagcagccgctccagttggacgagctggtcaggacatgggacaaggacggctccttcaagcgccagctgtccaagtattacacccagtactaccacaagaccgacaaggatggccgaccgtgctatttcgagaagttgggaggagtggacttcaaggctctacggaaactcaactacacaaacgataagatgctactcaacctcgccgtcgagtacgagaagatggtcgaccccagactgcccgcctgttcgcgcaaggccggcaacctcctcgagacctcctgcagcatcctcgacgtcggtggcgtcagcttgttgaaccccggcaacatctacacctacatcaagcaggcctccgccatgagcaacaacaactaccccgagcgtctgggcaagatgtacgtcatcaacacgaactggttcatctcgaaagcctggggcatcgtcaagggcttcttggaccccgtcaccgcctccaagatccacgtcctcagcggcgactacaagaagatcctcttggagcaggtccctgccgagaacttgcctgctgcctacggcggtacttgcagctgtgaaggtggttgcgaactcagcgacgccggtccatggcaagaaaaagagtggtacaagcctgcctggtgggagaaggaacctggaaccacgaccatcgagaacgattctaccgggcctgtttcaaatgaggctcctgctgctacccctacgaccggcgcaaccgcgccggacgatgccaaagctaccgcatagaagcgattttttgggtccaagagaaaggggtcatacgtactgctccggggtatggaacattgagcctagcattcggagcaacttggctcgacttcattcctgcgacgtcattgtttaggtaggcagaaagagtaaaaaatatcatagacggacggtgaggataagagtaaataaatgtctgaacttgcttcccttctcaagctctcgagtaatgcgacaacttggtgcaatgccggttccccccagcgatcgtgaggcatgttttgtctttctcgaagaagtatatctgtgagtttgg

SEQ ID NO: 10543 - DNA, 654 bp, Muscodor strobelii
  misc_feature: SGI cDNA ID NO. 563351
  misc_feature: Encodes the peptide sequence at SEQ ID NO 10544
atggcggactcaccacgcaagatcgagctacaagcaccagaagacctcgcgtacctcttagccaacgtgcgacgcgccgccgcagcccgaatcgacgaggcgttcccccctgtcgacgataataccgaagatgaactacggacgcgcattgaggaattagtgaatgagtacataacgaatacattcaccttagcagcaccaaacctaagcataaacgggctcgacgtgcctctctccacaatctcccgatcatcacttcaaaacaaaaacacagaaccggaagaagtatacgagtccttcgacgggcgcaagcgctctcgcgtcgaggccctgaccgccgaggaagaagacttgcttcgcgacattgcacaactcaaaaagagcgttcctgggactgtcgccaccgcctgggcagatgcctcgaagaaggggatcaaggccgatgaggaacagcttgaaaaagtgctggagaacatcggcaatgaagaggtcacgaagttggatgtgaagaatcttgagagacaggacgaggttgaggagagtcttaaggatgctgttaggggattgggcaggttgaagagggagatgccggctgttgttgcgaggatggagagggcgaggaaggcgggggagtatgttgctacggaacggtga

SEQ ID NO: 10544 - protein, 217 aa, Muscodor strobelii
  misc_feature: SGI Peptide ID NO. 563351
  misc_feature (6)..(216): NCBI GI: 46138527 Blast Desc: FG10778.1 [Gibberella zeae PH-1]
  misc_feature (6)..(217): NCBI GI: 261355090 Blast Desc: conserved [Verticillium albo-atrum VaMs.102]
  misc_feature (2)..(217): NCBI GI: 39973895 Blast Desc: MGG_00906 [Magnaporthe grisea 70-15] gi|145018145|gb|EDK02424.1| MGG_00906 [Magnaporthe grisea 70-15]
  misc_feature (6)..(213): NCBI GI: 171679589 Blast Desc: protein product [Podospora anserina] gi|170939420|emb|CAP64648.1| protein product [Podospora anserina]
  misc_feature (6)..(207): NCBI GI: 85094554 Blast Desc: NCU02262 [Neurospora crassa OR74A] gi|28921363|gb|EAA30670.1| [Neurospora crassa OR74A] gi|40804625|emb|CAF05885.1| [Neurospora crassa]
  misc_feature (1)..(213): NCBI GI: 154309883 Blast Desc: BC1G_06862 [Botryotinia fuckeliana B05.10] gi|150851650|gb|EDN26843.1| BC1G_06862 [Botryotinia fuckeliana B05.10]
  misc_feature (1)..(214): NCBI GI: 189211239 Blast Desc: conserved [Pyrenophora tritici-repentis Pt-1C-BFP] gi|187978043|gb|EDU44669.1| conserved [Pyrenophora tritici-repentis Pt-1C-BFP]
  misc_feature (15)..(209): NCBI GI: 116203511 Blast Desc: CHGG_09639 [Chaetomium globosum CBS 148.51] gi|88175767|gb|EAQ83235.1| CHGG_09639 [Chaetomium globosum CBS 148.51]
  misc_feature (1)..(217): NCBI GI: 169600531 Blast Desc: SNOG_03104 [Phaeosphaeria nodorum SN15] gi|111068715|gb|EAT89835.1| SNOG_03104 [Phaeosphaeria nodorum SN15]
  misc_feature (3)..(146): NCBI GI: 145252318 Blast Desc: An16g03600 [Aspergillus niger] gi|134083220|emb|CAK42858.1| protein product [Aspergillus niger]
MADSPRKIELQAPEDLAYLLANVRRAAAARIDEAFPPVDDNTEDELRTRIEELVNEYITNTFTLAAPNLSINGLDVPLSTISRSSLQNKNTEPEEVYESFDGRKRSRVEALTAEEEDLLRDIAQLKKSVPGTVATAWADASKKGIKADEEQLEKVLENIGNEEVTKLDVKNLERQDEVEESLKDAVRGLGRLKREMPAVVARMERARKAGEYVATER

SEQ ID NO: 10545 - DNA, 1070 bp, Muscodor strobelii
  misc_feature: SGI EST ID NO. CUFF.24860.0
  misc_feature: Variant of the nucleotide sequence at SEQ ID NO 10543
cggcgcggaacgccaacatccaaactcaatcgataagattcaaagcatcagcaattgaaacaaaacaccaacacatctcatcttcaagccgacgtcgcgtttccaaagacaagcttccgatttcaatcgtcaaaccttagaatacaaatcgcgtacagaaacatcaatcaattgcaccacctaacgcgacgcgcaaacaatggcggactcaccacgcaagatcgagctacaagcaccagaagacctcgcgtacctcttagccaacgtgcgacgcgccgccgcagcccgaatcgacgaggcgttcccccctgtcgacgataataccgaagatgaactacggacgcgcattgaggaattagtgaatgagtacataacgaatacattcaccttagcagcaccaaacctaagcataaacgggctcgacgtgcctctctccacaatctcccgatcatcacttcaaaacaaaaacacagaaccggaagaagtatacgagtccttcgacgggcgcaagcgctctcgcgtcgaggccctgaccgccgaggaagaagacttgcttcgcgacattgcacaactcaaaaagagcgttcctgggactgtcgccaccgcctgggcagatgcctcgaagaaggggatcaaggccgatgaggaacagcttgaaaaagtgctggagaacatcggcaatgaagaggtcacgaagttggatgtgaagaatcttgagagacaggacgaggttgaggagagtcttaaggatgctgttaggggattgggcaggttgaagagggagatgccggctgttgttgcgaggatggagagggcgaggaaggcgggggagtatgttgctacggaacggtgatagggctctggaagttactagtctggtcgtgttgagatttgagttgagcatgctgtgttctgtctctttgatggtatacctcagcctgctcgttatttggtatgggccagatagacagacaggcagagtatacctgtggtaaattcagcgataccccttttattacttctcctataacttctgctctcatgcctgtcgactttctacctactttgag

SEQ ID NO: 10546 - DNA, 1215 bp, Muscodor strobelii
  misc_feature: SGI cDNA ID NO. 563352
  misc_feature: Encodes the peptide sequence at SEQ ID NO 10547
atgcattatatcagacccttgcggccagcgaagctagatagctcatcaggaaaaggcattgtcctttcggtccttttcaccatcacaacggacctaggcgattcatttctatacccagaagatgaggactacgagctcgtcgtagatatcgtgcctcgtccgccaggatgccaggctcaccagtgtaactggcaagctggcatgcgtgttcaggaagtgaaatttagcctcgggccaaagtggacgaagccatcagatgtgaactgcaccgtagcaatacatgcacagccagagtctcatgaaaattacaccaacgtccacatgggatccttaagtgtcgacgatgtgctaccatggaaagttcaaggaaaccagaaattggaggcgggagtcgtaatgccggtgaccatgcgcataagaaaaggggtctgtgacgatatttcataccgtactctggccatcgacttcgacccgcacgggtatgggctaaacctagtcatcgaggaggatattggcgagagtatagccaaacatatatgggacgcgggtgtgttgacaagcgcctatattgccgaagcatgcttcgaatcagaaaccctggagaaactacttccaatggaaagtagctcattcaacgtcctcgagctaggttgcggtgttgggatactggggctcaccattgccagcattctaccacgagcagcccaggcccagggaaagacagatatcgaaagcactgtcctcttaacggacttggaagaagcagaggattacgcgatacgaaacattgccggagctaggaattcgttaatagcgaacgaaaggacagatgaatcattacctcagattgaatatgaaaatctagattgggatgatggccgcgagggtcgctttggaccgacagtttcgtctataacgtgggacttgatagtcttgagcgattgcacatataatgtcgattcactaccagctctcgttggaacgctcagtgctttgcacaatctgaaacgacatcaccgaggccttgatgcacaccagagcgtcaagtcttcggtagttttagctacgaaaccacggcattcttcggagcaggcgttgtttggattattacaggagcatcagtggcgatataggacactcgaggagttaaatttaccaaagattggagaggaagatgaggttgtccagatataccttcttgagaggattgactaa

SEQ ID NO: 10547 - protein, 404 aa, Muscodor strobelii
  misc_feature: SGI Peptide ID NO. 563352
  misc_feature (1)..(402): NCBI GI: 256733861 Blast Desc: NECHADRAFT_103650 [Nectria haematococca mpVI 77-13-4]
  misc_feature (1)..(402): NCBI GI: 261360706 Blast Desc: conserved [Verticillium albo-atrum VaMs.102]
  misc_feature (1)..(402): NCBI GI: 145611402 Blast Desc: MGG_00411 [Magnaporthe grisea 70-15] gi|145018697|gb|EDK02976.1| MGG_00411 [Magnaporthe grisea 70-15]
  misc_feature (1)..(402): NCBI GI: 171681788 Blast Desc: protein product [Podospora anserina] gi|170940853|emb|CAP66503.1| protein product [Podospora anserina]
  misc_feature (1)..(402): NCBI GI: 46127851 Blast Desc: FG08303.1 [Gibberella zeae PH-1]
  misc_feature (2)..(399): NCBI GI: 226286025 Blast Desc: conserved [Paracoccidioides brasiliensis Pb01]
  misc_feature (2)..(399): NCBI GI: 225679754 Blast Desc: conserved [Paracoccidioides brasiliensis Pb03]
  misc_feature (1)..(402): NCBI GI: 121706946 Blast Desc: conserved [Aspergillus clavatus NRRL 1] gi|119399831|gb|EAW10257.1| conserved [Aspergillus clavatus NRRL 1]
  misc_feature (1)..(404): NCBI GI: 70994516 Blast Desc: conserved [Aspergillus fumigatus Af293] gi|66849671|gb|EAL89999.1| conserved [Aspergillus fumigatus Af293]
  misc_feature (2)..(371): NCBI GI: 258578137 Blast Desc: [Uncinocarpus reesii 1704] gi|237903516|gb|EEP77917.1| [Uncinocarpus reesii 1704]
MHYIRPLRPAKLDSSSGKGIVLSVLFTITTDLGDSFLYPEDEDYELVVDIVPRPPGCQAHQCNWQAGMRVQEVKFSLGPKWTKPSDVNCTVAIHAQPESHENYTNVHMGSLSVDDVLPWKVQGNQKLEAGVVMPVTMRIRKGVCDDISYRTLAIDFDPHGYGLNLVIEEDIGESIAKHIWDAGVLTSAYIAEACFESETLEKLLPMESSSFNVLELGCGVGILGLTIASILPRAAQAQGKTDIESTVLLTDLEEAEDYAIRNIAGARNSLIANERTDESLPQIEYENLDWDDGREGRFGPTVSSITWDLIVLSDCTYNVDSLPALVGTLSALHNLKRHHRGLDAHQSVKSSVVLATKPRHSSEQALFGLLQEHQWRYRTLEELNLPKIGEEDEVVQIYLLERID

SEQ ID NO: 10548 - DNA, 1831 bp, Muscodor strobelii
  misc_feature: SGI EST ID NO. CUFF.24865.0
  misc_feature: Variant of the nucleotide sequence at SEQ ID NO 10546
cgatcttcagatgcatagcgtacagtttgttcgtactgtgtggtgttgaggatccagatgcaattcagatgactgatttgagttgggtgtttggcgctgcgttatcggctcttttagggacccttaggttttatgggcgcattcgacatctggaaggttttgataaatggtgttatgcttgaagtcagataatgacgttatccagaaatctacgtacactgtgcattttccagattttgtgcaattatattcgcgagtggaatttctcattggtccagtctaactgctgtcctatcaacattttggaatatggtgtgcatctatgctttaaggaaaatggctaacgccctacattaatattttggccctcatatattatacttattctcgcggtgattaagttgcaagtcagtcgtcgggcttcttaaagggtcaccgacatcagaggcccacccgagtacagaacccatctgggtactcgacagagatttgatgaaacgatatgcattatatcagacccttgcggccagcgaagctagatagctcatcaggaaaaggcattgtcctttcggtccttttcaccatcacaacggacctaggcgattcatttctatacccagaagatgaggactacgagctcgtcgtagatatcgtgcctcgtccgccaggatgccaggctcaccagtgtaactggcaagctggcatgcgtgttcaggaagtgaaatttagcctcgggccaaagtggacgaagccatcagatgtgaactgcaccgtagcaatacatgcacagccagagtctcatgaaaattacaccaacgtccacatgggatccttaagtgtcgacgatgtgctaccatggaaagttcaaggaaaccagaaattggaggcgggagtcgtaatgccggtgaccatgcgcataagaaaaggggtctgtgacgatatttcataccgtactctggccatcgacttcgacccgcacgggtatgggctaaacctagtcatcgaggaggatattggcgagagtatagccaaacatatatgggacgcgggtgtgttgacaagcgcctatattgccgaagcatgcttcgaatcagaaaccctggagaaactacttccaatggaaagtagctcattcaacgtcctcgagctaggttgcggtgttgggatactggggctcaccattgccagcattctaccacgagcagcccaggcccagggaaagacagatatcgaaagcactgtcctcttaacggacttggaagaagcagaggattacgcgatacgaaacattgccggagctaggaattcgttaatagcgaacgaaaggacagatgaatcattacctcagattgaatatgaaaatctagattgggatgatggccgcgagggtcgctttggaccgacagtttcgtctataacgtgggacttgatagtcttgagcgattgcacatataatgtcgattcactaccagctctcgttggaacgctcagtgctttgcacaatctgaaacgacatcaccgaggccttgatgcacaccagagcgtcaagtcttcggtagttttagctacgaaaccacggcattcttcggagcaggcgttgtttggattattacaggagcatcagtggcgatataggacactcgaggagttaaatttaccaaagattggagaggaagatgaggttgtccagatataccttcttgagaggattgactaacaagggtattgaactcttccagctgtctataacctataaattccatgactcgttctttaccagctgcaaacatcaatcttaaggcagcgagagacataagaaaccgtctaaaag

SEQ ID NO: 10549 - DNA, 414 bp, Muscodor strobelii
  misc_feature: SGI cDNA ID NO. 563353
  misc_feature: Encodes the peptide sequence at SEQ ID NO 10550
atgtcaaccaccactatcaccattcctaccacacgatccaccatcgttgcctttggccactccaagggctctgcaagctctccgtcctccgtctcgagctcccctccatccccagcttcagccaagtcgacgacccccgaggctgactgcaagtccaagacgatgcatcaacgccgaccgagcttgctgagcaccgctctgtcgaaagaagagtgcacccacgtgaatattggcgaccctgacggaccccctcgacttatctcgtatcttgcttcaagccaagggtttgcatggaaccccgagatgtttcttccttcctacatcgattacgactatgagccgctcgagaaccgtcgggagcctgtccacgagatcaggctcagcgatgaggagatcaagaagatgctaccatga

SEQ ID NO: 10550 - protein, 137 aa, Muscodor strobelii
  misc_feature: SGI Peptide ID NO. 563353
  misc_feature (1)..(137): NCBI GI: 145610781 Blast Desc: MGG_00907 [Magnaporthe grisea 70-15] gi|145018144|gb|EDK02423.1| MGG_00907 [Magnaporthe grisea 70-15]
  misc_feature (51)..(137): NCBI GI: 261355091 Blast Desc: [Verticillium albo-atrum VaMs.102]
  misc_feature (51)..(137): NCBI GI: 256729161 Blast Desc: [Nectria haematococca mpVI 77-13-4]
  misc_feature (51)..(137): NCBI GI: 46138511 Blast Desc: FG10770.1 [Gibberella zeae PH-1]
  misc_feature (63)..(137): NCBI GI: 261355093 Blast Desc: conserved [Verticillium albo-atrum VaMs.102]
  misc_feature (3)..(137): NCBI GI: 154309879 Blast Desc: BC1G_06860 [Botryotinia fuckeliana B05.10] gi|150851648|gb|EDN26841.1| BC1G_06860 [Botryotinia fuckeliana B05.10]
  misc_feature (37)..(137): NCBI GI: 171679591 Blast Desc: protein product [Podospora anserina] gi|170939421|emb|CAP64649.1| protein product [Podospora anserina]
  misc_feature (64)..(137): NCBI GI: 156039331 Blast Desc: SS1G_11802 [Sclerotinia sclerotiorum 1980] gi|154697539|gb|EDN97277.1| SS1G_11802 [Sclerotinia sclerotiorum 1980]
  misc_feature (51)..(137): NCBI GI: 85094550 Blast Desc: NCU02261 [Neurospora crassa OR74A] gi|28921362|gb|EAA30669.1| NCU02261 [Neurospora crassa OR74A] gi|40804626|emb|CAF05886.1| [Neurospora crassa]
  misc_feature (51)..(137): NCBI GI: 256720233 Blast Desc: NECHADRAFT_89251 [Nectria haematococca mpVI 77-13-4]
MSTTTITIPTTRSTIVAFGHSKGSASSPSSVSSSPPSPASAKSTTPEADCKSKTMHQRRPSLLSTALSKEECTHVNIGDPDGPPRLISYLASSQGFAWNPEMFLPSYIDYDYEPLENRREPVHEIRLSDEEIKKMLP

SEQ ID NO: 10551 - DNA, 1754 bp, Muscodor strobelii
  misc_feature: SGI EST ID NO. CUFF.24978.0
  misc_feature: Variant of the nucleotide sequence at SEQ ID NO 10549
acaactcatgtacctctcacgaccaaaccttgccctggctggcttgatcgaagctcaatcaggctccctcttctgcatgccgcttggttaggttgcacctgcacctgatccgcctgaaccttacatctttcccagcagtgagccgtcttttgttcaacttgcttctcgacacaacaacttcacagcttcagacagatccaggctgcatcgttgctcaacacatgtagagattcgtctgcaactgttactactgtcatactacggtacttctattcttcgtctcagcctcctacatctcacatctcttggacattgacgtagcagttccttacttcggcctgaggtcacagctgctatcgatcgccgcccctccaccgccctgcttgcctgcctgcaaccaccaccaccccaaccatcctcggttaccaatctaggcgatcacgtttcacctctacacttcaccactttgtttcatgactatcggtgttattgtctcgctggcttcgacgactctggtccatttcttttcattcttcccgctgtctagaagccctgcatccagcaaggcttcgccagtcttgtaacaaaataccatgtcaaccaccactatcaccattcctaccacacgatccaccatcgttgcctttggccactccaagggctctgcaagctctccgtcctccgtctcgagctcccctccatccccagcttcagccaagtcgacgacccccgaggctgactgcaagtccaagacgatgcatcaacgccgaccgagcttgctgagtacgcatacccattctaatagatcatcatatgcttcagaaacggggaaacggggaaacggggctcttgagcagacggtctgctaacataccctataggcaccgctctgtcgaaagaagagtgcacccacgtgaatattggcgaccctgacggaccccctcgacttatctcgtatcttgcttcaagccaagggtttgcatggaaccccgagatgtttcttccttcctacatcgattacgactatgagccgctcgagaaccgtcgggagcctgtccacgagatcaggctcagcgatgaggagatcaagaagatgctaccatgatctggtgcattatttctagggtcgggtttccttcggttcatagacaatttcgcagattcgcaagattacaagaccatttccgcaatagtacggcgtctggattgtcgacacttcctggatggcattacgatcatgggatctcgagattagctcccttttatgcatcatgaattattatggcctgatggcgcatcgacggtgaaagaagggtacgatatgcggagtgatccttattgctggtagctttcgggcatggagacattcaagcacaagaggagcacggagtttattgtggtattgtggattatacaggcgctatgcatttcattgttattcgatatccccccatctctcgggaaccggcgttgtttctcgatggatgcgaagagactttctttcctcggggttcggtgttattgtcatggagagaacaattctccacttcatcataggcagcgtgtagccgaatacattattttacgcttctcatagcttgtgtatattcagataatgcatacctctggagagaactgaattccgagactatgtagtacctaagtatgatcgattacatcatcaggtcgaagcaatgaagatagcattctagaccatctgtgcaaaattaagacaaaaacatcacctatgagca

SEQ ID NO: 10552 - DNA, 1266 bp, Muscodor strobelii
  misc_feature: SGI cDNA ID NO. 563354
  misc_feature: Encodes the peptide sequence at SEQ ID NO 10553
atgggcgacgtcctggtcgagaatcccgccaacacggttgcgcctcacaacaaacccatcccctccaccatacccaacgtcgagaccatcgagggcgtctcctcccagggcggcgatgagtatgtcacattgaagaagctacagcggcatctggagtacatccagctgcaggaggagtatatcaaagatgagcagaggagtctaaagcgcgagctcgtgcgcgcccaagaagagatcaagcgaatccagagtgtgcccttggtcatcggtcagtttatggaggccatcgatcagaacaccggcatcgtccagtccagtaccggttccaactacgtcgtacgcatcttgtcgacgctggatcgtgaattgttgaagccgtcgtcatcagtcgcgctccaccgtcactccaatgcgctcgtcgacattttgcctcccgaggccgactcgtctattgccatgctgggtgccgacgagaagcccgacgttacatacgccgatgttggtggattagatatgcagaagcaggagatccgcgaggccgtcgagctccccctgacacacttcgatctctacaagcagatcggtatcgatccgccgcgtggtgtcctactgtacggccctcccggtaccggaaagaccatgttggttaaggctgtagccaactccactaccgccaacttcattcgtgtcgtaggttccgaatttgttcagaagtatcttggtgaagggccacgtatggtgcgagatgtcttccgcatggcccgcgagaattcacctgccatcatcttcatcgatgagatcgatgccattgccaccaagcgtttcgatgcccagactggtgccgacagagaagtgcagcgtattttgctggaactcctaaatcagatggatggattcgatcagacttccaatgtcaaagtcattatggccacaaaccgcgccgatacgcttgatcccgctctgcttcgtcctggtcgattagatcgaaagatcgaattccccagtctgcgagaccggagagaaagacgtcttatcttctcgactatcgcaggaaagatgagcttagcaccagaggtcgacttggacagcttgattgtccgtaacgaccctctgagtggtgctgtcattgccgcaatcatgcaggaagccggtctccgtgctgtgcgtaaaaacagatacaatattattcaatccgatctggaagatgcgtactcgagccaggtcaagggcgacagtgacgagaataagttcgacttctacaagtaa

SEQ ID NO: 10553 - protein, 421 aa, Muscodor strobelii
  misc_feature: SGI Peptide ID NO. 563354
  misc_feature (201)..(389): Pfam Id: PF00004 Pfam Desc: ATPase family associated with various cellular activities (AAA)
  misc_feature (201)..(334): Pfam Id: PF07728 Pfam Desc: ATPase family associated with various cellular activities (AAA)
  misc_feature (202)..(230): Pfam Id: PF07726 Pfam Desc: ATPase family associated with various cellular activities (AAA)
  misc_feature (57)..(421): NCBI GI: 126132662 Blast Desc: 26S proteasome regulatory subunit [Pichia stipitis CBS 6054] gi|126094681|gb|ABN64827.1| 26S proteasome regulatory subunit [Pichia stipitis CBS 6054]
  misc_feature (33)..(421): NCBI GI: 156846317 Blast Desc: Kpol_543p17 [Vanderwaltozyma polyspora DSM 70294] gi|156116718|gb|EDO18188.1| Kpol_543p17 [Vanderwaltozyma polyspora DSM 70294]
  misc_feature (60)..(421): NCBI GI: 255724168 Blast Desc: 26S protease regulatory subunit 6B [Candida tropicalis MYA-3404] gi|240134904|gb|EER34458.1| 26S protease regulatory subunit 6B [Candida tropicalis MYA-3404]
  misc_feature (32)..(421): NCBI GI: 50305059 Blast Desc: protein product [Kluyveromyces lactis] gi|49641621|emb|CAH01339.1| KLLA0C06534p [Kluyveromyces lactis]
  misc_feature (39)..(421): NCBI GI: 260950849 Blast Desc: CLUG_00880 [Clavispora lusitaniae ATCC 42720] gi|238847293|gb|EEQ36757.1| CLUG_00880 [Clavispora lusitaniae ATCC 42720]
  misc_feature (20)..(421): NCBI GI: 68481390 Blast Desc: likely 26S proteasome regulatory particle ATPase Rpt3p [Candida albicans SC5314] gi|68481521|ref|XP_715269.1| likely 26S proteasome regulatory particle ATPase Rpt3p [Candida albicans 26S
  misc_feature (60)..(421): NCBI GI: 241951076 Blast Desc: 26s protease regulatory subunit 6b homolog, ; tat-binding homolog 2, [Candida dubliniensis CD36] gi|223641599|emb|CAX43560.1| 26s protease regulatory subunit 6b ;
  misc_feature (20)..(421): NCBI GI: 238882101 Blast Desc: 26S protease regulatory subunit 6B [Candida albicans WO-1]
  misc_feature (37)..(421): NCBI GI: 149248778 Blast Desc: 26S protease regulatory subunit 6B [Lodderomyces elongisporus NRRL YB-4239] gi|146448730|gb|EDK43118.1| 26S protease regulatory subunit 6B [Lodderomyces elongisporus NRRL
  misc_feature (23)..(421): NCBI GI: 6320602 Blast Desc: One of six ATPases of the 19S regulatory particle of the 26S proteasome involved in the degradation of ubiquitinated substrates; substrate of N-acetyltransferase B [Saccharomyces 26S
  misc_feature (138)..(393): SWISSPROT Homolog: EC 3.6.1.3 Adenosinetriphosphatase
MGDVLVENPANTVAPHNKPIPSTIPNVETIEGVSSQGGDEYVTLKKLQRHLEYIQLQEEYIKDEQRSLKRELVRAQEEIKRIQSVPLVIGQFMEAIDQNTGIVQSSTGSNYVVRILSTLDRELLKPSSSVALHRHSNALVDILPPEADSSIAMLGADEKPDVTYADVGGLDMQKQEIREAVELPLTHFDLYKQIGIDPPRGVLLYGPPGTGKTMLVKAVANSTTANFIRVVGSEFVQKYLGEGPRMVRDVFRMARENSPAIIFIDEIDAIATKRFDAQTGADREVQRILLELLNQMDGFDQTSNVKVIMATNRADTLDPALLRPGRLDRKIEFPSLRDRRERRLIFSTIAGKMSLAPEVDLDSLIVRNDPLSGAVIAAIMQEAGLRAVRKNRYNIIQSDLEDAYSSQVKGDSDENKFDFYK

SEQ ID NO: 10554 - DNA, 1803 bp, Muscodor strobelii
  misc_feature: SGI EST ID NO. CUFF.24904.0
  misc_feature: Variant of the nucleotide sequence at SEQ ID NO 10552
gcttactgaggctcaaccttcagcttgacctcttcgagactagcgggtatctggaggctgcaaggctgtcgttgcattcgtagctctcccaacacagtgggcaatggtagcagtggcatgagtgaacgtagacctacctcatcgtgtgccttccaccaacttccgctgcagtcaatcctcccactgcgaaaccaacaacaaccaaataacccctctctcttcctccctaacacgactcacagcgccatctacaggatctgtctcgtggaggttccgaccatcccgcatttccccatcctccctcctcgccacatcggtctgacgcaaccgcgaagatgggcgacgtcctggtcgagaatcccgccaacacggttgcgcctcacaacaaacccatcccctccaccatacccaacgtcgagaccatcgagggcgtctcctcccagggcggcgatgagtatgtcacattgaagaagctacagcggcatctggagtacatccagctgcaggaggagtatatcaaagatgagcagaggagtctaaagcgcgagctcgtgcgcgcccaagaagagatcaagcgaatccagagtgtgcccttggtcatcggtcagtttatggaggccatcgatcagaacaccggcatcgtccagtccagtaccggttccaactacgtcgtacgcatcttgtcgacgctggatcgtgaattgttgaagccgtcgtcatcagtcgcgctccaccgtcactccaatgcgctcgtcgacattttgcctcccgaggccgactcgtctattgccatgctgggtgccgacgagaagcccgacgttacatacgccgatgttggtggattagatatgcagaagcaggagatccgcgaggccgtcgagctccccctgacacacttcgatctctacaagcagatcggtatcgatccgccgcgtggtgtcctactgtacggccctcccggtaccggaaagaccatgttggttaaggctgtagccaactccactaccgccaacttcattcgtgtcgtaggttccgaatttgttcagaagtatcttggtgaagggccacgtatggtgcgagatgtcttccgcatggcccgcgagaattcacctgccatcatcttcatcgatgagatcgatgccattgccaccaagcgtttcgatgcccagactggtgccgacagagaagtgcagcgtattttgctggaactcctaaatcagatggatggattcgatcagacttccaatgtcaaagtcattatggccacaaaccgcgccgatacgcttgatcccgctctgcttcgtcctggtcgattagatcgaaagatcgaattccccagtctgcgagaccggagagaaagacgtcttatcttctcgactatcgcaggaaagatgagcttagcaccagaggtcgacttggacagcttgattgtccgtaacgaccctctgagtggtgctgtcattgccgcaatcatgcaggaagccggtctccgtgctgtgcgtaaaaacagatacaatattattcaatccgatctggaagatgcgtactcgagccaggtcaagggcgacagtgacgagaataagttcgacttctacaagtaaacagctaggcttacgactctgggctgggctagggggtaatgaatttgggaagactggttagacatatgaaaagcgaacttcgactcatcacgctcaacattatgagacatgcgcgcggatcatggtgatagtcagggtcgttcttgaggcatactgcacccattgtaccatagcaatacagttgcattatgattgtggcatt

SEQ ID NO: 10555 - DNA, 1452 bp, Muscodor strobelii
  misc_feature: SGI cDNA ID NO. 563355
  misc_feature: Elevated expression when VOC is produced
  misc_feature: Encodes the peptide sequence at SEQ ID NO 10556
atggattccgagacagcgagccaggagaagcgcgttgtcgacatcgaggcttcctcggtcgactccgctgacttcactcctaagcaccagaagagcatcatccgtcatatcgatcgccgcctggtcgctatgaccggtgtcatgtactgtatcagtgtcacggacagaggaaacttgggtaacgcttatgtcgccggcttgggcaaagaccttcaactcactattgacaaccgttactcgattgtgacactcatcttcttcattacctacatcatcttccagcctccctccaccgttgccgtccgtaaactgggtccccgtattttcctctctggtgtaactgccgcttggggcattgttatgattggtttctctttcgttcacagctggggcgcgctcgctgctctccgtgtactgcttggtatcttcgaggctggtttcttcccctgtgtcgtctatctgttgtcgacatggtacacacgatatgagatgggcaagcgttatgcctggttctacgtcattggttgcttggcctccgccttctccggtatcttggcttatggtttgattcaccttgacggcgctggtggtcttgctggctggcgatggatcttccttttcgagggtctccttaccgttcttattgctgctctcggctacttgctcttggttgatttccctgactccaaccgtcctgtctggagcttcttgaccgacgctgagcgcttgtgggttgtcaagcgtgtcaaggctgaccgtggcgatgctcaacctactcctttcgtgctcggcacatacctccaaggactgaaggactggagaatctgggcttatggtggtatgggtattggtacttccacgatcaactactcattctcctacttcttgccgatcattttgaacaagaacttgggtttcagcactgccctgtctcagattctggtcgctcccccttacggatttgctgctatctacatggttgctgtcaacactcttggtgaccgatacaagtggcgtggacctgtcatcatgttcaacatgcttctctgcgtcattggtgtcccaattctgggatggcactccaacaactacgtccgctacttcggctgcttcttggtctgcgctggtgccaacgctaaccttccatccgttcttgcattgcaaggtaacaacatccgtggacagtggaagcgtgctctttgcagtgccatgttcgtcggcctcgctggtttcggtggtattgtcggttctttggtgttccgtcaacaagacgctgctacaggctacaagcccggtttggaagcctgtattgtcgccgctctgcttgtcgctctgcttgcaattctctgcgatatctcatactggagggccaacaaggctgctgaccgtggcgagaaggagcttgaggccgaagaagatggtcctcagcctggtttccgctacaccttgtaa

SEQ ID NO: 10556 - protein, 483 aa, Muscodor strobelii
  misc_feature: SGI Peptide ID NO. 563355
  misc_feature (45)..(417): Pfam Id: PF07690 Pfam Desc: Major Facilitator Superfamily
  misc_feature (17)..(482): NCBI GI: 85092685 Blast Desc: NCU02238 [Neurospora crassa OR74A] gi|28920931|gb|EAA30261.1| NCU02238 [Neurospora crassa OR74A]
  misc_feature (2)..(482): NCBI GI: 46110377 Blast Desc: FG02070.1 [Gibberella zeae PH-1]
  misc_feature (2)..(482): NCBI GI: 171679529 Blast Desc: protein product [Podospora anserina] gi|170939390|emb|CAP64618.1| protein product [Podospora anserina]
  misc_feature (6)..(482): NCBI GI: 256728761 Blast Desc: [Nectria haematococca mpVI 77-13-4]
  misc_feature (8)..(482): NCBI GI: 39942436 Blast Desc: MGG_03298 [Magnaporthe grisea 70-15] gi|145015697|gb|EDK00187.1| MGG_03298 [Magnaporthe grisea 70-15]
  misc_feature (1)..(482): NCBI GI: 189196945 Blast Desc: conserved [Pyrenophora tritici-repentis Pt-1C-BFP] gi|187980758|gb|EDU47384.1| conserved [Pyrenophora tritici-repentis Pt-1C-BFP]
  misc_feature (8)..(482): NCBI GI: 169616610 Blast Desc: SNOG_11478 [Phaeosphaeria nodorum SN15] gi|160703221|gb|EAT81186.2| SNOG_11478 [Phaeosphaeria nodorum SN15]
  misc_feature (2)..(483): NCBI GI: 154277218 Blast Desc: conserved [Ajellomyces capsulatus NAm1] gi|150413035|gb|EDN08418.1| conserved [Ajellomyces capsulatus NAm1]
  misc_feature (10)..(483): NCBI GI: 240280179 Blast Desc: phthalate transporter [Ajellomyces capsulatus H143]
  misc_feature (2)..(483): NCBI GI: 261190652 Blast Desc: phthalate transporter [Ajellomyces dermatitidis SLH14081] gi|239591158|gb|EEQ73739.1| phthalate transporter [Ajellomyces dermatitidis SLH14081]
  misc_feature: Useful for introducing or modulating the production of volatile compounds
MDSETASQEKRVVDIEASSVDSADFTPKHQKSIIRHIDRRLVAMTGVMYCISVTDRGNLGNAYVAGLGKDLQLTIDNRYSIVTLIFFITYIIFQPPSTVAVRKLGPRIFLSGVTAAWGIVMIGFSFVHSWGALAALRVLLGIFEAGFFPCVVYLLSTWYTRYEMGKRYAWFYVIGCLASAFSGILAYGLIHLDGAGGLAGWRWIFLFEGLLTVLIAALGYLLLVDFPDSNRPVWSFLTDAERLWVVKRVKADRGDAQPTPFVLGTYLQGLKDWRIWAYGGMGIGTSTINYSFSYFLPIILNKNLGFSTALSQILVAPPYGFAAIYMVAVNTLGDRYKWRGPVIMFNMLLCVIGVPILGWHSNNYVRYFGCFLVCAGANANLPSVLALQGNNIRGQWKRALCSAMFVGLAGFGGIVGSLVFRQQDAATGYKPGLEACIVAALLVALLAILCDISYWRANKAADRGEKELEAEEDGPQPGFRYTL

SEQ ID NO: 10557 - DNA, 2061 bp, Muscodor strobelii
  misc_feature: SGI EST ID NO. CUFF.24907.0
  misc_feature: Variant of the nucleotide sequence at SEQ ID NO 10555
taagaatgcaagactttggacagattgtggacgcgctaggaaaataaactacacatgggcaagatcttggcagacctgtaatagttgtcagactgtcgacacctctgggtgagattgggcacagcgtcgtcaccttgtactactgaatgtacatccgacagggagtcagaaccgagatatatagatatcgttcacgcccacgttatctgtgctgatcttgctccagccctgtcgtgaaacagtccatcattgttcttcacccattccttaactgccatttcccaggtgccctttgaaagggattccacctcttggcccgacctcacttcagtgttcacttctcattccgagcctctacactaggcctcttgttgtaatggattccgagacagcgagccaggagaagcgcgttgtcgacatcgaggcttcctcggtcgactccgctgacttcactcctaagcaccagaagagcatcatccgtcatatcgatcgccgcctggtcgctatgaccggtgtcatgtactgtatcagtgtcacggacagaggaaacttgggtaacgcttatgtcgccggcttgggcaaagaccttcaactcactattgacaaccgttactcgattgtgacactcatcttcttcattacctacatcatcttccagcctccctccaccgttgccgtccgtaaactgggtccccgtattttcctctctggtgtaactgccgcttggggcattgttatgattggtttctctttcgttcacagctggggcgcgctcgctgctctccgtgtactgcttggtatcttcgaggctggtttcttcccctgtgtcgtctatctgttgtcgacatggtacacacgatatgagatgggcaagcgttatgcctggttctacgtcattggttgcttggcctccgccttctccggtatcttggcttatggtttgattcaccttgacggcgctggtggtcttgctggctggcgatggatcttccttttcgagggtctccttaccgttcttattgctgctctcggctacttgctcttggttgatttccctgactccaaccgtcctgtctggagcttcttgaccgacgctgagcgcttgtgggttgtcaagcgtgtcaaggctgaccgtggcgatgctcaacctactcctttcgtgctcggcacatacctccaaggactgaaggactggagaatctgggcttatggtggtatgggtattggtacttccacgatcaactactcattctcctacttcttgccgatcattttgaacaagaacttgggtttcagcactgccctgtctcagattctggtcgctcccccttacggatttgctgctatctacatggttgctgtcaacactcttggtgaccgatacaagtggcgtggacctgtcatcatgttcaacatgcttctctgcgtcattggtgtcccaattctgggatggcactccaacaactacgtccgctacttcggctgcttcttggtctgcgctggtgccaacgctaaccttccatccgttcttgcattgcaaggtaacaacatccgtggacagtggaagcgtgctctttgcagtgccatgttcgtcggcctcgctggtttcggtggtattgtcggttctttggtgttccgtcaacaagacgctgctacaggctacaagcccggtttggaagcctgtattgtcgccgctctgcttgtcgctctgcttgcaattctctgcgatatctcatactggagggccaacaaggctgctgaccgtggcgagaaggagcttgaggccgaagaagatggtcctcagcctggtttccgctacaccttgtaaagttttggagctcggattgactctattccgagtctatcattcacattccgcgttactctagtgatcaaaactggcactgcgtctcaacgctgacatagcgatatcttggcgactggtttattggataccaacctgcgactagaggaatcataaattgggttttgcctttcaaatgctttttaccaactgtatatagattcaattcaaaacacttcaactaatatcattcttgc

SEQ ID NO: 10558 - DNA, 4725 bp, Muscodor strobelii
  misc_feature: SGI cDNA ID NO. 563356
  misc_feature: Elevated expression when VOC is produced
  misc_feature: Encodes the peptide sequence at SEQ ID NO 10559
atggctaatccacagaagcaatggacagacgaatcgcgatcagaagagtctcatggaacccgatcatcctcagcgtcgttaatacaaacgagactccgtcggttaaagacattcgcttcccaaaagaacttcatagagtccgccgaagaggtgcgagggcggttcggattgactacatttcatgagccctccgagccacatgtagagcttatattcgtgcatggcctcggtggtggctcccgaaaaacctggtgtgattctgaagatagaaatttatactggccgaaagaatggctacctacggagcctggcttcaaacatgcccgcatacacacatacggttacaattcagattggaccaagcgacagcagagtaacctgacaatccatgatttcggtcaggcactattagctgacgtctacaactcacctcatctccggagatcagtaaatacaccgataatcttcgttgctcatagtatgggcggtcttgtagtcaaaaaggcttttctgctcgcaacaagagatcgtatataccactccatcgccgatcgtgtccattctatgtatttcttagcgtcccctcatagaggagcagattccgcacaattggccatgcgtgtactttcagcatctatttctcacggacagaagtcgtatgttggtgagcttgtaccgggttctggaactttgcaggccatcaatgacgagtttcgtcatgtatgtgaacgattgaaggtatggtctttcttcgaaagcgcagctactaccgctgggcctgcttctataacggtggtagataaggagtccgcagttataggacttcccggggaacatgttcaatatttagaggccgaccatcgtcatatatgcaagttcaacgggcctaaccattcgaattacgtgatcctacacagatgcttgatgaacagcattcaagaaatagagaacagcgactcgtttaaaaggaatgaacagcatagaagccaaatgaagcgcataggagaaatgctcggcattagtcgccgtcccgaatctaatttgctagatacggcagagaagcaacacaaaggctcttgttgctggctcactaaaagcgacgagttctctgaatgggtcgaagtcaagctgaaagataacaaaagcccacttggggagccggtcggcacgatcccgaggtttctctggctcagcggacctccaggttcaggaaagtcggtggcagccggccatgtgatcagatatcttgagtcgtgcaatttcgactgcagtttctacttcttcaattatcgcgataaggataaacagtcattatcggaacttttgaggtctttggcattccaaatggctgcatcgaacaacgagattcgtcaaactctccttgagatggttgataacgaggaatctattttgaaagacgactataacatgatatggaacactattttcagaaatcgcatcctaaaaaccgttttttcgcagccgcatttttgggtcatagatgctttagacgaatgttcgagcaaaaatttgatggcattagcccaaatgttttccagaataggtctggaatttcccttgagactgtttttcactagcagaccgacaggtcagattgagaccttatttcaccaagaaggggcaaccctgctggagcttcgaaccggatccgaagagtcattgtctgatattgcatctttcgttagggaaagatgggccttttcagaagaaccaatcatcagtcaatcactgctttcggaggtcttgagaaaatcaaacggtattttcttatgggcttcgttgattatcaatcgattagaagagacatatagcatggaagacgtggcagacgttctgcagcaagtcccatcagagatgaacgatatttacttaagaatcgtcgaatctatcggagagtctcagagtgcagagcttgctaaatgcatactcaaatggataatatgtgcccgcagaccattatcgacattagaactgcgggaagctatccgcacagacataaatcgcacactcacgacttccgacgaaaagctcggacacctctgcgggcacctaatagttgtggacaaaaccagtcaagtccaagtcattcatcagactgtaactacatttctcacacagagaagctctgatttttacatcgatcgaccaattgcacattcaagacttgccgagatctgtcttgaacatctgaatggtaaagacttctctccgccgcgctcccgacgaatgactacaagccagaggacgaagaacgtcttttcggactatgcttgcacttacttctcatatcatctggctcattctagcacatcactcgacaagccactgattctcctcgataagtttctagagtcaaattgcttatcgtgggttgagtccgttgctacgaccgggagtctcacagtcttgacgcgaacggtccagcatctgcaaacatatcttgcacgcagagagaagtatcggtcaccgttagggaaagaagttcactcagtcaagtcatgggtcaatgacattgcgcacatcgtggcagcgttcggaccaaacctactcgactcgccttcttcaatacacttcctcatccccccgttatgtcctccggcatcggccacaaacaaattattcggaaagaactcacgccaattcagactgattggctcttccgaagaagactgggatgatagaatttcatgctttctgtatccaacagacgtgttaagcgttgcaagtagtccccagttcttagcagttggcctcgcgagtggcaagattatgatatatgacaatgtcacatttgaggtgatatcgattttatcccatggcgagccagtccggcttctatcctttggggctctttcgacagttctcgcagcatgcagccctcggaaggtcgctttctggaccactcagcataaattactatggtcaacgcaactcgagagcgtcccactgtcactctgctttgggatagacgatgtggatctattcgttcctctcaaagatggaaatttggtcacattcaactgcaaaacgggcgacaaatcggatgacatcattctatgtcaactatcagattctgattccgaagatatcgatgaatatcaagttactccgccgtcaatcgttcgggtttcttcttccagcagactagcttcggttacttatcgcaattccccaataacgatttgggacctggacggaaacgacaaagtaggcgtctttgagaaagagggctgtgaggatgtctacaactccccgcaggtgattgacatggtttttaaccccatcgtggagttggatcttatcgccgtggcttataaagatggcgacattgccacgtttgatccttggacgcttgaacagcgatgtgttcatagtctcctcgtcgatgtgctcgcaacatcgccggacggccgaaccctcgctacaggcgatagtaacggtaccatacatcttttcgcattcgagacactgagacccttataccgaataacagctctagaggactgcattttaggaattgtttttgcatctaacaacctgcggtttttcgatatcagaggaatatgttgtaacgtctgggaacccccggttctaattcgccgtgaaggctcagatgagacttctagtgagccccagagcgaagaaataattcctgcattgccatctatgaaatattccaggctgttcgatgaggaagatacaatatcattcatgaatcattctcccgatgcaggtgtcatattttgtggacgagagaatggatcaattaccatccatgactccgtctccggaaaagctgtcaaacaactcaggctccatgctaggatggttggcattcgatatttgaaatggcatcattcacataggattttgatctcagttgattcgtcaagtcgatgcattcttacacgactttcgcatctagtcaaggggcggtggcaagaagaagatcgcttgctagatcatcgtgaaagagagaccatcttacatgccattttatccccaaatggaacctctttgctaactgctacaccccagaatttgaagatgtgggatctcgggaataatctattagcgagcacagagtcttcaatgtctattacgttagcaaatctaccaaatgataatagtcatttgctgaaaattagcaacgacacaatcgaccatcttaattgggacaacctgcttgtaccgcatgccgcgcacaaaacgcacatcatcagcacgaacacgaatagctctagcgaaactcacgatggcgcgtggcttgcacgcaacaataatctgatactcatcaaagtcacgcgattagacatgcaaataacagcattcactattctagacctctgcaagatcaatcagagtgaagcatccgtggagtcacgtgtcgcaaagaaaaggcttcgcgcaaatgtcaaatatttcattggcatacataaatcctctttactatttttggacaccaaaggatgggtttgctctatgaacgtcaaaaatattgttgatgccagcttctattgccgtcattttttcatccctctgacttggcaaaccggcgccgagatatcaatggaagtcatttctaaaagcagcattgcttttgctcatcaagatcaactcataatcttttcaggatttctggagtttgaagaaaaagtgtattttgaagagcgcccgttggataagacgttacccagacgctga

SEQ ID NO: 10559 - protein, 1574 aa, Muscodor strobelii
  misc_feature: SGI Peptide ID NO. 563356
  misc_feature (21)..(1562): NCBI GI: 171689660 Blast Desc: protein product [Podospora anserina] gi|170944792|emb|CAP70903.1| protein product [Podospora anserina]
  misc_feature (21)..(1308): NCBI GI: 116205171 Blast Desc: CHGG_10469 [Chaetomium globosum CBS 148.51] gi|88176597|gb|EAQ84065.1| CHGG_10469 [Chaetomium globosum CBS 148.51]
  misc_feature (46)..(1551): NCBI GI: 258563436 Blast Desc: [Uncinocarpus reesii 1704] gi|237907970|gb|EEP82371.1| [Uncinocarpus reesii 1704]
  misc_feature (50)..(1562): NCBI GI: 119176152 Blast Desc: CIMG_09821 [Coccidioides immitis RS]
  misc_feature (124)..(1562): NCBI GI: 256720637 Blast Desc: NECHADRAFT_50281 [Nectria haematococca mpVI 77-13-4]
  misc_feature (47)..(1564): NCBI GI: 159127877 Blast Desc: AFUB_041630 [Aspergillus fumigatus A1163]
  misc_feature (47)..(1564): NCBI GI: 146323333 Blast Desc: NACHT and WD domain protein [Aspergillus fumigatus Af293] gi|129558342|gb|EAL92825.2| NACHT and WD domain protein [Aspergillus fumigatus Af293]
  misc_feature (41)..(1563): NCBI GI: 240108760 Blast Desc: WD domain, G-beta repeat containing protein [Coccidioides posadasii C735 delta SOWgp]
  misc_feature (43)..(1560): NCBI GI: 46135873 Blast Desc: FG09452.1 [Gibberella zeae PH-1]
  misc_feature (46)..(1563): NCBI GI: 256733681 Blast Desc: NECHADRAFT_36093 [Nectria haematococca mpVI 77-13-4]
  misc_feature: Useful for introducing or modulating the production of volatile compounds
MANPQKQWTDESRSEESHGTRSSSASLIQTRLRRLKTFASQKNFIESAEEVRGRFGLTTFHEPSEPHVELIFVHGLGGGSRKTWCDSEDRNLYWPKEWLPTEPGFKHARIHTYGYNSDWTKRQQSNLTIHDFGQALLADVYNSPHLRRSVNTPIIFVAHSMGGLVVKKAFLLATRDRIYHSIADRVHSMYFLASPHRGADSAQLAMRVLSASISHGQKSYVGELVPGSGTLQAINDEFRHVCERLKVWSFFESAATTAGPASITVVDKESAVIGLPGEHVQYLEADHRHICKFNGPNHSNYVILHRCLMNSIQEIENSDSFKRNEQHRSQMKRIGEMLGISRRPESNLLDTAEKQHKGSCCWLTKSDEFSEWVEVKLKDNKSPLGEPVGTIPRFLWLSGPPGSGKSVAAGHVIRYLESCNFDCSFYFFNYRDKDKQSLSELLRSLAFQMAASNNEIRQTLLEMVDNEESILKDDYNMIWNTIFRNRILKTVFSQPHFWVIDALDECSSKNLMALAQMFSRIGLEFPLRLFFTSRPTGQIETLFHQEGATLLELRTGSEESLSDIASFVRERWAFSEEPIISQSLLSEVLRKSNGIFLWASLIINRLEETYSMEDVADVLQQVPSEMNDIYLRIVESIGESQSAELAKCILKWIICARRPLSTLELREAIRTDINRTLTTSDEKLGHLCGHLIVVDKTSQVQVIHQTVTTFLTQRSSDFYIDRPIAHSRLAEICLEHLNGKDFSPPRSRRMTTSQRTKNVFSDYACTYFSYHLAHSSTSLDKPLILLDKFLESNCLSWVESVATTGSLTVLTRTVQHLQTYLARREKYRSPLGKEVHSVKSWVNDIAHIVAAFGPNLLDSPSSIHFLIPPLCPPASATNKLFGKNSRQFRLIGSSEEDWDDRISCFLYPTDVLSVASSPQFLAVGLASGKIMIYDNVTFEVISILSHGEPVRLLSFGALSTVLAACSPRKVAFWTTQHKLLWSTQLESVPLSLCFGIDDVDLFVPLKDGNLVTFNCKTGDKSDDIILCQLSDSDSEDIDEYQVTPPSIVRVSSSSRLASVTYRNSPITIWDLDGNDKVGVFEKEGCEDVYNSPQVIDMVFNPIVELDLIAVAYKDGDIATFDPWTLEQRCVHSLLVDVLATSPDGRTLATGDSNGTIHLFAFETLRPLYRITALEDCILGIVFASNNLRFFDIRGICCNVWEPPVLIRREGSDETSSEPQSEEIIPALPSMKYSRLFDEEDTISFMNHSPDAGVIFCGRENGSITIHDSVSGKAVKQLRLHARMVGIRYLKWHHSHRILISVDSSSRCILTRLSHLVKGRWQEEDRLLDHRERETILHAILSPNGTSLLTATPQNLKMWDLGNNLLASTESSMSITLANLPNDNSHLLKISNDTIDHLNWDNLLVPHAAHKTHIISTNTNSSSETHDGAWLARNNNLILIKVTRLDMQITAFTILDLCKINQSEASVESRVAKKRLRANVKYFIGIHKSSLLFLDTKGWVCSMNVKNIVDASFYCRHFFIPLTWQTGAEISMEVISKSSIAFAHQDQLIIFSGFLEFEEKVYFEERPLDKTLPRR

SEQ ID NO: 10560 - DNA, 5668 bp, Muscodor strobelii
  misc_feature: SGI EST ID NO. CUFF.24974.2
  misc_feature: Variant of the nucleotide sequence at SEQ ID NO 10558
ggcgtatgtatgatcccataaaggtaggaggcacaacccaatcaagaccccggtcaagatcaatcacatctgagttgcatgcttggcgatgcagcatctcaacaacacatcaccaacagttgcattggatgttacgatggatgtgctcaagtgtactatcgcacaaatgcccgctcctgctctcgtttttcgcgatggccgatttaactctactctgaagctagaggcttgtaaaatcaccgtcatcgtggtaaagaaccgctcaaaatggctaatccacagaagcaatggacagacgaatcgcgatcagaagagtctcatggaacccgatcatcctcagcgtcgttaatacaaacgagactccgtcggttaaagacattcgcttcccaaaagaacttcatagagtccgccgaagaggtgcgagggcggttcggattgactacatttcatgagccctccgagccacatgtagagcttatattcgtgcatggcctcggtggtggctcccgaaaaacctggtgtgattctgaagatagaaatttatactggccgaaagaatggctacctacggagcctggcttcaaacatgcccgcatacacacatacggttacaattcagattggaccaagcgacagcagagtaacctgacaatccatgatttcggtcaggcactattagctgacgtctacaactcacctcatctccggagatcagtaaatacaccgataatcttcgttgctcatagtatgggcggtcttgtagtcaaaaaggcttttctgctcgcaacaagagatcgtatataccactccatcgccgatcgtgtccattctatgtatttcttagcgtcccctcatagaggagcagattccgcacaattggccatgcgtgtactttcagcatctatttctcacggacagaagtcgtatgttggtgagcttgtaccgggttctggaactttgcaggccatcaatgacgagtttcgtcatgtatgtgaacgattgaaggtatggtctttcttcgaaagcgcagctactaccgctgggcctgcttctataacggtggtagataaggagtccgcagttataggtacatcgcctcgttcattgcggtcggttaattttagtgcacttagatttgacctaaggcgtatttacaggacttcccggggaacatgttcaatatttagaggccgaccatcgtcatatatgcaagttcaacgggcctaaccattcgaattacgtgatcctacacagatgcttgatgaacagcattcaagaaatagagaacagcgactcgtttaaaaggaatgaacagcatagaagccaaatgaagcgcataggagaaatgctcggcattagtcgccgtcccgaatctaatttgctagatacggcagagaagcaacacaaaggctcttgttgctggctcactaaaagcgacgagttctctgaatgggtcgaagtcaagctgaaagataacaaaagcccacttggggagccggtcggcacgatcccgaggtttctctggctcagcggacctccaggttcaggaaagtcggtggcagccggccatgtgatcagatatcttgagtcgtgcaatttcgactgcagtttctacttcttcaattatcgcgataaggataaacagtcattatcggaacttttgaggtctttggcattccaaatggctgcatcgaacaacgagattcgtcaaactctccttgagatggttgataacgaggaatctattttgaaagacgactataacatgatatggaacactattttcagaaatcgcatcctaaaaaccgttttttcgcagccgcatttttgggtcatagatgctttagacgaatgttcgagcaaaaatttgatggcattagcccaaatgttttccagaataggtctggaatttcccttgagactgtttttcactagcagaccgacaggtcagattgagaccttatttcaccaagaaggggcaaccctgctggagcttcgaaccggatccgaagagtcattgtctgatattgcatctttcgttagggaaagatgggccttttcagaagaaccaatcatcagtcaatcactgctttcggaggtcttgagaaaatcaaacggtattttcttatgggcttcgttgattatcaatcgattagaagagacatatagcatggaagacgtggcagacgttctgcagcaagtcccatcagagatgaacgatatttacttaagaatcgtcgaatctatcggagagtctcagagtgcagagcttgctaaatgcatactcaaatggataatatgtgcccgcagaccattatcgacattagaactgcgggaagctatccgcacagacataaatcgcacactcacgacttccgacgaaaagctcggacacctctgcgggcacctaatagttgtggacaaaaccagtcaagtccaagtcattcatcagactgtaactacatttctcacacagagaagctctgatttttacatcgatcgaccaattgcacattcaagacttgccgagatctgtcttgaacatctgaatggtaaagacttctctccgccgcgctcccgacgaatgactacaagccagaggacgaagaacgtcttttcggactatgcttgcacttacttctcatatcatctggctcattctagcacatcactcgacaagccactgattctcctcgataagtttctagagtcaaattgcttatcgtgggttgagtccgttgctacgaccgggagtctcacagtcttgacgcgaacggtccagcatctgcaaacatatcttgcacgcagagagaagtatcggtcaccgttagggaaagaagttcactcagtcaagtcatgggtcaatgacattgcgcacatcgtggcagcgttcggaccaaacctactcgactcgccttcttcaatacacttcctcatccccccgttatgtcctccggcatcggccacaaacaaattattcggaaagaactcacgccaattcagactgattggctcttccgaagaagactgggatgatagaatttcatgctttctgtatccaacagacgtgttaagcgttgcaagtagtccccagttcttagcagttggcctcgcgagtggcaagattatgatatatgacaatgtcacatttgaggtgatatcgattttatcccatggcgagccagtccggcttctatcctttggggctctttcgacagttctcgcagcatgcagccctcggaaggtcgctttctggaccactcagcataaattactatggtcaacgcaactcgagagcgtcccactgtcactctgctttgggatagacgatgtggatctattcgttcctctcaaagatggaaatttggtcacattcaactgcaaaacgggcgacaaatcggatgacatcattctatgtcaactatcagattctgattccgaagatatcgatgaatatcaagttactccgccgtcaatcgttcgggtttcttcttccagcagactagcttcggttacttatcgcaattccccaataacgatttgggacctggacggaaacgacaaagtaggcgtctttgagaaagagggctgtgaggatgtctacaactccccgcaggtgattgacatggtttttaaccccatcgtggagttggatcttatcgccgtggcttataaagatggcgacattgccacgtttgatccttggacgcttgaacagcgatgtgttcatagtctcctcgtcgatgtgctcgcaacatcgccggacggccgaaccctcgctacaggcgatagtaacggtaccatacatcttttcgcattcgagacactgagacccttataccgaataacagctctagaggactgcattttaggaattgtttttgcatctaacaacctgcggtttttcgatatcagaggaatatgttgtaacgtctgggaacccccggttctaattcgccgtgaaggctcagatgagacttctagtgagccccagagcgaagaaataattcctgcattgccatctatgaaatattccaggctgttcgatgaggaagatacaatatcattcatgaatcattctcccgatgcaggtgtcatattttgtggacgagagaatggatcaattaccatccatgactccgtctccggaaaagctgtcaaacaactcaggctccatgctaggatggttggcattcgatatttgaaatggcatcattcacataggattttgatctcagttgattcgtcaagtcgatgcattcttacacgactttcgcatctagtcaaggggcggtggcaagaagaagatcgcttgctagatcatcgtgaaagagagaccatcttacatgccattttatccccaaatggaacctctttgctaactgctacaccccagaatttgaagatgtgggatctcgggaataatctattagcgagcacagagtcttcaatgtctattacgttagcaaatctaccaaatgataatagtcatttgctgaaaattagcaacgacacaatcgaccatcttaattgggacaacctgcttgtaccgcatgccgcgcacaaaacgcacatcatcagcacgaacacgaatagctctagcgaaactcacgatggcgcgtggcttgcacgcaacaataatctgatactcatcaaagtcacgcgattagacatgcaaataacagcattcactattctagacctctgcaagatcaatcagagtgaagcatccgtggagtcacgtgtcgcaaagaaaaggcttcgcgcaaatgtcaaatatttcattggcatacataaatcctctttactatttttggacaccaaaggatgggtttgctctatgaacgtcaaaaatattgttgatgccagcttctattgccgtcattttttcatccctctgacttggcaaaccggcgccgagatatcaatggaagtcatttctaaaagcagcattgcttttgctcatcaagatcaactcataatcttttcaggatttctggagtttgaagaaaaagtgtattttgaagagcgcccgttggataagacgttacccagacgctgaaagatttcgaaatgtgtatgtcgcttgatagaagcgtacaatatccatatcacgcacaaagaaggatgaagtattacgtcggcgtacaaatgatggtatggcaaactggaagtgtcctcgtgatagaaacctgctctgaacgcgttgttaaaccccgtgtcgcgccacgattgggaatgcttgcaatcctccatccgcacggaatgttgcattcgtgtttaaaatgcggttttgagacctttgctacttcttcttttgcgccccagtgtgtcccatcggctggcatttattgaaagccagaaggtatgattactactcatacatgtacttcagccagctacaaaaatatgcatattctatcacaaatgtagcttgctatgctccacacagaatctgagctgaaggacgtaggtacgttcatcaaggcctggtgagaagcgccatgaaccacatatgccaattccagaataccattaccccggagccccggagcaaacacatgagataagatagagaactcagatatgaaccattataagcagggagaactacgcctcagttggtctcacctagatttaatttggtgctccgatgctatcagaaaat

SEQ ID NO: 10561 - DNA, 3489 bp, Muscodor strobelii
  misc_feature: SGI cDNA ID NO. 563357
  misc_feature: Encodes the peptide sequence at SEQ ID NO 10562
atggctaatccacagaagcaatggacagacgaatcgcgatcagaagagtctcatggaacccgatcatcctcagcgtcgttaatacaaacgagactccgtcggttaaagacattcgcttcccaaaagaacttcatagagtccgccgaagaggtgcgagggcggttcggattgactacatttcatgagccctccgagccacatgtagagcttatattcgtgcatggcctcggtggtggctcccgaaaaacctggtgtgattctgaagatagaaatttatactggccgaaagaatggctacctacggagcctggcttcaaacatgcccgcatacacacatacggttacaattcagattggaccaagcgacagcagagtaacctgacaatccatgatttcggtcaggcactattagctgacgtctacaactcacctcatctccggagatcagtaaatacaccgataatcttcgttgctcatagtatgggcggtcttgtagtcaaaaaggcttttctgctcgcaacaagagatcgtatataccactccatcgccgatcgtgtccattctatgtatttcttagcgtcccctcatagaggagcagattccgcacaattggccatgcgtgtactttcagcatctatttctcacggacagaagtcgtatgttggtgagcttgtaccgggttctggaactttgcaggccatcaatgacgagtttcgtcatgtatgtgaacgattgaaggtatggtctttcttcgaaagcgcagctactaccgctgggcctgcttctataacggtggtagataaggagtccgcagttataggacttcccggggaacatgttcaatatttagaggccgaccatcgtcatatatgcaagttcaacgggcctaaccattcgaattacgtgatcctacacagatgcttgatgaacagcattcaagaaatagagaacagcgactcgtttaaaaggaatgaacagcatagaagccaaatgaagcgcataggagaaatgctcggcattagtcgccgtcccgaatctaatttgctagatacggcagagaagcaacacaaaggctcttgttgctggctcactaaaagcgacgagttctctgaatgggtcgaagtcaagctgaaagataacaaaagcccacttggggagccggtcggcacgatcccgaggtttctctggctcagcggacctccaggttcaggaaagtcggtggcagccggccatgtgatcagatatcttgagtcgtgcaatttcgactgcagtttctacttcttcaattatcgcgataaggataaacagtcattatcggaacttttgaggtctttggcattccaaatggctgcatcgaacaacgagattcgtcaaactctccttgagatggttgataacgaggaatctattttgaaagacgactataacatgatatggaacactattttcagaaatcgcatcctaaaaaccgttttttcgcagccgcatttttgggtcatagatgctttagacgaatgttcgagcaaaaatttgatggcattagcccaaatgttttccagaataggtctggaatttcccttgagactgtttttcactagcagaccgacaggtcagattgagaccttatttcaccaagaaggggcaaccctgctggagcttcgaaccggatccgaagagtcattgtctgatattgcatctttcgttagggaaagatgggccttttcagaagaaccaatcatcagtcaatcactgctttcggaggtcttgagaaaatcaaacggtattttcttatgggcttcgttgattatcaatcgattagaagagacatatagcatggaagacgtggcagacgttctgcagcaagtcccatcagagatgaacgatatttacttaagaatcgtcgaatctatcggagagtctcagagtgcagagcttgctaaatgcatactcaaatggataatatgtgcccgcagaccattatcgacattagaactgcgggaagctatccgcacagacataaatcgcacactcacgacttccgacgaaaagctcggacacctctgcgggcacctaatagttgtggacaaaaccagtcaagtccaagtcattcatcagactgtaactacatttctcacacagagaagctctgatttttacatcgatcgaccaattgcacattcaagacttgccgagatctgtcttgaacatctgaatggtaaagacttctctccgccgcgctcccgacgaatgactacaagccagaggacgaagaacgtcttttcggactatgcttgcacttacttctcatatcatctggctcattctagcacatcactcgacaagccactgattctcctcgataagtttctagagtcaaattgcttatcgtgggttgagtccgttgctacgaccgggagtctcacagtcttgacgcgaacggtccagcatctgcaaacatatcttgcacgcagagagaagtatcggtcaccgttagggaaagaagttcactcagtcaagtcatgggtcaatgacattgcgcacatcgtggcagcgttcggaccaaacctactcgactcgccttcttcaatacacttcctcatccccccgttatgtcctccggcatcggccacaaacaaattattcggaaagaactcacgccaattcagactgattggctcttccgaagaagactgggatgatagaatttcatgctttctgtatccaacagacgtgttaagcgttgcaagtagtccccagttcttagcagttggcctcgcgagtggcaagattatgatatatgacaatgtcacatttgaggtgatatcgattttatcccatggcgagccagtccggcttctatcctttggggctctttcgacagttctcgcagcatgcagccctcggaaggtcgctttctggaccactcagcataaattactatggtcaacgcaactcgagagcgtcccactgtcactctgctttgggatagacgatgtggatctattcgttcctctcaaagatggaaatttggtcacattcaactgcaaaacgggcgacaaatcggatgacatcattctatgtcaactatcagattctgattccgaagatatcgatgaatatcaagttactccgccgtcaatcgttcgggtttcttcttccagcagactagcttcggttacttatcgcaattccccaataacgatttgggacctggacggaaacgacaaagtaggcgtctttgagaaagagggctgtgaggatgtctacaactccccgcaggtgattgacatggtttttaaccccatcgtggagttggatcttatcgccgtggcttataaagatggcgacattgccacgtttgatccttggacgcttgaacagcgatgtgttcatagtctcctcgtcgatgtgctcgcaacatcgccggacggccgaaccctcgctacaggcgatagtaacgaatttgaagatgtgggatctcgggaataa

SEQ ID NO: 10562 - protein, 1162 aa, Muscodor strobelii
  misc_feature: SGI Peptide ID NO. 563357
  misc_feature (21)..(1152): NCBI GI: 171689660 Blast Desc: protein product [Podospora anserina] gi|170944792|emb|CAP70903.1| protein product [Podospora anserina]
  misc_feature (21)..(1153): NCBI GI: 116205171 Blast Desc: CHGG_10469 [Chaetomium globosum CBS 148.51] gi|88176597|gb|EAQ84065.1| CHGG_10469 [Chaetomium globosum CBS 148.51]
  misc_feature (46)..(1152): NCBI GI: 258563436 Blast Desc: [Uncinocarpus reesii 1704] gi|237907970|gb|EEP82371.1| [Uncinocarpus reesii 1704]
  misc_feature (50)..(1153): NCBI GI: 119176152 Blast Desc: CIMG_09821 [Coccidioides immitis RS]
  misc_feature (47)..(1148): NCBI GI: 159127877 Blast Desc: AFUB_041630 [Aspergillus fumigatus A1163]
  misc_feature (47)..(1148): NCBI GI: 146323333 Blast Desc: NACHT and WD domain protein [Aspergillus fumigatus Af293] gi|129558342|gb|EAL92825.2| NACHT and WD domain protein [Aspergillus fumigatus Af293]
  misc_feature (124)..(1150): NCBI GI: 256720637 Blast Desc: NECHADRAFT_50281 [Nectria haematococca mpVI 77-13-4]
  misc_feature (43)..(1153): NCBI GI: 46135873 Blast Desc: FG09452.1 [Gibberella zeae PH-1]
  misc_feature (46)..(1148): NCBI GI: 171679241 Blast Desc: protein product [Podospora anserina] gi|170939246|emb|CAP64474.1| protein product [Podospora anserina]
  misc_feature (46)..(1153): NCBI GI: 256733681 Blast Desc: NECHADRAFT_36093 [Nectria haematococca mpVI 77-13-4]
MANPQKQWTDESRSEESHGTRSSSASLIQTRLRRLKTFASQKNFIESAEEVRGRFGLTTFHEPSEPHVELIFVHGLGGGSRKTWCDSEDRNLYWPKEWLPTEPGFKHARIHTYGYNSDWTKRQQSNLTIHDFGQALLADVYNSPHLRRSVNTPIIFVAHSMGGLVVKKAFLLATRDRIYHSIADRVHSMYFLASPHRGADSAQLAMRVLSASISHGQKSYVGELVPGSGTLQAINDEFRHVCERLKVWSFFESAATTAGPASITVVDKESAVIGLPGEHVQYLEADHRHICKFNGPNHSNYVILHRCLMNSIQEIENSDSFKRNEQHRSQMKRIGEMLGISRRPESNLLDTAEKQHKGSCCWLTKSDEFSEWVEVKLKDNKSPLGEPVGTIPRFLWLSGPPGSGKSVAAGHVIRYLESCNFDCSFYFFNYRDKDKQSLSELLRSLAFQMAASNNEIRQTLLEMVDNEESILKDDYNMIWNTIFRNRILKTVFSQPHFWVIDALDECSSKNLMALAQMFSRIGLEFPLRLFFTSRPTGQIETLFHQEGATLLELRTGSEESLSDIASFVRERWAFSEEPIISQSLLSEVLRKSNGIFLWASLIINRLEETYSMEDVADVLQQVPSEMNDIYLRIVESIGESQSAELAKCILKWIICARRPLSTLELREAIRTDINRTLTTSDEKLGHLCGHLIVVDKTSQVQVIHQTVTTFLTQRSSDFYIDRPIAHSRLAEICLEHLNGKDFSPPRSRRMTTSQRTKNVFSDYACTYFSYHLAHSSTSLDKPLILLDKFLESNCLSWVESVATTGSLTVLTRTVQHLQTYLARREKYRSPLGKEVHSVKSWVNDIAHIVAAFGPNLLDSPSSIHFLIPPLCPPASATNKLFGKNSRQFRLIGSSEEDWDDRISCFLYPTDVLSVASSPQFLAVGLASGKIMIYDNVTFEVISILSHGEPVRLLSFGALSTVLAACSPRKVAFWTTQHKLLWSTQLESVPLSLCFGIDDVDLFVPLKDGNLVTFNCKTGDKSDDIILCQLSDSDSEDIDEYQVTPPSIVRVSSSSRLASVTYRNSPITIWDLDGNDKVGVFEKEGCEDVYNSPQVIDMVFNPIVELDLIAVAYKDGDIATFDPWTLEQRCVHSLLVDVLATSPDGRTLATGDSNEFEDVGSRE

SEQ ID NO: 10563 - DNA, 5668 bp, Muscodor strobelii; identical to SEQ ID NO: 10560
  misc_feature: SGI EST ID NO. CUFF.24974.2
  misc_feature: Variant of the nucleotide sequence at SEQ ID NO 10561

SEQ ID NO: 10564 - DNA, 1017 bp, Muscodor strobelii
  misc_feature: SGI cDNA ID NO. 563358
  misc_feature: Elevated expression when VOC is produced
  misc_feature: Encodes the peptide sequence at SEQ ID NO 10565
atgatggcgaagcctataccgaaacaagcagatcctctaggaaatggcgtgacactagacgatagtgtattaaatgcacttccaccggattgcgaagtcctcaatgtcgccccttcgggccaaagtctatgggttgggacagtcaaaatacaggtcaggctagcaaatggtactctcagcaactttttcaagaaaggtgcctctgacgaagtgggatatcacatgatgaagggggcgtttgaggctgagaatgctttatatggattcctccccaagatcatacctcgacccatcgcgtacggtacttataagtcacagcctgacacacatttctacctgagcgagtttgttgagatgcttgacgatgtgccgagcccacgagcatgggcatctgctgtagctgcgctccatagtcgtagcatgggccattcgccgacgggtcagttcgggtttccgattaagacacatctagccaacgttccggttgataacatctggaatccctcctgggaaaaattctgggcccaacaaatgaaatcgcttctcgatcgagaggaagaactacatgggtcagatgccgaatattcgaggctgaagagcagcttgttcgaggtggtcataccaagatacctgcggccattacaatccgaaggtcgatctatcgacccatgtcttattcattctgatctttggcctggtaatatcaagccgaggctagactcaagtttggtctgcatgtttgattcgtgtgcctattggggtcacaatgaggccgatctaggaatttgtcgtaatccgagatatcgcttagggaaagcatatctcaaacaatattggaaacatactcctatatctgagcctgaagaagatttcgaagacagaaacgctctgtatgccatgaagtatcatgtgctactttccataatgtaccacaaagacaaacgatttaggaatattgctatcgacgagatgagaagtctagtgcggcgcgcgagtcatacaccagatgcaaagtaa

SEQ ID NO: 10565 - protein, 338 aa, Muscodor strobelii
  misc_feature: SGI Peptide ID NO. 563358
  misc_feature (9)..(332): NCBI GI: 85114984 Blast Desc: NCU00873 [Neurospora crassa OR74A] gi|28926583|gb|EAA35553.1| conserved [Neurospora crassa OR74A]
  misc_feature (19)..(338): NCBI GI: 171689658 Blast Desc: protein product [Podospora anserina] gi|170944791|emb|CAP70902.1| protein product [Podospora anserina]
  misc_feature (17)..(324): NCBI GI: 116205173 Blast Desc: CHGG_10470 [Chaetomium globosum CBS 148.51] gi|88176598|gb|EAQ84066.1| CHGG_10470 [Chaetomium globosum CBS 148.51]
  misc_feature (76)..(330): NCBI GI: 240108761 Blast Desc: conserved [Coccidioides posadasii C735 delta SOWgp]
  misc_feature (19)..(331): NCBI GI: 256720827 Blast Desc: NECHADRAFT_85528 [Nectria haematococca mpVI 77-13-4]
  misc_feature (75)..(330): NCBI GI: 119176150 Blast Desc: CIMG_09820 [Coccidioides immitis RS]
  misc_feature (119)..(328): NCBI GI: 116205808 Blast Desc: CHGG_02197 [Chaetomium globosum CBS 148.51] gi|88182794|gb|EAQ90262.1| CHGG_02197 [Chaetomium globosum CBS 148.51]
  misc_feature (142)..(330): NCBI GI: 258563438 Blast Desc: conserved [Uncinocarpus reesii 1704] gi|237907971|gb|EEP82372.1| conserved [Uncinocarpus reesii 1704]
  misc_feature (19)..(317): NCBI GI: 169765035 Blast Desc: [Aspergillus oryzae RIB40] gi|83764843|dbj|BAE54987.1| protein product [Aspergillus oryzae]
  misc_feature (19)..(300): NCBI GI: 189204822 Blast Desc: conserved [Pyrenophora tritici-repentis Pt-1C-BFP] gi|187985845|gb|EDU51333.1| conserved [Pyrenophora tritici-repentis Pt-1C-BFP]
  misc_feature: Useful for introducing or modulating the production of volatile compounds
MMAKPIPKQADPLGNGVTLDDSVLNALPPDCEVLNVAPSGQSLWVGTVKIQVRLANGTLSNFFKKGASDEVGYHMMKGAFEAENALYGFLPKIIPRPIAYGTYKSQPDTHFYLSEFVEMLDDVPSPRAWASAVAALHSRSMGHSPTGQFGFPIKTHLANVPVDNIWNPSWEKFWAQQMKSLLDREEELHGSDAEYSRLKSSLFEVVIPRYLRPLQSEGRSIDPCLIHSDLWPGNIKPRLDSSLVCMFDSCAYWGHNEADLGICRNPRYRLGKAYLKQYWKHTPISEPEEDFEDRNALYAMKYHVLLSIMYHKDKRFRNIAIDEMRSLVRRASHTPDAK

SEQ ID NO: 10566 - DNA, 1548 bp, Muscodor strobelii
  misc_feature: SGI EST ID NO. CUFF.24910.0
  misc_feature: Variant of the nucleotide sequence at SEQ ID NO 10564
caaaagcgaggcttaggttgtagataaagtttgaaataattctcttcttaatatttgcattgaatcccacagaagacagtcaaagtagagtatccgatgatggcgaagcctataccgaaacaagcagatcctctaggaaatggcgtgacactagacgatagtgtattaaatgcacttccaccggattgcgaagtcctcaatgtcgccccttcgggccaaagtctatgggttgggacagtcaaaatacaggtcaggctagcaaatggtactctcagcaactttttcaagaaagtatttcttctctaaatggaagaagcgtaatcttttctcaatgggtttgcagggtgcctctgacgaagtgggatatcacatgatgaagggggcgtttgaggctgagaatgctttatatggattcctccccaagatcatacctcgacccatcgcgtacggtacttataagtcacagcctgacacacatttctacctgagcgagtttgttgagatgcttgacgatgtgccgagcccacgagcatgggcatctgctgtagctgcgctccatagtcgtagcatgggccattcgccgacgggtcagttcgggtttccgattaagacacatctagccaacgttccggttgataacatctggaatccctcctgggaaaaattctgggcccaacaaatgaaatcgcttctcgatcgagaggaagaactacatgggtcagatgccgaatattcgaggctgaagagcagcttgttcgaggtggtcataccaagatacctgcggccattacaatccgaaggtcgatctatcgacccatgtcttattcattctgatctttggcctggtaatatcaagccgaggctagactcaagtttggtctgcatgtttgattcgtgtgcctattggggtcacaatgaggccgatctaggaatttgtcgtaatccgagatatcgcttagggaaagcatatctcaaacaatattggaaacatactcctatatctgagcctgaagaagatttcgaagacagaaacgctctgtatgccatgaagtatcatgtgctactttccataatgtaccacaaagacaaacgatttaggaatattgctatcgacgagatgagaagtctagtgcggcgcgcgagtcatacaccagatgcaaagtaagacgcacaactatgatgaatttgagtcatgaattcatcaaggagggtcatatctgctgggagtcgtaaacatatgcccaactatacatagtcagatgctgcgggtcaaagtattttagttcatgatagcaagtgtttatatctttcctttaaatattcgctaaggggcttcgattcacatgcaccctttctgacttgatcgatcacatatccggcacagtcctgcactcatacatacttcgccacacacaataagtagtatagtattgttctataaagcaaaactttcgaatttctaaggctcttccattttatgagaagttgagaccgaccccattacatgttaagcaccttgaagattgagttgatgcaagtgaatctatg

SEQ ID NO: 10567 - DNA, 1482 bp, Muscodor strobelii
  misc_feature: SGI cDNA ID NO. 563359
  misc_feature: Encodes the peptide sequence at SEQ ID NO 10568
atgtccaccggcccaagaagcgcagccctttcagaaaaaacccttgagctaaaccaacataatgctaccattggcgccaaaacatccgaccatgagacagaggctcctttctccatcttcaccagaccccagaagaaatggatcagctttgtcgcctccttcggagcgctgttctcgactctgagcagctacatctatctgccagctttagtacccttggccaaagatctacacgtgtcactgaccttgataaatctcaccgtgacctcttacttaatagtcgcaggacttgcgccagctataatgggtgatatggcggatcagatcgggaagagacccgtatacatccttatgtttgttattatgttaggcgcaaacattggaatggcacttcagacttcataccctgtgcttcttgtgctgcgcatgctccggagcgctggttcatccggaacgtacggagcagcatatggagttgtcgcggatatcgctgaaatttccgaaagggggtcttatgtaggaacactactttttttcacaacaacagccccatcattcggaccagttattgggggcgtgttgactgagaagctcggatggagatcaatattctggttcctggttgttttgaccggggtccatttactcattatcgtgctatttctgccggaaacccaaagaaaactcgttggcaatgggaacagatctgtacatggcgtatactggagtctcttcactctgttcattcggagacagagcgttgaccaaacggcccaagcagattccatattcgcccgaaagcaccactttccaaacccatttgcgtgtgtccctgtactacttcataaaagctcttttgcggtcattgttatcggttccattacgtacacggtgaagatgactctacaaacgtctctagccgctcaatgcatcaaaatatatgacctgaactaccttcaggcggggttgatatacctctcctctggtattggtggctccattgcctcaatcatgacaggcaaacttcttgacagaaattataagaaaaaagttaaacttgtggaaaagtcagacgctcgagcaggggaagatgtgtcgaggttcccgattgaaagaactcgtcttcaaggtgctcatgttctggtgttgatcagcgccatcggcacggccggttacggcgctgttctccaaacaaaaacacatattgcagtcatgctggtcctgcaattcttgaccggcgcgaccacgtctagtattttcaccatgtgcggcacacttctgactgatttgaatactcagcggtcggccacggcacaagctgcttataatttggtgcgatgtttgagcgctgctggcggtatcgccgctcttgagccgctcgtgagggcggcagggtcaggatggacgttcggaatctatgggattatattcatactcagtcttccagcgatacggctactcgagactcgaggaagtgcatga

SEQ ID NO: 10568 - protein, 493 aa, Muscodor strobelii
  misc_feature: SGI Peptide ID NO. 563359
  misc_feature (52)..(454): Pfam Id: PF07690 Pfam Desc: Major Facilitator Superfamily
  misc_feature (37)..(491): NCBI GI: 85114992 Blast Desc: NCU00875 [Neurospora crassa OR74A] gi|28926585|gb|EAA35555.1| [Neurospora crassa OR74A]
  misc_feature (34)..(492): NCBI GI: 256720826 Blast Desc: NECHADRAFT_50131 [Nectria haematococca mpVI 77-13-4]
  misc_feature (7)..(422): NCBI GI: 240108759 Blast Desc: Major Facilitator Superfamily protein [Coccidioides posadasii C735 delta SOWgp]
  misc_feature (37)..(371): NCBI GI: 116205175 Blast Desc: CHGG_10471 [Chaetomium globosum CBS 148.51] gi|88176599|gb|EAQ84067.1| CHGG_10471 [Chaetomium globosum CBS 148.51]
  misc_feature (18)..(491): NCBI GI: 171676988 Blast Desc: protein product [Podospora anserina] gi|170936561|emb|CAP61221.1| protein product [Podospora anserina]
  misc_feature (36)..(482): NCBI GI: 156031347 Blast Desc: SS1G_14095 [Sclerotinia sclerotiorum 1980] gi|154699497|gb|EDN99235.1| SS1G_14095 [Sclerotinia sclerotiorum 1980]
  misc_feature (32)..(490): NCBI GI: 121707893 Blast Desc: MFS transporter, [Aspergillus clavatus NRRL 1] gi|119400118|gb|EAW10544.1| MFS transporter, [Aspergillus clavatus NRRL 1]
  misc_feature (29)..(470): NCBI GI: 119500304 Blast Desc: MFS transporter, [Neosartorya fischeri NRRL 181] gi|119415074|gb|EAW25012.1| MFS transporter, [Neosartorya fischeri NRRL 181]
  misc_feature (31)..(491): NCBI GI: 39944284 Blast Desc: MGG_04153 [Magnaporthe grisea 70-15] gi|145014887|gb|EDJ99455.1| MGG_04153 [Magnaporthe grisea 70-15]
  misc_feature (20)..(491): NCBI GI: 255950382 Blast Desc: Pc22g20580 [Penicillium chrysogenum Wisconsin 54-1255] gi|211592975|emb|CAP99346.1| Pc22g20580 [Penicillium chrysogenum Wisconsin 54-1255]
MSTGPRSAALSEKTLELNQHNATIGAKTSDHETEAPFSIFTRPQKKWISFVASFGALFSTLSSYIYLPALVPLAKDLHVSLTLINLTVTSYLIVAGLAPAIMGDMADQIGKRPVYILMFVIMLGANIGMALQTSYPVLLVLRMLRSAGSSGTYGAAYGVVADIAEISERGSYVGTLLFFTTTAPSFGPVIGGVLTEKLGWRSIFWFLVVLTGVHLLIIVLFLPETQRKLVGNGNRSVHGVYWSLFTLFIRRQSVDQTAQADSIFARKHHFPNPFACVPVLLHKSSFAVIVIGSITYTVKMTLQTSLAAQCIKIYDLNYLQAGLIYLSSGIGGSIASIMTGKLLDRNYKKKVKLVEKSDARAGEDVSRFPIERTRLQGAHVLVLISAIGTAGYGAVLQTKTHIAVMLVLQFLTGATTSSIFTMCGTLLTDLNTQRSATAQAAYNLVRCLSAAGGIAALEPLVRAAGSGWTFGIYGIIFILSLPAIRLLETRGSA

SEQ ID NO: 10569 - DNA, 580 bp, Muscodor strobelii
  misc_feature: SGI EST ID NO. CUFF.24916.0
  misc_feature: Variant of the nucleotide sequence at SEQ ID NO 10567
gcggatatcgctgaaatttccgaaagggggtcttatgtaggaacactactttttttcacaacaacagccccatcattcggaccagttattgggggcgtgttgactgagaagctcggatggagatcaatattctggttcctggttgttttgaccggggtccatttactcattatcgtgctatttctgccggaaacccaaagaaaactcgttggcaatgggaacagatctgtacatggcgtatactggagtctcttcactctgttcattcggagacagagcgttgaccaaacggcccaagcagattccatattcgcccgaaagcaccactttccaaacccatttgcgtgtgtccctgtactacttcataaaagctcttttgcggtcattgttatcggttccattacgtacacggtgaagatgactctacaaacgtctctagccgctcaatgcatcaaaatatatgacctgaactaccttcaggcggggttgatatacctctcctctggtattggtggctccattgcctcaatcatgacaggcaaacttcttgacagaaattataagaaaaaagttaaacttg

SEQ ID NO: 10570 - DNA, 582 bp, Muscodor strobelii
  misc_feature: SGI cDNA ID NO. 563360
  misc_feature: Encodes the peptide sequence at SEQ ID NO 10571
atgcgccgcatcttggagaaggtgaagagcacggtgagaggaaggcgggcccccgagcgcgacctcaagcgcgaccacaagacccgtggcaagaaggctctcgagaagcttcacgacctgttcagagaccgtagaccgccgccgccagtagcgcgccccgtgaagtttgacaagtacgtagagcccatcgtcctagatgactttggtccgtgtccagatcccagctggtcgacccttccgtgcctaaacgacagcgaaaacgagaacgacgattcgagcaaccagaaggaaactcctcggtcgccaccgccaagtccccgacgtgtaagattttccgatcaagtagatatcatcgtcctaaatgaccttggtccgtgtccagattcagactggactaggctcccgtgcctagacgacagcgatgatgaagacgacgatgaagaccaggaggagactcctgcgcgtccaccaagcccagacgacgatgacctccctccgcgacccggcgaatctttcctggagtacttccagagactggcccgttggaggtcacgcggactcgatgagtcttcaggtaagtaa

SEQ ID NO: 10571 - protein, 193 aa, Muscodor strobelii
  misc_feature: SGI Peptide ID NO. 563360
MRRILEKVKSTVRGRRAPERDLKRDHKTRGKKALEKLHDLFRDRRPPPPVARPVKFDKYVEPIVLDDFGPCPDPSWSTLPCLNDSENENDDSSNQKETPRSPPPSPRRVRFSDQVDIIVLNDLGPCPDSDWTRLPCLDDSDDEDDDEDQEETPARPPSPDDDDLPPRPGESFLEYFQRLARWRSRGLDESSGK

SEQ ID NO: 10572 - DNA, 961 bp, Muscodor strobelii
  misc_feature: SGI EST ID NO. CUFF.24931.0
  misc_feature: Variant of the nucleotide sequence at SEQ ID NO 10570
gcttcacgtgcatgttttgaaaacgcgaaatacagtttacactatgttttctgccgctttcgtggcgttctgggagcaaaggcggtgtaccttctgttcccatacaaaaactgaccctccctaattctgcaagaattctgccaggctcgtcaatgctcccgaacccgtactcagctcgaattccagcatacagccacccacagcaacgtcaatataactccccactatcaacagcacgctcaaaagatgcgccgcatcttggagaaggtgaagagcacggtgagaggaaggcgggcccccgagcgcgacctcaagcgcgaccacaagacccgtggcaagaaggctctcgagaagcttcacgacctgttcagagaccgtagaccgccgccgccagtagcgcgccccgtgaagtttgacaagtacgtagagcccatcgtcctagatgactttggtccgtgtccagatcccagctggtcgacccttccgtgcctaaacgacagcgaaaacgagaacgacgattcgagcaaccagaaggaaactcctcggtcgccaccgccaagtccccgacgtgtaagattttccgatcaagtagatatcatcgtcctaaatgaccttggtccgtgtccagattcagactggactaggctcccgtgcctagacgacagcgatgatgaagacgacgatgaagaccaggaggagactcctgcgcgtccaccaagcccagacgacgatgacctccctccgcgacccggcgaatctttcctggagtacttccagagactggcccgttggaggtcacgcggactcgatgagtcttcaggtaagtaagtgtgatgattccctgtgtactaattttggtttgttttgttttcccccctcgggcttcccttccctccgcctcctccctcccccgttaaacgacaaaacccataaaaaacgtgaaaagaaaaacatattgtgt

SEQ ID NO: 10573 - DNA, 1152 bp, Muscodor strobelii
  misc_feature: SGI cDNA ID NO. 563361
  misc_feature: Encodes the peptide sequence at SEQ ID NO 10574
atgcactccaaaccacctggcgtagacctacaggaggagcgagagctttactatgaacgctcgcgacggtctgcagccccagagcctgagcctgtaccctacgccatgtcacacaaccatgagatgtcccaccagggactagcagcagtaagctggaagaaatatgccaatgatataaacatgaaaggctttggaagtgtgaaggactctaacacgaaccagcaacacctcacccctatcgaggaggaagaccccatccttgctaatgcacccaaggctccgcgagcaatgttgaaggagaacgaacctctttctgtcactccatcgaagagacgaaaccccaagtggattaagcctatgcctgacactactccacaaagacctagggcgccatttggagacccaagcccagttcgcccgggtactacaacacctcttctctttgacaatgaattcgttcagtctgtcgagcctgccaagagatccctggaagacctctaccgcgataatccagaatttgtgaagccgaatggcacacttaatgctgagacaatgacactcgtgcaaaccaccgccctcaaggtcgtccatcaggccctccttcattggatgaaaaggtggtgtcccgagatgaccatgccagaagtgctcaaagacacccgagcaggacatttcaagttcccaacgaccgtctcgggcgaaggggctcttgatctcactcgtatgagcggcacatttcacgagatgcttgagatctgcttccatacggaaggcaccgtcaaccatcaaaagctgctcaccaccgtggatcgctgcattgcattctgcggtgctatcaaggacgttaagcacaaagagtcgctagagaagaccagaatcaacatcaattggtggccgattgccctggatgcgaagaaactgggacttctcgaggaagctaataggcatctgaaggacttgcaacaacagcagcatcaattcgagactgctatcgtagacgaggcagatcgctacacgcatgaagaggtactaaaggagatggagcgggccattctgtcacttgttgaggtccaattcaacgtctggcgtgagaagacacgcatcgatatgctcgatacctgcaagacccttttggatctcaacaaggagtga

SEQ ID NO: 10574 - protein, 383 aa, Muscodor strobelii
  misc_feature: SGI Peptide ID NO. 563361
MHSKPPGVDLQEERELYYERSRRSAAPEPEPVPYAMSHNHEMSHQGLAAVSWKKYANDINMKGFGSVKDSNTNQQHLTPIEEEDPILANAPKAPRAMLKENEPLSVTPSKRRNPKWIKPMPDTTPQRPRAPFGDPSPVRPGTTTPLLFDNEFVQSVEPAKRSLEDLYRDNPEFVKPNGTLNAETMTLVQTTALKVVHQALLHWMKRWCPEMTMPEVLKDTRAGHFKFPTTVSGEGALDLTRMSGTFHEMLEICFHTEGTVNHQKLLTTVDRCIAFCGAIKDVKHKESLEKTRININWWPIALDAKKLGLLEEANRHLKDLQQQQHQFETAIVDEADRYTHEEVLKEMERAILSLVEVQFNVWREKTRIDMLDTCKTLLDLNKE

SEQ ID NO: 10575 - DNA, 960 bp, Muscodor strobelii
  misc_feature: SGI cDNA ID NO. 563362
  misc_feature: Reduced expression when VOC is produced
  misc_feature: Encodes the peptide sequence at SEQ ID NO 10576
atggcgcatatgacaaaccctctcgcgactgtcgaccagttataccggcgcacatcctccttcggcgcactcccatccgatctccaggatgccatattcttcgcgacccagagcttgacccaagcagcgggactgctactccggataccgcagtctgtgacggcacaggcgagcgtcgtgttggcccggttctggctcgtcgattcggtactcgatcacgaattctctgaagtgtcagcggcatccctattcgccgtagcaaagctcagcgcacacccgtgtcgaccacgcgacgtgagcaacgtatacgcctacctcctctcatcagcttcgccactcttccgcccccgaccaccaccaccagaccaagaagcacccgatccatcgacatactacctctcagacacagccttccgcaccttccacacccgtgttctcgcactcgaggctcgcatcctttacaaactaggcttcgatacgcacgtagcgctgccccacggactcgcagtgacatatctccagactctcgatttctgtggtgatgcttcgaagagtaggatagctcggcgagtcgttgcgttgctcaataccgctttactatcgccacagatgctctacttgacgcatcagcccaatgcccttgccgtggccgctatatacagtgccgcaagagatccggatataggtgccaggatgcctgagtgcgcctggtgggaagtctttgatgtcgatcgtgaggaactcggctttctcgtcgtcgggatgcgcagcttagagggctgggtacggaaactacaggatgatatcgaaggcttcggaaaaagtggcatgatcacgatcaaggactgtgagatggagatgaggaggcgcggactgaaattgaacgacggtggttcaggagttacgatggacgaagaggaggcgatgatgagggatatggacgagagacccgagcactga

SEQ ID NO: 10576 - protein, 319 aa, Muscodor strobelii
  misc_feature: SGI Peptide ID NO. 563362
  misc_feature (1)..(316): NCBI GI: 85108674 Blast Desc: NCU06979 [Neurospora crassa OR74A] gi|28924229|gb|EAA33383.1| conserved [Neurospora crassa OR74A]
  misc_feature (1)..(316): NCBI GI: 261352400 Blast Desc: cyclin domain-containing protein [Verticillium albo-atrum VaMs.102]
  misc_feature (1)..(316): NCBI GI: 256727439 Blast Desc: [Nectria haematococca mpVI 77-13-4]
  misc_feature (1)..(316): NCBI GI: 46123617 Blast Desc: FG06186.1 [Gibberella zeae PH-1]
  misc_feature (1)..(282): NCBI GI: 171683357 Blast Desc: protein product [Podospora anserina] gi|170941638|emb|CAP67292.1| protein product [Podospora anserina]
  misc_feature (1)..(257): NCBI GI: 145613690 Blast Desc: MGG_01437 [Magnaporthe grisea 70-15] gi|145020728|gb|EDK04857.1| MGG_01437 [Magnaporthe grisea 70-15]
  misc_feature (28)..(319): NCBI GI: 156057635 Blast Desc: SS1G_04549 [Sclerotinia sclerotiorum 1980] gi|154702334|gb|EDO02073.1| SS1G_04549 [Sclerotinia sclerotiorum 1980]
  misc_feature (1)..(290): NCBI GI: 212535464 Blast Desc: cyclin, [Penicillium marneffei ATCC 18224] gi|210070287|gb|EEA24377.1| cyclin, [Penicillium marneffei ATCC 18224]
  misc_feature (4)..(297): NCBI GI: 258572230 Blast Desc: conserved [Uncinocarpus reesii 1704] gi|237905147|gb|EEP79548.1| conserved [Uncinocarpus reesii 1704]
  misc_feature (4)..(290): NCBI GI: 242793122 Blast Desc: cyclin, [Talaromyces stipitatus ATCC 10500] gi|218718686|gb|EED18106.1| cyclin, [Talaromyces stipitatus ATCC 10500]
  misc_feature: Useful for introducing or modulating the production of volatile compounds
MAHMTNPLATVDQLYRRTSSFGALPSDLQDAIFFATQSLTQAAGLLLRIPQSVTAQASVVLARFWLVDSVLDHEFSEVSAASLFAVAKLSAHPCRPRDVSNVYAYLLSSASPLFRPRPPPPDQEAPDPSTYYLSDTAFRTFHTRVLALEARILYKLGFDTHVALPHGLAVTYLQTLDFCGDASKSRIARRVVALLNTALLSPQMLYLTHQPNALAVAAIYSAARDPDIGARMPECAWWEVFDVDREELGFLVVGMRSLEGWVRKLQDDIEGFGKSGMITIKDCEMEMRRRGLKLNDGGSGVTMDEEEAMMRDMDERPEH

SEQ ID NO: 10577 - DNA, 1223 bp, Muscodor strobelii
  misc_feature: SGI EST ID NO. CUFF.24981.1
  misc_feature: Variant of the nucleotide sequence at SEQ ID NO 10575
actttacaacaatgagtttcaatctcaagccatgaccaatccaaattacagtctttttacttgcacggctacgatatattctcgagaatgcgaggaggacgcgcgcctgaataatccttgacaaacctcaaaattcgccgtcctgcgatccccatctccacgatttcgcgatggcgcatatgacaaaccctctcgcgactgtcgaccagttataccggcgcacatcctccttcggcgcactcccatccgatctccaggatgccatattcttcgcgacccagagcttgacccaagcagcgggactgctactccggataccgcagtctgtgacggcacaggcgagcgtcgtgttggcccggttctggctcgtcgattcggtactcgatcacgaattctctgaagtgtcagcggcatccctattcgccgtagcaaagctcagcgcacacccgtgtcgaccacgcgacgtgagcaacgtatacgcctacctcctctcatcagcttcgccactcttccgcccccgaccaccaccaccagaccaagaagcacccgatccatcgacatactacctctcagacacagccttccgcaccttccacacccgtgttctcgcactcgaggctcgcatcctttacaaactaggcttcgatacgcacgtagcgctgccccacggactcgcagtgacatatctccagactctcgatttctgtggtgatgcttcgaagagtaggatagctcggcgagtcgttgcgttgctcaataccgctttactatcgccacagatgctctacttgacgcatcagcccaatgcccttgccgtggccgctatatacagtgccgcaagagatccggatataggtgccaggatgcctgagtgcgcctggtgggaagtctttgatgtcgatcgtgaggaactcggctttctcgtcgtcgggatgcgcagcttagagggctgggtacggaaactacaggatgatatcgaaggcttcggaaaaagtggcatgatcacgatcaaggactgtgagatggagatgaggaggcgcggactgaaattgaacgacggtggttcaggagttacgatggacgaagaggaggcgatgatgagggatatggacgagagacccgagcactgagatgtgagttagaatataccccgacataaatgacacacgagctttgaacacaacgacatgaaccgtgacctgttcggatctattgggtgaacg

SEQ ID NO: 10578 - DNA, 1089 bp, Muscodor strobelii
  misc_feature: SGI cDNA ID NO. 563363
  misc_feature: Encodes the peptide sequence at SEQ ID NO 10579
atgaggcttaagaatgtataccgtttggaactaccgccaacggcggacatgcatgttcatctacgacaagataaagtcatgcagctggtgaccccttatattcgaagaggtggagttgatacagtatttgttatgccaaacttgcagcctcccatcacaagtgttgctgcagccctaaaatacaaatcccagctccaggcaattgagccacaggtcaactatctgatgtctctttaccttcatccctccgttacacctgaggtcattgcggaagctgctgcggctggcattgctggcgtcaagctatatcctcaaggtgtcaccaccaactcggaatctggcgttgccggtgacttcgtagaagtctttgagtcgacctttgcggccatggaagagcatgatatcgtactgaacattcatggcgaggtgcctggcatagtcccggaagatggcacttcattggaagagctgttcttgcccactctgaagaaattaaacgatagattcccacgtctccgaattgttctcgaacactgctcgacggccgccgctgtggatgctgtacgtgcttgtagcccaaccgtcgccggtactatcacagcgcaccacctctaccttaccggagacataagtgaagttgatgcccatgcgttctgcaagcctattcccaaaactcccgcggatcgagatgctctactcagagccgcaagcagcggcgatccgaagttcttctttggaagcgacagcgcaccgcatcttttggtatctaagcaaggcaaaacagtgccagcaggagtattcacacagccttatgtgacgcaactcgtgcttctagcattggaagaagcaaccgaaaggggagtcatcagcgaagaagatgtcacacaggagcgaatcgaaggattcttgagtctattcgcgagacggttctacaaactacctgagcccacttcggggacgagaatcgtggtcaagagaacgggtgagactattgcctcaagtatcaagagcgcggatggaagcaccgaagttggactgtcgagggcgggtgatgatatcttcagtctcaggttcctttctgatgaatag

SEQ ID NO: 10579 - protein, 362 aa, Muscodor strobelii
  misc_feature: SGI Peptide ID NO. 563363
  misc_feature (15)..(313): Pfam Id: PF04909 Pfam Desc: Amidohydrolase
  misc_feature (15)..(191): Pfam Id: PF04909 Pfam Desc: Amidohydrolase
  misc_feature (1)..(350): NCBI GI: 149209801 Blast Desc: MGCH7_ch7g382 [Magnaporthe grisea 70-15] gi|86196337|gb|EAQ70975.1| MGCH7_ch7g382 [Magnaporthe grisea 70-15]
  misc_feature (1)..(358): NCBI GI: 238840053 Blast Desc: dihydroorotase [Microsporum canis CBS 113480]
  misc_feature (1)..(360): NCBI GI: 119178476 Blast Desc: CIMG_08074 [Coccidioides immitis RS]
  misc_feature (1)..(360): NCBI GI: 119483608 Blast Desc: dihydroorotase, homodimeric type [Neosartorya fischeri NRRL 181] gi|119409863|gb|EAW19810.1| dihydroorotase, homodimeric type [Neosartorya fischeri NRRL 181]
  misc_feature (1)..(360): NCBI GI: 240104874 Blast Desc: dihydroorotase, homodimeric type family protein [Coccidioides posadasii C735 delta SOWgp]
  misc_feature (1)..(358): NCBI GI: 121715145 Blast Desc: dihydroorotase, homodimeric type [Aspergillus clavatus NRRL 1] gi|119403338|gb|EAW13756.1| dihydroorotase, homodimeric type [Aspergillus clavatus NRRL 1]
  misc_feature (1)..(359): NCBI GI: 145610201 Blast Desc: MGG_12634 [Magnaporthe grisea 70-15] gi|145017556|gb|EDK01919.1| MGG_12634 [Magnaporthe grisea 70-15]
  misc_feature (1)..(360): NCBI GI: 258577311 Blast Desc: dihydroorotase [Uncinocarpus reesii 1704] gi|237903103|gb|EEP77504.1| dihydroorotase [Uncinocarpus reesii 1704]
  misc_feature (45)..(358): NCBI GI: 46136123 Blast Desc: FG09577.1 [Gibberella zeae PH-1]
  misc_feature (45)..(358): NCBI GI: 256727590 Blast Desc: [Nectria haematococca mpVI 77-13-4]
  misc_feature (9)..(335): SWISSPROT Homolog: EC 3.5.2.3 Dihydroorotase
MRLKNVYRLELPPTADMHVHLRQDKVMQLVTPYIRRGGVDTVFVMPNLQPPITSVAAALKYKSQLQAIEPQVNYLMSLYLHPSVTPEVIAEAAAAGIAGVKLYPQGVTTNSESGVAGDFVEVFESTFAAMEEHDIVLNIHGEVPGIVPEDGTSLEELFLPTLKKLNDRFPRLRIVLEHCSTAAAVDAVRACSPTVAGTITAHHLYLTGDISEVDAHAFCKPIPKTPADRDALLRAASSGDPKFFFGSDSAPHLLVSKQGKTVPAGVFTQPYVTQLVLLALEEATERGVISEEDVTQERIEGFLSLFARRFYKLPEPTSGTRIVVKRTGETIASSIKSADGSTEVGLSRAGDDIFSLRFLSDE

SEQ ID NO: 10580 - DNA, 1381 bp, Muscodor strobelii
  misc_feature: SGI EST ID NO. CUFF.24950.0
  misc_feature: Variant of the nucleotide sequence at SEQ ID NO 10578
gaaaaatttaaaggaaagaaacttcaactctctaaactgcacaagcttttcctcaattgtatcgacagaatgaggcttaagaatgtataccgtttggaactaccgccaacggcggacatgcatgttcatctacgacaagataaagtcatgcagctggtgaccccttatattcgaagaggtggagttgatacagtatttgttatgccaaacttgcagcctcccatcacaagtgttgctgcagccctaaaatacaaatcccagctccaggcaattgagccacaggtcaactatctgatgtctctttaccttcatccctccgttacacctgaggtcattgcggaagctgctgcggctggcattgctggcgtcaagctatatcctcaaggtgtcaccaccaactcggaatctggcgttgccggtgacttcgtagaagtctttgagtcgacctttgcggccatggaagagcatgatatcgtactgaacattcatggcgaggtgcctggcatagtcccggaagatggcacttcattggaagagctgttcttgcccactctgaagaaattaaacgatagattcccacgtctccgaattgttctcgaacactgctcgacggccgccgctgtggatgctgtacgtgcttgtagcccaaccgtcgccggtactatcacagcgcaccacctctaccttaccggagacataagtgaagttgatgcccatgcgttctgcaagcctattcccaaaactcccgcggatcgagatgctctactcagagccgcaagcagcggcgatccgaagttcttctttggaagcgacagcgcaccgcatcttttggtatctaagcaaggcaaaacagtgccagcaggagtattcacacagccttatgtgacgcaactcgtgcttctagcattggaagaagcaaccgaaaggggagtcatcagcgaagaagatgtcacacaggagcgaatcgaaggattcttgagtctattcgcgagacggttctacaaactacctgagcccacttcggggacgagaatcgtggtcaagagaacgggtgagactattgcctcaagtatcaagagcgcggatggaagcaccgaagttggactgtcgagggcgggtgatgatatcttcagtctcaggttcctttctgatgaatagtcctagaaaagggttggggccgcgcgattcttcggccagcttgtcttatggccttttgtaaaacatgcatgtttagtttcaattagcatgtagaatgggttttgtatgtgaattacggctaccgaagctgttcgtataggagttctaggcgattgagaaagcacatggttcgtgtaacaggtaaaagcaccgagcctgagctcttgttaggggtaatacccag

SEQ ID NO: 10581 - DNA, 1233 bp, Muscodor strobelii
  misc_feature: SGI cDNA ID NO. 563364
  misc_feature: Encodes the peptide sequence at SEQ ID NO 10582
atggagctccaaccacttcctcatggagtacgaccgccaatcacgaccaaccgcatcctcaattttcccgaacgagagataatgcgacatgctcgaggcacccgtattatagtgcatcaccaatttccacagctagttcaagcctttatcaagcacaagttgaagtttgggtctgaagccgaacaggctttctatggacagccacactgggactggcgccggcaggtcagaaggcttattgagaagcgcgctctcgtttttcttaattcgtccgaccacacagtgctacgagacggcagtcaactcggagccgtgagtgcagaatgggatctagtcggaacggacaatgaactcggcaggatcaaactcgccgactacttgagttatgatgagatgatgctaggcagtctcatcggtgtcagcgggccgagtcatttcatcaacgacgggaatagatacaatggtggtaaagtaggtgcacccggcacttatgaaccatatggctacatcatgggcttagttggagcacgcttcgaacgtcctgatgtgatggactctatccacatgctaccaagccgcagtgataaacctccaaagcaacatccagagctcagcaaaattttccagaacttcttcctgggccgacataaacatatcgttcaagggctcgatcacatgatgtaccttgcccgcatacagcatacggccgaactgctgcttctcgaagctaatgagcgcgcaagagacgaagaaaagatggcttacgtctatgttgtaggattgggtctcggagtatggggcttgcaggacaaagagactcaaacatcactttattgccaggctttcatggaatctctgaagagtttggaagaaaagctctccaacatcgggactgtcgactttgcatacatcaagtcgcccttcgactggacagagcagctggttacttacggatccaaccagcagtatcagatccatgtcaagtttaccaaacggaaccctgccgagaggctggtaagaagcaaccatggaaaagagcagcttctcgttgttagctatgcttgggattcgaattcgttccctggtaatgagtattgggttggcagtctaagcgcttcgggcgacccggcagctgcatgtatgtcaaccattggagagcttcataatccgatggtaaatctcgggtttctcaatcgtattgcggtattgggcgaacagccaacaggccgttga

SEQ ID NO: 10582 - protein, 410 aa, Muscodor strobelii
  misc_feature: SGI Peptide ID NO. 563364
  misc_feature (14)..(398): NCBI GI: 194888251 Blast Desc: GG18711 [Drosophila erecta] gi|190648534|gb|EDV45812.1| GG18711 [Drosophila erecta]
  misc_feature (37)..(398): NCBI GI: 195477112 Blast Desc: GE16350 [Drosophila yakuba] gi|194187619|gb|EDX01203.1| GE16350 [Drosophila yakuba]
  misc_feature (6)..(398): NCBI GI: 194768154 Blast Desc: GF19356 [Drosophila ananassae] gi|190623063|gb|EDV38587.1| GF19356 [Drosophila ananassae]
  misc_feature (5)..(398): NCBI GI: 195448441 Blast Desc: GK25024 [Drosophila willistoni] gi|194167744|gb|EDW82645.1| GK25024 [Drosophila willistoni]
  misc_feature (37)..(398): NCBI GI: 24639690 Blast Desc: CG3568 [Drosophila melanogaster] gi|21064131|gb|AAM29295.1| AT21585p [Drosophila melanogaster] gi|22831682|gb|AAF45952.2| CG3568 [Drosophila melanogaster]
  misc_feature (14)..(398): NCBI GI: 195340815 Blast Desc: GM12349 [Drosophila sechellia] gi|194131124|gb|EDW53167.1| GM12349 [Drosophila sechellia]
  misc_feature (10)..(398): NCBI GI: 195165813 Blast Desc: GL19969 [Drosophila persimilis] gi|194105867|gb|EDW27910.1| GL19969 [Drosophila persimilis]
  misc_feature (37)..(393): NCBI GI: 270008426 Blast Desc: TcasGA2_TC014931 [Tribolium castaneum]
  misc_feature (37)..(393): NCBI GI: 91085339 Blast Desc: : similar to GA17526-PA [Tribolium castaneum]
  misc_feature (5)..(398): NCBI GI: 198471431 Blast Desc: GA15510 [Drosophila pseudoobscura pseudoobscura] gi|198145914|gb|EAL32677.2| GA15510 [Drosophila pseudoobscura pseudoobscura]
MELQPLPHGVRPPITTNRILNFPEREIMRHARGTRIIVHHQFPQLVQAFIKHKLKFGSEAEQAFYGQPHWDWRRQVRRLIEKRALVFLNSSDHTVLRDGSQLGAVSAEWDLVGTDNELGRIKLADYLSYDEMMLGSLIGVSGPSHFINDGNRYNGGKVGAPGTYEPYGYIMGLVGARFERPDVMDSIHMLPSRSDKPPKQHPELSKIFQNFFLGRHKHIVQGLDHMMYLARIQHTAELLLLEANERARDEEKMAYVYVVGLGLGVWGLQDKETQTSLYCQAFMESLKSLEEKLSNIGTVDFAYIKSPFDWTEQLVTYGSNQQYQIHVKFTKRNPAERLVRSNHGKEQLLVVSYAWDSNSFPGNEYWVGSLSASGDPAAACMSTIGELHNPMVNLGFLNRIAVLGEQPTGR

SEQ ID NO: 10583 - DNA, 1710 bp, Muscodor strobelii
  misc_feature: SGI EST ID NO. CUFF.24952.0
  misc_feature: Variant of the nucleotide sequence at SEQ ID NO 10581
cgtgacttaggtaagcacggggcggccgacctacctggcactttgagaggttggcttcagtctcacaataaccaaaagacaataaacataactaacaaaagatgttgcaacaatgcagttgccgcttaacaaaagatagccttactcctacaaacagtctcattgagtcaaccgctcagccgcttgtggctgatgaacccggacaacttatatagatagccctattggtcttcggtctgacatgcaactaggcaacacttgaggctttcctagtcttattcatcaagcttagcagatcaacatcccataagaataggttggaccccctcaaaataggggaaatggcggcattatcctcgcaagaagctctcaggctgagatctatggagctccaaccacttcctcatggagtacgaccgccaatcacgaccaaccgcatcctcaattttcccgaacgagagataatgcgacatgctcgaggcacccgtattatagtgcatcaccaatttccacagctagttcaagcctttatcaagcacaagttgaagtttgggtctgaagccgaacaggctttctatggacagccacactgggactggcgccggcaggtcagaaggcttattgagaagcgcgctctcgtttttcttaattcgtccgaccacacagtgctacgagacggcagtcaactcggagccgtgagtgcagaatgggatctagtcggaacggacaatgaactcggcaggatcaaactcgccgactacttgagttatgatgagatgatgctaggcagtctcatcggtgtcagcgggccgagtcatttcatcaacgacgggaatagatacaatggtggtaaagtaggtgcacccggcacttatgaaccatatggctacatcatgggcttagttggagcacgcttcgaacgtcctgatgtgatggactctatccacatgctaccaagccgcagtgataaacctccaaagcaacatccagagctcagcaaaattttccagaacttcttcctgggccgacataaacatatcgttcaagggctcgatcacatgatgtaccttgcccgcatacagcatacggccgaactgctgcttctcgaagctaatgagcgcgcaagagacgaagaaaagatggcttacgtctatgttgtaggattgggtctcggagtatggggcttgcaggacaaagagactcaaacatcactttattgccaggctttcatggaatctctgaagagtttggaagaaaagctctccaacatcgggactgtcgactttgcatacatcaagtcgcccttcgactggacagagcagctggttacttacggatccaaccagcagtatcagatccatgtcaagtttaccaaacggaaccctgccgagaggctggtaagaagcaaccatggaaaagagcagcttctcgttgttagctatgcttgggattcgaattcgttccctggtaatgagtattgggttggcagtctaagcgcttcgggcgacccggcagctgcatgtatgtcaaccattggagagcttcataatccgatggtaaatctcgggtttctcaatcgtattgcggtattgggcgaacagccaacaggccgttgatttcatgactggtattgcgtgacgatacgcttaagtatacatagctttctatcagacaaagctagcatgacaataaaaaataaaaatatttcac

SEQ ID NO: 10584 - DNA, 894 bp, Muscodor strobelii
  misc_feature: SGI cDNA ID NO. 563365
  misc_feature: Encodes the peptide sequence at SEQ ID NO 10585
atgtcgcaagtttacctgataacgggtgcctccaccggcttcggtgctctgacagcacgagccctggccaaagaaggccacacagtcttcgcgggaatgtactcacacgacggcaacgccacgaaatacgaagaagaagcaacgaaattctcaatgacaaatagctgtgatcttcgctccgtatcactggacctactctcacaggagtccgtcaacgcagcagtaagacatgtgatcgacaccgcaggccgaatcgacgtggtggttcacaatgcaggacacatgtcttatgggccgacagaagctttcactccggaggtcttgttaagactttacgatgtcaacgtggtgggctgtcaacgcctcaacatggcggtattgcctcacatgcgacaagcccgcagaggacatctggtctggatcggtagctcgtcctcattcggtggtaatagtccctacctcggcccctatttcgcagccaaagcagcacaagatgctttagcgcagtcttatgcgcatgaacttacggcctggggtatcgagacgacgattgtgagcccaggtgttttcacatcaggcacaaatcactttcaggatgccgcgaagccgaatcgaccggatgttgcgcaggaatatgacgatggtccaaccgaaggattgggagagttgacgatgacgggaacggcgaaattaccgccgccaaatgccgatcctattgtggttgctgagactctagtcgagttggctcggttaccaagggggaagaagccttttaggatgcatcctgatccgtcgatgggaggtggtaatgctacggctgcggtgttggataataataagtataatcagtacttgaggatggggttgacgaagtatcttaatgtctggttatag

SEQ ID NO: 10585 - protein, 297 aa, Muscodor strobelii
  misc_feature: SGI Peptide ID NO. 563365
  misc_feature (3)..(176): Pfam Id: PF00106 Pfam Desc: short chain dehydrogenase
  misc_feature (5)..(242): Pfam Id: PF01370 Pfam Desc: NAD dependent epimerase/dehydratase family
  misc_feature (4)..(184): Pfam Id: PF08659 Pfam Desc: KR domain
  misc_feature (1)..(294): NCBI GI: 91783114 Blast Desc: short chain oxidoreductase [Burkholderia xenovorans LB400] gi|91687068|gb|ABE30268.1| short chain oxidoreductase [Burkholderia xenovorans LB400]
  misc_feature (3)..(294): NCBI GI: 222086889 Blast Desc: short-chain oxidoreductase protein [Agrobacterium radiobacter K84] gi|221724337|gb|ACM27493.1| short-chain oxidoreductase protein [Agrobacterium radiobacter K84]
  misc_feature (1)..(293): NCBI GI: 134296659 Blast Desc: short-chain dehydrogenase/reductase SDR [Burkholderia vietnamiensis G4] gi|134139816|gb|ABO55559.1| short-chain dehydrogenase/reductase SDR [Burkholderia vietnamiensis G4]
  misc_feature (1)..(293): NCBI GI: 170733841 Blast Desc: short-chain dehydrogenase/reductase SDR [Burkholderia cenocepacia MC0-3] gi|169817083|gb|ACA91666.1| short-chain dehydrogenase/reductase SDR [Burkholderia cenocepacia MC0-3]
  misc_feature (1)..(293): NCBI GI: 206561028 Blast Desc: short chain dehydrogenase [Burkholderia cenocepacia J2315] gi|198037070|emb|CAR52991.1| short chain dehydrogenase [Burkholderia cenocepacia J2315]
  misc_feature (1)..(293): NCBI GI: 107023418 Blast Desc: short-chain dehydrogenase/reductase SDR [Burkholderia cenocepacia AU 1054] gi|116690500|ref|YP_836123.1| short-chain dehydrogenase/reductase SDR [Burkholderia cenocepacia HI2424] SDR
  misc_feature (1)..(293): NCBI GI: 172063658 Blast Desc: short-chain dehydrogenase/reductase SDR [Burkholderia ambifaria MC40-6] gi|171996175|gb|ACB67093.1| short-chain dehydrogenase/reductase SDR [Burkholderia ambifaria MC40-6]
  misc_feature (1)..(293): NCBI GI: 223694789 Blast Desc: dehydrogenase with different specificities [uncultured bacterium BLR5]
  misc_feature (1)..(293): NCBI GI: 254247458 Blast Desc: short chain dehydrogenase [Burkholderia cenocepacia PC184] gi|124872234|gb|EAY63950.1| short chain dehydrogenase [Burkholderia cenocepacia PC184]
  misc_feature (1)..(294): NCBI GI: 272532402 Blast Desc: short-chain dehydrogenase/reductase SDR [Burkholderia sp. CCGE1002] gi|270350581|gb|EFA53865.1| short-chain dehydrogenase/reductase SDR [Burkholderia sp. CCGE1002]
  misc_feature (6)..(198): SWISSPROT Homolog: EC 1.1.1.105 Retinol dehydrogenase
MSQVYLITGASTGFGALTARALAKEGHTVFAGMYSHDGNATKYEEEATKFSMTNSCDLRSVSLDLLSQESVNAAVRHVIDTAGRIDVVVHNAGHMSYGPTEAFTPEVLLRLYDVNVVGCQRLNMAVLPHMRQARRGHLVWIGSSSSFGGNSPYLGPYFAAKAAQDALAQSYAHELTAWGIETTIVSPGVFTSGTNHFQDAAKPNRPDVAQEYDDGPTEGLGELTMTGTAKLPPPNADPIVVAETLVELARLPRGKKPFRMHPDPSMGGGNATAAVLDNNKYNQYLRMGLTKYLNVWL

SEQ ID NO: 10586 - DNA, 379 bp, Muscodor strobelii
  misc_feature: SGI EST ID NO. CUFF.24958.0
  misc_feature: Variant of the nucleotide sequence at SEQ ID NO 10584
cacacagtcttcgcgggaatgtactcacacgacggcaacgccacgaaatacgaagaagaagcaacgaaattctcaatgacaaatagctgtgatcttcgctccgtatcactggacctactctcacaggagtccgtcaacgcagcagtaagacatgtgatcgacaccgcaggccgaatcgacgtggtggttcacaatgcaggacacatgtcttatgggccgacagaagctttcactccggaggtcttgttaagactttacgatgtcaacgtggtgggctgtcaacgcctcaacatggcggtattgcctcacatgcgacaagcccgcagaggacatctggtctggatcggtagctcgtcctcattcggtggtaatagtccct

SEQ ID NO: 10587 - DNA, 435 bp, Muscodor strobelii
  misc_feature: SGI cDNA ID NO. 563366
  misc_feature: Encodes the peptide sequence at SEQ ID NO 10588
atgccatcctcgcagcgccccttcttcctatcttcgttcctcgcagccttccggcaacagccgccctctctatctgcctccgcccaaccaaacaagcacacacataccacatcaacgtctaccagctcaccctcgtcagcccgtcaaatatcatcctctacccagtccacaggcacatcctcccgcggcggcagcgtaatgaaccaactcccgttacactccccgcgtcaccacgggatgcccatcccaggcgcaggtgccggccgacgacgaggcagcgatagcagctcagaagggtttcgagacgtactcggcgccgataagtggtacataggaggtcggacagccgggggcgaggagaaattcttcaagctcggcgtagtgaaacgagttaagagccaagacaggctaagtttagatcggttaagtctgtga

SEQ ID NO: 10588 - protein, 144 aa, Muscodor strobelii
  misc_feature: SGI Peptide ID NO. 563366
  misc_feature (3)..(144): NCBI GI: 171683249 Blast Desc: protein product [Podospora anserina] gi|170941584|emb|CAP67238.1| protein product [Podospora anserina]
  misc_feature (1)..(144): NCBI GI: 46136307 Blast Desc: FG09669.1 [Gibberella zeae PH-1]
  misc_feature (1)..(144): NCBI GI: 85107982 Blast Desc: NCU07327 [Neurospora crassa OR74A] gi|28924092|gb|EAA33249.1| [Neurospora crassa OR74A]
  misc_feature (1)..(144): NCBI GI: 39943956 Blast Desc: MGG_03989 [Magnaporthe grisea 70-15] gi|145014708|gb|EDJ99276.1| MGG_03989 [Magnaporthe grisea 70-15]
  misc_feature (1)..(144): NCBI GI: 256726807 Blast Desc: NECHADRAFT_76167 [Nectria haematococca mpVI 77-13-4]
  misc_feature (3)..(144): NCBI GI: 189196048 Blast Desc: conserved [Pyrenophora tritici-repentis Pt-1C-BFP] gi|187980241|gb|EDU46867.1| conserved [Pyrenophora tritici-repentis Pt-1C-BFP]
  misc_feature (6)..(139): NCBI GI: 169597555 Blast Desc: SNOG_01564 [Phaeosphaeria nodorum SN15] gi|160707544|gb|EAT91213.2| SNOG_01564 [Phaeosphaeria nodorum SN15]
  misc_feature (90)..(144): NCBI GI: 156032551 Blast Desc: SS1G_13973 [Sclerotinia sclerotiorum 1980] gi|154699375|gb|EDN99113.1| SS1G_13973 [Sclerotinia sclerotiorum 1980]
  misc_feature (80)..(139): NCBI GI: 119178153 Blast Desc: CIMG_07942 [Coccidioides immitis RS] gi|240104778|gb|EER22973.1| conserved [Coccidioides posadasii C735 delta SOWgp]
  misc_feature (80)..(139): NCBI GI: 240276538 Blast Desc: HCDG_06272 [Ajellomyces capsulatus H143]
MPSSQRPFFLSSFLAAFRQQPPSLSASAQPNKHTHTTSTSTSSPSSARQISSSTQSTGTSSRGGSVMNQLPLHSPRHHGMPIPGAGAGRRRGSDSSSEGFRDVLGADKWYIGGRTAGGEEKFFKLGVVKRVKSQDRLSLDRLSL

SEQ ID NO: 10589 - DNA, 1962 bp, Muscodor strobelii
  misc_feature: SGI cDNA ID NO. 563367
  misc_feature: Encodes the peptide sequence at SEQ ID NO 10590
atgggttcactcacttcaatcctttctgagatatggcaggatatgtcatttcgtgactttgttgtcagcccgtttctttctgtcttctcccgccttggtatattcttactctgggctaggattgcagggtcagtcaaagtagcgacggcaattgtgatacttcttccctttttctcccaatggtcgcgcttgattgaaaacaatgtgcacgaaccctacttggacgaggtgttccatatccctcaaactcaggtctattgtgaggggagatactacgattgggatgacaagatcacaactcctccaggactctacatcctgaccgttctttacaatcgtctcacgttgttcccttgcacgattcaaaatattcgtcggttcaatgcggaggtgactcttcccattgcagtaattgcgcttgcctgcaaatggtcactggagaagagacacaacgggcaaaacggcactgcccaaagaccatcaaaccatgctatctggacaggagtcaatattacttcttttccagtgatcatgttcttttcggggctatactacactgatccactctcaacggcagttgttctacttgcctattatcaacatctcaaagcaccgagttctggaggctcgtcatacctatataatgcatcggtggttgggcttggcatctttgccttgctcaacagacaaaccaacgttttctgggttgttgggtatctgggcggattggaattgatccaaagcattaaagaattgaaccctcagcctgtagagacgccaacgttccagaatctttcggaacaggttcgattctatgtgaagagatactcccttggggatatacacgatcccccagttggtctagcataccctgttgatgtcgctctttgcgtcatcagcattgctatcgctgcattatgcaatttacataagatcttgcgcgtcgttctgttggcccgtggtctcatcctcgctacgtttgttggcttcattctctggaacggtggcgttgttctcggtgagaatttcatcccgactgaatttgcaatgtctgacactaaagcaggagataaatctcatcacgtcgctactgtccatctcgctcagatgttatacatatggcctctctttgtatttttctccgcaccactattcatacccaagatcctgagcttcatccgagctgggtatcaggctcttgttgctccgcaggcacccgcgaacgagaaaagtaaatcaggctcggctccggtccaggcagccagcctacagattttcaatctggttgggtcaagccatagactgcatcgagttctcttaacttcaattgcactcataggagcgggtgtcgtcgtgcgattcaataccatcatccatcccttcaccctcgctgacaacagacactacatgttttatgtctttcgttacagcattctgagggcatggtggatccggtacgctcttgtgccagtctacgtggcctgtgcctggctatgctggactgctctgcagggtccgtcgacagcctccagtagtctaccttcgaaatggatacagtccccattctcaactcatgttcggggagtcgaagatgataagtcttcaaattcttcaaagaacaagtcggcaaagaactcggctcatcatacacagacttctacacctacctcgaccgttctcctcctactacttacaactgcactctcactaatgaccgcgcctctggtcgagccgcgctatttcattctgccgtgggtattctggcgcctactcatacctgcgtcgtctccacggtctgagaccgaccagcgcaagatcgatccaatcctcgcccttgaatcggtttggttcttgcttatcaatgtggctacgatgtatgtgttcctgaagaagccatttttctggtacgcacctgatggcacaatactcgacgaggggcgtatgcagcggttcatgtggtaa

SEQ ID NO: 10590 - protein, 653 aa, Muscodor strobelii
  misc_feature: SGI Peptide ID NO. 563367
  misc_feature (66)..(590): Pfam Id: PF04922 Pfam Desc: DIE2/ALG10 family
  misc_feature (66)..(109): Pfam Id: PF04922 Pfam Desc: DIE2/ALG10 family
  misc_feature (450)..(493): Pfam Id: PF04922 Pfam Desc: DIE2/ALG10 family
  misc_feature (560)..(590): Pfam Id: PF04922 Pfam Desc: DIE2/ALG10 family
  misc_feature (61)..(653): NCBI GI: 256727367 Blast Desc: NECHADRAFT_32266 [Nectria haematococca mpVI 77-13-4]
  misc_feature (61)..(653): NCBI GI: 46136305 Blast Desc: FG09668.1 [Gibberella zeae PH-1] gi|81170362|sp|Q4HZE0.1|ALG10_GIBZE RecName: Full=Alpha-1,2 glucosyltransferase ALG10; AltName: ALG10; AltName: ALG10; 10
  misc_feature (47)..(653): NCBI GI: 81170363 Blast Desc: FG09668.1 [Gibberella zeae PH-1] gi|81170362|sp|Q4HZE0.1|ALG10_GIBZE RecName: Full=Alpha-1,2 glucosyltransferase ALG10; AltName: ALG10; AltName: ALG10; 10
  misc_feature (61)..(653): NCBI GI: 171683247 Blast Desc: protein product [Podospora anserina] gi|170941583|emb|CAP67237.1| protein product [Podospora anserina]
  misc_feature (61)..(653): NCBI GI: 88909573 Blast Desc: protein product [Podospora anserina] gi|170941583|emb|CAP67237.1| protein product [Podospora anserina]
  misc_feature (61)..(653): NCBI GI: 169603926 Blast Desc: SNOG_04972 [Phaeosphaeria nodorum SN15] gi|111066243|gb|EAT87363.1| SNOG_04972 [Phaeosphaeria nodorum SN15]
  misc_feature (41)..(653): NCBI GI: 121715580 Blast Desc: glucosyltransferase (Die2), [Aspergillus clavatus NRRL 1] gi|119403556|gb|EAW13973.1| glucosyltransferase (Die2), [Aspergillus clavatus NRRL 1]
  misc_feature (54)..(653): NCBI GI: 242787608 Blast Desc: glucosyltransferase (Die2), [Talaromyces stipitatus ATCC 10500] gi|218721194|gb|EED20613.1| glucosyltransferase (Die2), [Talaromyces stipitatus ATCC 10500]
  misc_feature (61)..(653): NCBI GI: 238496337 Blast Desc: glucosyltransferase (Die2), [Aspergillus flavus NRRL3357] gi|220694284|gb|EED50628.1| glucosyltransferase (Die2), [Aspergillus flavus NRRL3357]
  misc_feature (61)..(653): NCBI GI: 169775025 Blast Desc: [Aspergillus oryzae RIB40] gi|83769843|dbj|BAE59978.1| protein product [Aspergillus oryzae]
MGSLTSILSEIWQDMSFRDFVVSPFLSVFSRLGIFLLWARIAGSVKVATAIVILLPFFSQWSRLIENNVHEPYLDEVFHIPQTQVYCEGRYYDWDDKITTPPGLYILTVLYNRLTLFPCTIQNIRRFNAEVTLPIAVIALACKWSLEKRHNGQNGTAQRPSNHAIWTGVNITSFPVIMFFSGLYYTDPLSTAVVLLAYYQHLKAPSSGGSSYLYNASVVGLGIFALLNRQTNVFWVVGYLGGLELIQSIKELNPQPVETPTFQNLSEQVRFYVKRYSLGDIHDPPVGLAYPVDVALCVISIAIAALCNLHKILRVVLLARGLILATFVGFILWNGGVVLGENFIPTEFAMSDTKAGDKSHHVATVHLAQMLYIWPLFVFFSAPLFIPKILSFIRAGYQALVAPQAPANEKSKSGSAPVQAASLQIFNLVGSSHRLHRVLLTSIALIGAGVVVRFNTIIHPFTLADNRHYMFYVFRYSILRAWWIRYALVPVYVACAWLCWTALQGPSTASSSLPSKWIQSPFSTHVRGVEDDKSSNSSKNKSAKNSAHHTQTSTPTSTVLLLLLTTALSLMTAPLVEPRYFILPWVFWRLLIPASSPRSETDQRKIDPILALESVWFLLINVATMYVFLKKPFFWYAPDGTILDEGRMQRFMW

SEQ ID NO: 10591 - DNA, 3927 bp, Muscodor strobelii
  misc_feature: SGI EST ID NO. CUFF.24997.2
  misc_feature: Variant of the nucleotide sequence at SEQ ID NO 10589
tgcagttacacacacttacaattgccgtgcttacctcccatgaagcggccgactttctttctttctttatatcgctgccctgcatcagctgggcagcattaaagttttcttatcattcgctgtgtctcccggatgactcgccacgatgggttcactcacttcaatcctttctgagatatggcaggatatgtcatttcgtgactttgttgtcagcccgtttctttctgtcttctcccgccttggtatattcttactctgggctaggattgcagggtcagtcaaagtagcgacggcaattgtgatacttcttccctttttctcccaatggtcgcgcttgattgaaaacaatgtgcacgaaccctacttggacgaggtgttccatatccctcaaactcaggtctattgtgaggggagatactacgattgggatgacaagatcacaactcctccaggactctacatcctgaccgttctttacaatcgtctcacgttgttcccttgcacgattcaaaatattcgtcggttcaatgcggaggtgactcttcccattgcagtaattgcgcttgcctgcaaatggtcactggagaagagacacaacgggcaaaacggcactgcccaaagaccatcaaaccatgctatctggacaggagtcaatattacttcttttccagtgatcatgttcttttcggggctatactacactgatccactctcaacggcagttgttctacttgcctattatcaacatctcaaagcaccgagttctggaggctcgtcatacctatataatgcatcggtggttgggcttggcatctttgccttgctcaacagacaaaccaacgttttctgggttgttgggtatctgggcggattggaattgatccaaagcattaaagaattgaaccctcagcctgtagagacgccaacgttccagaatctttcggaacaggttcgattctatgtgaagagatactcccttggggatatacacgatcccccagttggtctagcataccctgttgatgtcgctctttgcgtcatcagcattgctatcgctgcattatgcaatttacataagatcttgcgcgtcgttctgttggcccgtggtctcatcctcgctacgtttgttggcttcattctctggaacggtggcgttgttctcggagataaatctcatcacgtcgctactgtccatctcgctcagatgttatacatatggcctctctttgtatttttctccgcaccactattcatacccaagatcctgagcttcatccgagctgggtatcaggctcttgttgctccgcaggcacccgcgaacgagaaaagtaaatcaggctcggctccggtccaggcagccagcctacagattttcaatctggttgggtcaagccatagactgcatcgagttctcttaacttcaattgcactcataggagcgggtgtcgtcgtgcgattcaataccatcatccatcccttcaccctcgctgacaacagacactacatgttttatgtctttcgttacagcattctgagggcatggtggatccggtacgctcttgtgccagtctacgtggcctgtgcctggctatgctggactgctctgcagggtccgtcgacagcctccagtagtctaccttcgaaatggatacagtccccattctcaactcatgttcggggagtcgaagatgataagtcttcaaattcttcaaagaacaagtcggcaaagaactcggctcatcatacacagacttctacacctacctcgaccgttctcctcctactacttacaactgcactctcactaatgaccgcgcctctggtcgagccgcgctatttcattctgccgtgggtattctggcgcctactcatacctgcgtcgtctccacggtctgagaccgaccagcgcaagatcgatccaatcctcgcccttgaatcggtttggttcttgcttatcaatgtggctacgatgtatgtgttcctgaagaagccatttttctggtacgcacctgatggcacaatactcgacgaggggcgtatgcagcggttcatgtggtaatccgcggaatcttaaattgagttatcaactacgattgcttgcttagtttttttcctttcccattagtctgaattctagagataagtggctccatgaagcagccggctgccaccaccttcggccatgcagggctaaaatgacgctgctacgagaaaaagacttagaggatagaaggagtgatcacgaggaaatgtgactcatgattcgcagtattgagtcgctcgtaatgatgaataaacgaagtgaaacctagtaggtattcttaggttaccgctgacgtgaacatatcatttgcttcatgagcctcatttttagacgagatcaagccatgctataaaatattccataatatcgtaaaagcttttcatataatgagtatatgtatcgcgagccggccttattagcacgtgcgtaactgcttttcttagatatctcctgtataacgccatcccggtaagtaaattgttcatccatagcgccggtgcccctaaacgcagtccttgcgttgatgcccatatcataccattccgtccatgatcctttgttgaacccaacacgaataccacagtaggtaggcaatatgtaactgatgtaggaaatttctcgtctcttcgctctatcatcacagacttaaccgatctaaacttagcctgtcttggctcttaactcgtttcactacgccgagcttgaagaatttctcctcgcccccggctgtccgacctcctatgtaccacttatcggcgccgagtacgtctcgaaacccttctgagctgctatcgctgcctcgtcgtcggccggcacctgcgcctgggatgggcatcccgtggtgacgcggggagtgtaacgggagttggttcattacgctgccgccgcgggaggatgtgcctgtggactgggtagaggatgatatttgacgggctgacgagggtgagctggtagacgttgatgtggtatgtgtgtgcttgtttggttgggcggaggcagatagagagggcggctgttgccggaaggctgcgaggaacgaagataggaagaaggggcgctgcgaggatggcattttggtcgtttggttgtgctgggatacggaggcttggagatttgggtatgggagcccgccgtgtgttcacggaccagataaatgacgtcgactgaaagatgtatgtctgctcagatctgatttgatgaccggcgctgctgcagtggttgaataccggtttggattgcagacgtgttggccgatgaatagctggcctcgagggttgtttgtccagcaggcaacagtagctctttgagatgttataccaaaccgagccgtcgagaaatgaaagcgaccagcgccaaagtatcgtttgccaagtagaagctgcggtcgcaaaagtcgtggtcggtatttcgtaggccactgtaatgagattgggtgatggttgagatgtcggtcgtggaggatcagtcgggcgatactaataggtattactgtattgctgtgacgagtttgtcgagctgggagacaccaagtgtgagggacggatctgtggacagtgtgggagatcctgacgtctgagtgcaggccgagtgcaggatgcggaatggtatagaaaggatggaaaagatcggttcagatttgcttctacatccagcttgcatacctatgtacaaagccctttcattctcgtcattggagaaaattggatcgaccaccaccaccagcccgtaacatgtgcctcgtcctcactcgtgtctcgctgtctctcggcctgttctctgccagacgaaaagctcgtcccatgccatccttccccgcgagtccgggcgaagccgggtaaggcaaagcgctggcagtttccccacgttgccaaagccaggtttgc

SEQ ID NO: 10592 - DNA, 1536 bp, Muscodor strobelii
  misc_feature: SGI cDNA ID NO. 563368
  misc_feature: Reduced expression when VOC is produced
  misc_feature: Encodes the peptide sequence at SEQ ID NO 10593
atggcacttacacgcgctattgcgagtcgatccttcaccgcagccacgccgctgacaagacaagcttctggacaggtaccgaggggttttacgcgatcagcttcgacttcgaccacgactacacgcccagcctcacgtgtacgaatcgctcttctgaccacaaccctggttctatcagggtgtgctgtatatatctacaccaccgatactcgcgccttcttccatcgccatgtcatcccgcctctacttcggtttctgtatccagatgccgaagaggcccatgaggttgcagtgtcgtccatgaaggccttatacaacctgaacttacatccacgcgagcgcctgtcggcatccggcacagcgaacagcccagatatttcgatatcagtctttggcacccacctcgccaacccaatcggtatttctgcaggcctggacaagcatgccgagataccagacgccctcttcgccctaggcgcctccgtcgtcgaagtgggtggctgcacaccattcgcccaagcgggcaatcccaagccgcgtatgttccgcataccgggtctcgacggactcatcaatcgctacggactcaactcccatggcgccgatgccatgtcgatgaagttgcgacagagggtacgattgttcgccaaatcgatcggaatgagcgaaactagtgtcttgaatggcgatgcacaggtgccccccggaagtctgtccgccggaaagatgctgctggttcagattgccaagaacaaggagactgatgagcaggatttgaatgccgtcacccgcgactatgtctactgcgttgagagactcgctccatatgctgatgtcctagtcgtcaatgtgagcagtcccaacacgccaggtctgcgtgaccttcaggccaccgaacccctgacgaagctcctgagcgctgttgtggaccaggcgcaaaagaccgaccggaaagtaaagcccaaagttatggtgaaagtgtcaccagacgaggatgaagacacccagatggaaggcattgttcaagccgtctggtctagcggtgtggatggtgtcatcgttggtaacactaccaagcgacgaactggcatcataccacccggaatcaacattacatcgcaagaacagaacactttgacagagactggcggctactcaggtcccatgatgtttgaccgcacagctagcttggtgaagcgatacaggaaattgctagacgctcactcatatcaggaacgcgtgcaagaccagaagacgaaggatgaggcagtggacgcaagcctagctggcattgacgatacgatcatcgggatccagaaggagggcctcgtcagcaagcccgagcctctgcctgcactagagccaaaagtcatattcgccactggtggcgttaccaatggcaagcaagctctggagatgctgaatgcaggtgcgagtgttgccatgatctatacgggccttgtatatggtggtgcgggcacgatcactcgcatgaagacagacatgaagaatgaggttgcagctcgtaagaattag

SEQ ID NO: 10593 - protein, 511 aa, Muscodor strobelii
  misc_feature: SGI Peptide ID NO. 563368
  misc_feature (125)..(506): Pfam Id: PF01180 Pfam Desc: Dihydroorotate dehydrogenase
  misc_feature (125)..(388): Pfam Id: PF01180 Pfam Desc: Dihydroorotate dehydrogenase
  misc_feature (457)..(506): Pfam Id: PF01180 Pfam Desc: Dihydroorotate dehydrogenase
  misc_feature (64)..(506): NCBI GI: 256727361 Blast Desc: NECHADRAFT_15121 [Nectria haematococca mpVI 77-13-4]
  misc_feature (47)..(506): NCBI GI: 46136325 Blast Desc: FG09678.1 [Gibberella zeae PH-1]
  misc_feature (13)..(506): NCBI GI: 261352785 Blast Desc: dihydroorotate dehydrogenase [Verticillium albo-atrum VaMs.102]
  misc_feature (46)..(509): NCBI GI: 85104761 Blast Desc: NCU06532 [Neurospora crassa OR74A] gi|28923379|gb|EAA32568.1| NCU06532 [Neurospora crassa OR74A]
  misc_feature (17)..(507): NCBI GI: 171691584 Blast Desc: protein product [Podospora anserina] gi|170945740|emb|CAP71853.1| protein product [Podospora anserina]
  misc_feature (46)..(503): NCBI GI: 258577079 Blast Desc: UREG_02237 [Uncinocarpus reesii 1704] gi|237902987|gb|EEP77388.1| UREG_02237 [Uncinocarpus reesii 1704]
  misc_feature (48)..(511): NCBI GI: 119178151 Blast Desc: CIMG_07941 [Coccidioides immitis RS]
  misc_feature (5)..(510): NCBI GI: 71001506 Blast Desc: dihydroorotate reductase PyrE [Aspergillus fumigatus Af293] gi|66853072|gb|EAL93396.1| dihydroorotate reductase PyrE, [Aspergillus fumigatus Af293] gi|159129505|gb|EDP54619.1| PyrE,
  misc_feature (48)..(511): NCBI GI: 240104777 Blast Desc: Dihydroorotate dehydrogenase family protein [Coccidioides posadasii C735 delta SOWgp]
  misc_feature (54)..(510): NCBI GI: 119481089 Blast Desc: dihydroorotate reductase PyrE, [Neosartorya fischeri NRRL 181] gi|119408727|gb|EAW18676.1| dihydroorotate reductase PyrE, [Neosartorya fischeri NRRL 181]
  misc_feature (51)..(506): SWISSPROT Homolog: EC 1.3.5.2 Dihydroorotate dehydrogenase
  misc_feature: Useful for introducing or modulating the production of volatile compounds
MALTRAIASRSFTAATPLTRQASGQVPRGFTRSASTSTTTTRPASRVRIALLTTTLVLSGCAVYIYTTDTRAFFHRHVIPPLLRFLYPDAEEAHEVAVSSMKALYNLNLHPRERLSASGTANSPDISISVFGTHLANPIGISAGLDKHAEIPDALFALGASVVEVGGCTPFAQAGNPKPRMFRIPGLDGLINRYGLNSHGADAMSMKLRQRVRLFAKSIGMSETSVLNGDAQVPPGSLSAGKMLLVQIAKNKETDEQDLNAVTRDYVYCVERLAPYADVLVVNVSSPNTPGLRDLQATEPLTKLLSAVVDQAQKTDRKVKPKVMVKVSPDEDEDTQMEGIVQAVWSSGVDGVIVGNTTKRRTGIIPPGINITSQEQNTLTETGGYSGPMMFDRTASLVKRYRKLLDAHSYQERVQDQKTKDEAVDASLAGIDDTIIGIQKEGLVSKPEPLPALEPKVIFATGGVTNGKQALEMLNAGASVAMIYTGLVYGGAGTITRMKTDMKNEVAARKN

SEQ ID NO: 10594 - DNA, 1883 bp, Muscodor strobelii
  misc_feature: SGI EST ID NO. CUFF.24970.0
  misc_feature: Variant of the nucleotide sequence at SEQ ID NO 10592
agacagcagagtgacggcccgccgcagacccgaagacccctgtacctctgacgtcggatggtacagctacctctgaacatcgcaaacaacgcgaatcaatccatatgcaattgttgcctccctcatttagccgtcactcatttctcgaccatttgccattgagggcttacagcccaacacaccaccgtcaaaatggcacttacacgcgctattgcgagtcgatccttcaccgcagccacgccgctgacaagacaagcttctggacaggtaccgaggggttttacgcgatcagcttcgacttcgaccacgactacacgcccagcctcacgtgtacgaatcgctcttctgaccacaaccctggttctatcagggtgtgctgtatatatctacaccaccgatactcgcgccttcttccatcgccatgtcatcccgcctctacttcggtttctgtatccagatgccgaagaggcccatgaggttgcagtgtcgtccatgaaggccttatacaacctgaacttacatccacgcgagcgcctgtcggcatccggcacagcgaacagcccagatatttcgatatcagtctttggcacccacctcgccaacccaatcggtatttctgcaggcctggacaagcatgccgagataccagacgccctcttcgccctaggcgcctccgtcgtcgaagtgggtggctgcacaccattcgcccaagcgggcaatcccaagccgcgtatgttccgcataccgggtctcgacggactcatcaatcgctacggactcaactcccatggcgccgatgccatgtcgatgaagttgcgacagagggtacgattgttcgccaaatcgatcggaatgagcgaaactagtgtcttgaatggcgatgcacaggtgccccccggaagtctgtccgccggaaagatgctgctggttcagattgccaagaacaaggagactgatgagcaggatttgaatgccgtcacccgcgactatgtctactgcgttgagagactcgctccatatgctgatgtcctagtcgtcaatgtgagcagtcccaacacgccaggtctgcgtgaccttcaggccaccgaacccctgacgaagctcctgagcgctgttgtggaccaggcgcaaaagaccgaccggaaagtaaagcccaaagttatggtgaaagtgtcaccagacgaggatgaagacacccagatggaaggcattgttcaagccgtctggtctagcggtgtggatggtgtcatcgttggtaacactaccaagcgacgaactggcatcataccacccggaatcaacattacatcgcaagaacagaacactttgacagagactggcggctactcaggtcccatgatgtttgaccgcacagctagcttggtgaagcgatacaggaaattgctagacgctcactcatatcaggaacgcgtgcaagaccagaagacgaaggatgaggcagtggacgcaagcctagctggcattgacgatacgatcatcgggatccagaaggagggcctcgtcagcaagcccgagcctctgcctgcactagagccaaaagtcatattcgccactggtggcgttaccaatggcaagcaagctctggagatgctgaatgcaggtgcgagtgttgccatgatctatacgggccttgtatatggtggtgcgggcacgatcactcgcatgaagacagacatgaagaatgaggttgcagctcgtaagaattagagaaaagaagagaaaaatagaatatgggtgatgcggctaagggaacgggatcttgtactactagatagataccattgagctacactgtaagcgaagaccaggcaaatgataataatgaggcaaaccccaattgttctgacattagtgccaacgac

SEQ ID NO: 10595 - DNA, 276 bp, Muscodor strobelii
  misc_feature: SGI cDNA ID NO. 563369
  misc_feature: Encodes the peptide sequence at SEQ ID NO 10596
atggtcttccagactcccgcactccgggctcagtacccggcctataagagcccttacggtcctaagtaccactaccagcccaatatcgctggtttcaccatcaagcaagctaccggactcggcttcaaggccggagccttcggaggcgtcgccctcttcgccgtcatcttcttcgcctcgggcatgcccagaatcaagaaggacatcctacagaaggttcccttcatcggcagccacttcatcaacgaggttcccgcctctgacaacccgttctaa

SEQ ID NO: 10596 - protein, 91 aa, Muscodor strobelii
  misc_feature: SGI Peptide ID NO. 563369
  misc_feature (2)..(89): NCBI GI: 85107986 Blast Desc: NCU07328 [Neurospora crassa OR74A] gi|28924093|gb|EAA33250.1| [Neurospora crassa OR74A]
  misc_feature (1)..(91): NCBI GI: 171683245 Blast Desc: protein product [Podospora anserina] gi|170941582|emb|CAP67236.1| protein product [Podospora anserina]
  misc_feature (13)..(91): NCBI GI: 145609227 Blast Desc: [Magnaporthe grisea 70-15] gi|145016619|gb|EDK01049.1| [Magnaporthe grisea 70-15]
  misc_feature (1)..(91): NCBI GI: 116194826 Blast Desc: CHGG_04011 [Chaetomium globosum CBS 148.51] gi|88179924|gb|EAQ87392.1| CHGG_04011 [Chaetomium globosum CBS 148.51]
  misc_feature (1)..(91): NCBI GI: 256727368 Blast Desc: NECHADRAFT_102416 [Nectria haematococca mpVI 77-13-4]
  misc_feature (11)..(91): NCBI GI: 154292419 Blast Desc: BC1G_14528 [Botryotinia fuckeliana B05.10] gi|150846114|gb|EDN21307.1| BC1G_14528 [Botryotinia fuckeliana B05.10]
  misc_feature (15)..(89): NCBI GI: 46136303 Blast Desc: FG09667.1 [Gibberella zeae PH-1]
  misc_feature (4)..(91): NCBI GI: 189196044 Blast Desc: PTRG_04027 [Pyrenophora tritici-repentis Pt-1C-BFP] gi|187980239|gb|EDU46865.1| PTRG_04027 [Pyrenophora tritici-repentis Pt-1C-BFP]
  misc_feature (9)..(91): NCBI GI: 242787506 Blast Desc: conserved [Talaromyces stipitatus ATCC 10500] gi|218721169|gb|EED20588.1| conserved [Talaromyces stipitatus ATCC 10500]
  misc_feature (9)..(91): NCBI GI: 212543705 Blast Desc: conserved [Penicillium marneffei ATCC 18224] gi|210066914|gb|EEA21007.1| conserved [Penicillium marneffei ATCC 18224]
MVFQTPALRAQYPAYKSPYGPKYHYQPNIAGFTIKQATGLGFKAGAFGGVALFAVIFFASGMPRIKKDILQKVPFIGSHFINEVPASDNPF

SEQ ID NO: 10597 - DNA, 517 bp, Muscodor strobelii
  misc_feature: SGI EST ID NO. CUFF.24994.0
  misc_feature: Variant of the nucleotide sequence at SEQ ID NO 10595
cgcgcattggaaagctccagcttcacctacgaaaccgccagcaagcctttgccattgacctccacaactcgcttttttgcgaccctcgctcactatggtcttccagactcccgcactccgggctcagtacccggcctataagagcccttacggtcctaagtaccactaccagcccaatatcgctggtttcaccatcaagcaagctaccggactcggcttcaaggccggagccttcggaggcgtcgccctcttcgccgtcatcttcttcgcctcgggcatgcccagaatcaagaaggacatcctacagaaggttcccttcatcggcagccacttcatcaacgaggttcccgcctctgacaacccgttctaaattaatcatggtgtaaaagactgggttagaaggacgatggttgagcgtgcgtgtatggcgtaacttgtacaaaagtaaatacaatacaatacaccaaaatagatttcattacgtcttcaattatttgcaagaaatgtgtaactggtt

SEQ ID NO: 10598 - DNA, 960 bp, Muscodor strobelii
  misc_feature: SGI cDNA ID NO. 563370
  misc_feature: Reduced expression when VOC is produced
  misc_feature: Encodes the peptide sequence at SEQ ID NO 10599
atggacgtccagctagagtccctcttcgaccgcgtcgagaaggcccttgcggcactcaccgactctatagcgaagtacaatccctcggtagcacaagtcaaggagctcggcgccgcagacgcagagctcaccaagggactgcaagacctacaaactcaccaaaccaactacgcccgcatccaagccttgcgcgccgaggcagccaaaaacgacacacaaatcaaagacaccctccgcctcctagccaacacgcgcaaggaactcgtcaacgcatccgcgacttccttccccgacggtcctagctacgacataaactacgacgagctactctcctacgcccggcgcatctctaaaactacaatcccacccgtaggcgcagtaaacgccatctccgccctcacctcgagcgcaaaagccgacgagaccagcgtcccggaaacagcagccacaacgcccgcaggcggcacacccatacccaatggcgcccaatccagtgctctacccagcacacccgccgtgacaaacggactcgaggtcctccccccaccaacgacctcaggaccagagctgcccgagccattagcactgtggctgaacccgcacagcggacacacgttcgtgccctggccctcggaagaacaggtccgtcagggctccatcgcgaacctgacgtatatcgcggaacaaggcatcgaggccgagggctacgatcccgaggacgagaagcggcggaaggagatcgaggacgaggctagacgggcgaatgaagagaaagaacgactggagagggaggagagggagaggcggtttagagaagagaggatgcgcattgagagggagaagagagtggaacaggagcaggctagacgtgcgagtggtgtggagctacagcagagccctgtgcagcagaagacgcagttccagtttatgggtgatgatgatgacgatgacgatgattga

SEQ ID NO: 10599 - protein, 319 aa, Muscodor strobelii
  misc_feature: SGI Peptide ID NO. 563370
  misc_feature (1)..(309): NCBI GI: 256726808 Blast Desc: NECHADRAFT_33637 [Nectria haematococca mpVI 77-13-4]
  misc_feature (1)..(309): NCBI GI: 46136301 Blast Desc: FG09666.1 [Gibberella zeae PH-1]
  misc_feature (1)..(287): NCBI GI: 261352819 Blast Desc: mediator of RNA polymerase II transcription subunit 4 [Verticillium albo-atrum VaMs.102]
  misc_feature (1)..(238): NCBI GI: 39972267 Blast Desc: MGG_07435 [Magnaporthe grisea 70-15] gi|145016618|gb|EDK01048.1| MGG_07435 [Magnaporthe grisea 70-15]
  misc_feature (1)..(282): NCBI GI: 154293836 Blast Desc: BC1G_14246 [Botryotinia fuckeliana B05.10] gi|150845219|gb|EDN20412.1| BC1G_14246 [Botryotinia fuckeliana B05.10]
  misc_feature (1)..(245): NCBI GI: 116194828 Blast Desc: CHGG_04012 [Chaetomium globosum CBS 148.51] gi|121784218|sp|Q2H2I4.1|MED4_CHAGB RecName: Full=Mediator of RNA polymerase II transcription subunit 4; AltName: Full=Mediator 4
  misc_feature (1)..(253): NCBI GI: 171683243 Blast Desc: protein product [Podospora anserina] gi|170941581|emb|CAP67235.1| protein product [Podospora anserina]
  misc_feature (1)..(237): NCBI GI: 121750513 Blast Desc: protein product [Podospora anserina] gi|170941581|emb|CAP67235.1| protein product [Podospora anserina]
  misc_feature (1)..(263): NCBI GI: 189211365 Blast Desc: conserved [Pyrenophora tritici-repentis Pt-1C-BFP] gi|187978106|gb|EDU44732.1| conserved [Pyrenophora tritici-repentis Pt-1C-BFP]
  misc_feature (1)..(247): NCBI GI: 169599509 Blast Desc: SNOG_02574 [Phaeosphaeria nodorum SN15] gi|160705256|gb|EAT89305.2| SNOG_02574 [Phaeosphaeria nodorum SN15]
  misc_feature: Useful for introducing or modulating the production of volatile compounds
MDVQLESLFDRVEKALAALTDSIAKYNPSVAQVKELGAADAELTKGLQDLQTHQTNYARIQALRAEAAKNDTQIKDTLRLLANTRKELVNASATSFPDGPSYDINYDELLSYARRISKTTIPPVGAVNAISALTSSAKADETSVPETAATTPAGGTPIPNGAQSSALPSTPAVTNGLEVLPPPTTSGPELPEPLALWLNPHSGHTFVPWPSEEQVRQGSIANLTYIAEQGIEAEGYDPEDEKRRKEIEDEARRANEEKERLEREERERRFREERMRIEREKRVEQEQARRASGVELQQSPVQQKTQFQFMGDDDDDDDD

SEQ ID NO: 10600 - DNA, 3997 bp, Muscodor strobelii
  misc_feature: SGI EST ID NO. CUFF.25207.0
  misc_feature: Variant of the nucleotide sequence at SEQ ID NO 10598
cagctctaaactttagctcacgcccgcattccaaaagcggccctcgtctccaaacctcggcgacgagtatatacagaactcgcaaggcttccaaacccaagaaatatggacgtccagctagagtccctcttcgaccgcgtcgagaaggcccttgcggcactcaccgactctatagcgaagtacaatccctcggtagcacaagtcaaggagctcggcgccgcagacgcagagctcaccaagggactgcaagacctacaaactcaccaaaccaactacgcccgcatccaagccttgcgcgccgaggcagccaaaaacgacacacaaatcaaagacaccctccgcctcctagccaacacgcgcaaggaactcgtcaacgcatccgcgacttccttccccgacggtcctagctacgacataaactacgacgagctactctcctacgcccggcgcatctctaaaactacaatcccacccgtaggcgcagtaaacgccatctccgccctcacctcgagcgcaaaagccgacgagaccagcgtcccggaaacagcagccacaacgcccgcaggcggcacacccatacccaatggcgcccaatccagtgctctacccagcacacccgccgtgacaaacggactcgaggtcctccccccaccaacgacctcaggaccagagctgcccgagccattagcactgtggctgaacccgcacagcggacacacgttcgtgccctggccctcggaagaacaggtccgtcagggctccatcgcgaacctgacgtatatcgcggaacaaggcatcgaggccgagggctacgatcccgaggacgagaagcggcggaaggagatcgaggacgaggctagacgggcgaatgaagagaaagaacgactggagagggaggagagggagaggcggtttagagaagagaggatgcgcattgagagggagaagagagtggaacaggagcaggctagacgtgcgagtggtgtggagctacagcagagccctgtgcagcagaagacgcagttccagtttatgggtgatgatgatgacgatgacgatgattgagtgagctgaattggcatgcggaggactggaggggataggataggaatagggggttttggctcatgactttggtctaattgttgaggctggtatatgattaagtgagcttatacccattgctcaatacaatatatttaaatgacaacacatatgtcctagttatatgatgtgaatcaatcctttttgcattttttattggaaacagatctaattacaatgttccagctccgattctggtatggtcatgaatgctgcaccgacttcctcgccgcagatggaaaacaacccaagtctagtcccttcatgagtttcgaattggacccagagtgtgtccttttgcttggtcatacagtctatattacatcgagggtatttatttatttttcgtacaggcacctattcttgttgtccgagggtcattcagtcgatcttgatcgagctgtagatcttatgggtgaaccaccagctggcgaaataaccaatcgatcctatagggaaagagttagtctgtgtttgccgacatgtcgtgtacttgtcaactagaacttacctgtcaagatgaaaaagaggaaagacaacagcgcactgtatccgatatacagcaccgttcctgacaatccaccgagagacagcttgctgatcagatatacaagggcattgacgaagatatagcccgcactcataccagcggccaagaaggcccgccactgccagtggtagttctcggcgcagagcaggaagtacaccatcaggatcgtgacggccgcacacgtaataatcatgagaccatagcataggaacaggaaaccaaacatgtagtagatcttgttgaaccagatcgagctcatgatgaaatacagctcgacgaagatggctccgaacggaaggacaccgaccagaagcatgctcgggatcggcttgaggtaggtagtgccaggcgggatttggcgtgggatttggttggttcggaccggtggctcgacagcggcggcgcggaagcctaggaatgaaccagcgacggacagaggaacggagatgatgaaccagatgcctatgatgacgagcatggtcgtgaagggcacagcgccagctgctccgttggcccagaggaagaggttgaggaagaagaaggtagagaagacgatgccagggacaagaaccggggtcgacgcgatgttgagcttccacttctcaccattcatcgacttgtaggtcctggccgaaacgtagccaccaatgaaactcaagatggtgtagagcaagaccatgagagtaccgagtgatccacggttagatggtgacaagaagccgagaagtgcgaagcagatggtgaagccggccataacgaagagctgcgcgccgttgccgagaaacacggagagaaggagcgggtgggacggtgtacggaagacatcgccatgaacaagcttccatccggaatcctcctgtacaccatcttccagtccatcgccacccgagagatcgtccaaattgatctggtcgagacggttgtatcgcgcaatatcctttctcaaggctcggaaaagaaccgaggctacggtaacggtaaggaagacgacgaccacggcagagttgacgagtgaaaaccagtggatcttggggtcgtacacgtggagatatttgtcccatcgcgttgcccaggcagttttagactcgatccagtatacgctataagtgaaagtaacgtccgtgttcgcttcctccccttcgacgagcacgactggtgggatagcacgatcgttgcagtccaagttgtcctggcccttcgggtacgctctcgaggagggctcaacgatagctcctaccactcgcagctgatctttgtgtccgcgaaccttgtggtattcgatttgtatgtcgtagtggttgttgaagaatgtctggccctgaccagcatcgacctcagagatctgacccagggcgaagccagggctgtagaagctggtctttgtaagttcgtcgtaaaggttctggccggcaggcagcccatccactaggaagttgagcgcaaagcccttcatgatgcgattgttgacaaagtgggcagagtcgccgtcgtacgggttggagcaaagcttggtgcaagactggttctgtgccatcttcagttcgaagggcgaggacatgatgcggtcgccgaacaggatgctccccaaactctcggacacgtatttaggaccatcttcaggctggcagaagtggaacctgggctcgtagtagtcgtaggataggacggagtgcagacgagcgtctgtcgaggcgacgggcttgacgctgttgacgttgagcggcacggcatcgccgggtttgtaggaagttggtgcgacgccagggaggtagaatgcggaggtgagttgcggcagagcgaggagtgctgaccagaatgccgtcgtcggcaacgctgtggatgacttcatcttggtcagatgtctgggaaccactgcagtcagtacctagggcgatggtggccggtgtagtggaatgcacgacatgggaacaatgggattggcaaatgcttaattgaacaaggcagcagaattcctcacgcacatgtgtatccgcgcctatgtcaccagagtacaaggcgcagcttatcaaagagcacagaggcccgcgccgccacgaatcgtttttgcgcaagccttagatatggtcgaactgcctcgatctaagtaagtcctgtggaaagtcccaacgttggcgagctcagtgtgtctcgcacaaagactctctaaaatggcaggcggacaggagcaattcgaagtgatggcgatgtcagcttttctcgtaacaaagattatttcggtgttgggaacgatgtcgtagacttcatacgcccttaaagacgaccaatatgcagcagctcgcaggcgcaatggtttggactattaaatttccacgtagcagccta

SEQ ID NO: 10601 - DNA, 1956 bp, Muscodor strobelii
  misc_feature: SGI cDNA ID NO. 563371
  misc_feature: Encodes the peptide sequence at SEQ ID NO 10602
atgaagtcatccacagcgttgccgacgacggcattctggtcagcactcctcgctctgccgcaactcacctccgcattctacctccctggcgtcgcaccaacttcctacaaacccggcgatgccgtgccgctcaacgtcaacagcgtcaagcccgtcgcctcgacagacgctcgtctgcactccgtcctatcctacgactactacgagcccaggttccacttctgccagcctgaagatggtcctaaatacgtgtccgagagtttggggagcatcctgttcggcgaccgcatcatgtcctcgcccttcgaactgaagatggcacagaaccagtcttgcaccaagctttgctccaacccgtacgacggcgactctgcccactttgtcaacaatcgcatcatgaagggctttgcgctcaacttcctagtggatgggctgcctgccggccagaacctttacgacgaacttacaaagaccagcttctacagccctggcttcgccctgggtcagatctctgaggtcgatgctggtcagggccagacattcttcaacaaccactacgacatacaaatcgaataccacaaggttcgcggacacaaagatcagctgcgagtggtaggagctatcgttgagccctcctcgagagcgtacccgaagggccaggacaacttggactgcaacgatcgtgctatcccaccagtcgtgctcgtcgaaggggaggaagcgaacacggacgttactttcacttatagcgtatactggatcgagtctaaaactgcctgggcaacgcgatgggacaaatatctccacgtgtacgaccccaagatccactggttttcactcgtcaactctgccgtggtcgtcgtcttccttaccgttaccgtagcctcggttcttttccgagccttgagaaaggatattgcgcgatacaaccgtctcgaccagatcaatttggacgatctctcgggtggcgatggactggaagatggtgtacaggaggattccggatggaagcttgttcatggcgatgtcttccgtacaccgtcccacccgctccttctctccgtgtttctcggcaacggcgcgcagctcttcgttatggccggcttcaccatctgcttcgcacttctcggcttcttgtcaccatctaaccgtggatcactcggtactctcatggtcttgctctacaccatcttgagtttcattggtggctacgtttcggccaggacctacaagtcgatgaatggtgagaagtggaagctcaacatcgcgtcgaccccggttcttgtccctggcatcgtcttctctaccttcttcttcctcaacctcttcctctgggccaacggagcagctggcgctgtgcccttcacgaccatgctcgtcatcataggcatctggttcatcatctccgttcctctgtccgtcgctggttcattcctaggcttccgcgccgccgctgtcgagccaccggtccgaaccaaccaaatcccacgccaaatcccgcctggcactacctacctcaagccgatcccgagcatgcttctggtcggtgtccttccgttcggagccatcttcgtcgagctgtatttcatcatgagctcgatctggttcaacaagatctactacatgtttggtttcctgttcctatgctatggtctcatgattattacgtgtgcggccgtcacgatcctgatggtgtacttcctgctctgcgccgagaactaccactggcagtggcgggccttcttggccgctggtatgagtgcgggctatatcttcgtcaatgcccttgtatatctgatcagcaagctgtctctcggtggattgtcaggaacggtgctgtatatcggatacagtgcgctgttgtctttcctctttttcatcttgacaggatcgattggttatttcgccagctggtggttcacccataagatctacagctcgatcaagatcgactga

SEQ ID NO: 10602 - protein, 651 aa, Muscodor strobelii
  misc_feature: SGI Peptide ID NO. 563371
  misc_feature (63)..(609): Pfam Id: PF02990 Pfam Desc: Endomembrane protein 70
  misc_feature (1)..(651): NCBI GI: 85107993 Blast Desc: NCU07330 [Neurospora crassa OR74A] gi|28924095|gb|EAA33252.1| NCU07330 [Neurospora crassa OR74A]
  misc_feature (15)..(651): NCBI GI: 171683241 Blast Desc: protein product [Podospora anserina] gi|170941580|emb|CAP67234.1| protein product [Podospora anserina]
  misc_feature (1)..(651): NCBI GI: 116194832 Blast Desc: CHGG_04014 [Chaetomium globosum CBS 148.51] gi|88179927|gb|EAQ87395.1| CHGG_04014 [Chaetomium globosum CBS 148.51]
  misc_feature (8)..(651): NCBI GI: 256727369 Blast Desc: [Nectria haematococca mpVI 77-13-4]
  misc_feature (1)..(651): NCBI GI: 154293850 Blast Desc: BC1G_14253 [Botryotinia fuckeliana B05.10] gi|150845226|gb|EDN20419.1| BC1G_14253 [Botryotinia fuckeliana B05.10]
  misc_feature (8)..(651): NCBI GI: 46136299 Blast Desc: FG09665.1 [Gibberella zeae PH-1]
  misc_feature (1)..(631): NCBI GI: 156030871 Blast Desc: SS1G_14216 [Sclerotinia sclerotiorum 1980] gi|154700607|gb|EDO00346.1| SS1G_14216 [Sclerotinia sclerotiorum 1980]
  misc_feature (20)..(651): NCBI GI: 39972265 Blast Desc: MGG_07434 [Magnaporthe grisea 70-15] gi|145016617|gb|EDK01047.1| MGG_07434 [Magnaporthe grisea 70-15]
  misc_feature (9)..(651): NCBI GI: 169785026 Blast Desc: [Aspergillus oryzae RIB40] gi|83775721|dbj|BAE65841.1| protein product [Aspergillus oryzae]
  misc_feature (14)..(651): NCBI GI: 115492785 Blast Desc: conserved [Aspergillus terreus NIH2624] gi|114197880|gb|EAU39580.1| conserved [Aspergillus terreus NIH2624]
MKSSTALPTTAFWSALLALPQLTSAFYLPGVAPTSYKPGDAVPLNVNSVKPVASTDARLHSVLSYDYYEPRFHFCQPEDGPKYVSESLGSILFGDRIMSSPFELKMAQNQSCTKLCSNPYDGDSAHFVNNRIMKGFALNFLVDGLPAGQNLYDELTKTSFYSPGFALGQISEVDAGQGQTFFNNHYDIQIEYHKVRGHKDQLRVVGAIVEPSSRAYPKGQDNLDCNDRAIPPVVLVEGEEANTDVTFTYSVYWIESKTAWATRWDKYLHVYDPKIHWFSLVNSAVVVVFLTVTVASVLFRALRKDIARYNRLDQINLDDLSGGDGLEDGVQEDSGWKLVHGDVFRTPSHPLLLSVFLGNGAQLFVMAGFTICFALLGFLSPSNRGSLGTLMVLLYTILSFIGGYVSARTYKSMNGEKWKLNIASTPVLVPGIVFSTFFFLNLFLWANGAAGAVPFTTMLVIIGIWFIISVPLSVAGSFLGFRAAAVEPPVRTNQIPRQIPPGTTYLKPIPSMLLVGVLPFGAIFVELYFIMSSIWFNKIYYMFGFLFLCYGLMIITCAAVTILMVYFLLCAENYHWQWRAFLAAGMSAGYIFVNALVYLISKLSLGGLSGTVLYIGYSALLSFLFFILTGSIGYFASWWFTHKIYSSIKID

SEQ ID NO: 10603 - DNA, 3892 bp, Muscodor strobelii
  misc_feature: SGI EST ID NO. CUFF.25208.1
  misc_feature: Variant of the nucleotide sequence at SEQ ID NO 10601
gcgccgccaaggctctaataatacgtaggctgctacgtggaaatttaatagtccaaaccattgcgcctgcgagctgctgcatattggtcgtctttaagggcgtatgaagtctacgacatcgttcccaacaccgaaataatctttgttacgagaaaagctgacatcgccatcacttcgaattgctcctgtccgcctgccattttagagagtctttgtgcgagacacactgagctcgccaacgttgggactttccacaggacttacttagatcgaggcagttcgaccatatctaaggcttgcgcaaaaacgattcgtggcggcgcgggcctctgtgctctttgataagctgcgccttgtactctggtgacataggcgcggatacacatacatctgaccaagatgaagtcatccacagcgttgccgacgacggcattctggtcagcactcctcgctctgccgcaactcacctccgcattctacctccctggcgtcgcaccaacttcctacaaacccggcgatgccgtgccgctcaacgtcaacagcgtcaagcccgtcgcctcgacagacgctcgtctgcactccgtcctatcctacgactactacgagcccaggttccacttctgccagcctgaagatggtcctaaatacgtgtccgagagtttggggagcatcctgttcggcgaccgcatcatgtcctcgcccttcgaactgaagatggcacagaaccagtcttgcaccaagctttgctccaacccgtacgacggcgactctgcccactttgtcaacaatcgcatcatgaagggctttgcgctcaacttcctagtggatgggctgcctgccggccagaacctttacgacgaacttacaaagaccagcttctacagccctggcttcgccctgggtcagatctctgaggtcgatgctggtcagggccagacattcttcaacaaccactacgacatacaaatcgaataccacaaggttcgcggacacaaagatcagctgcgagtggtaggagctatcgttgagccctcctcgagagcgtacccgaagggccaggacaacttggactgcaacgatcgtgctatcccaccagtcgtgctcgtcgaaggggaggaagcgaacacggacgttactttcacttatagcgtatactggatcgagtctaaaactgcctgggcaacgcgatgggacaaatatctccacgtgtacgaccccaagatccactggttttcactcgtcaactctgccgtggtcgtcgtcttccttaccgttaccgtagcctcggttcttttccgagccttgagaaaggatattgcgcgatacaaccgtctcgaccagatcaatttggacgatctctcgggtggcgatggactggaagatggtgtacaggaggattccggatggaagcttgttcatggcgatgtcttccgtacaccgtcccacccgctccttctctccgtgtttctcggcaacggcgcgcagctcttcgttatggccggcttcaccatctgcttcgcacttctcggcttcttgtcaccatctaaccgtggatcactcggtactctcatggtcttgctctacaccatcttgagtttcattggtggctacgtttcggccaggacctacaagtcgatgaatggtgagaagtggaagctcaacatcgcgtcgaccccggttcttgtccctggcatcgtcttctctaccttcttcttcctcaacctcttcctctgggccaacggagcagctggcgctgtgcccttcacgaccatgctcgtcatcataggcatctggttcatcatctccgttcctctgtccgtcgctggttcattcctaggcttccgcgccgccgctgtcgagccaccggtccgaaccaaccaaatcccacgccaaatcccgcctggcactacctacctcaagccgatcccgagcatgcttctggtcggtgtccttccgttcggagccatcttcgtcgagctgtatttcatcatgagctcgatctggttcaacaagatctactacatgtttggtttcctgttcctatgctatggtctcatgattattacgtgtgcggccgtcacgatcctgatggtgtacttcctgctctgcgccgagaactaccactggcagtggcgggccttcttggccgctggtatgagtgcgggctatatcttcgtcaatgcccttgtatatctgatcagcaagctgtctctcggtggattgtcaggaacggtgctgtatatcggatacagtgcgctgttgtctttcctctttttcatcttgacaggatcgattggttatttcgccagctggtggttcacccataagatctacagctcgatcaagatcgactgaatgaccctcggacaacaagaataggtgcctgtacgaaaaataaataaataccctcgatgtaatatagactgtatgaccaagcaaaaggacacactctgggtccaattcgaaactcatgaagggactagacttgggttgttttccatctgcggcgaggaagtcggtgcagcattcatgaccataccagaatcggagctggaacattgtaattagatctgtttccaataaaaaatgcaaaaaggattgattcacatcatataactaggacatatgtgttgtcatttaaatatattgtattgagcaatgggtataagctcacttaatcatataccagcctcaacaattagaccaaagtcatgagccaaaaccccctattcctatcctatcccctccagtcctccgcatgccaattcagctcactcaatcatcgtcatcgtcatcatcatcacccataaactggaactgcgtcttctgctgcacagggctctgctgtagctccacaccactcgcacgtctagcctgctcctgttccactctcttctccctctcaatgcgcatcctctcttctctaaaccgcctctccctctcctccctctccagtcgttctttctcttcattcgcccgtctagcctcgtcctcgatctccttccgccgcttctcgtcctcgggatcgtagccctcggcctcgatgccttgttccgcgatatacgtcaggttcgcgatggagccctgacggacctgttcttccgagggccagggcacgaacgtgtgtccgctgtgcgggttcagccacagtgctaatggctcgggcagctctggtcctgaggtcgttggtggggggaggacctcgagtccgtttgtcacggcgggtgtgctgggtagagcactggattgggcgccattgggtatgggtgtgccgcctgcgggcgttgtggctgctgtttccgggacgctggtctcgtcggcttttgcgctcgaggtgagggcggagatggcgtttactgcgcctacgggtgggattgtagttttagagatgcgccgggcgtaggagagtagctcgtcgtagtttatgtcgtagctaggaccgtcggggaaggaagtcgcggatgcgttgacgagttccttgcgcgtgttggctaggaggcggagggtgtctttgatttgtgtgtcgtttttggctgcctcggcgcgcaaggcttggatgcgggcgtagttggtttggtgagtttgtactgtagaaatatgagtatactgatcgtatagaagagtgtggggagagcccacggtcttgcagtcccttggtgagctctgcgtctgcggcgccgagctccttgacttgtgctaccgagggattgtacttcgctatagagtcggtgagtgccgcaagggccttctcgacgcggtcgaagagggactctagctggacgtccatatttcttgggtttggaagccttgcgagttctgtatatactcgtcgccgaggtttggagacgagggccgcttttggaatgcgggcgtgagctaaagtttagagctg

SEQ ID NO: 10604 - DNA, 1122 bp, Muscodor strobelii
  misc_feature: SGI cDNA ID NO. 563372
  misc_feature: Reduced expression when VOC is produced
  misc_feature: Encodes the peptide sequence at SEQ ID NO 10605
atggccgcgcccacaactcttacagcattgcttgagaccctcacgagttctctatcatctgcattcgaagccacgcccaagattgccggcgttgacgagaccgaaaatggggtttcgcttctcgacgtaaaaaacgaacttctcttgtcttatttgcagaatctcgtctttctcatcctgattaagattcgcaatgcgaaaagcgatgcctcggactcagacaacgactccccaaaccttacagacgatgtggtcaacaaacttgtcgagctccgcctatatctcgacaagggcgtacgtcctctggaagagcgcctacgcttcacattagacaagattgtccgcaccgcagatgatgccgaccgagctcaacaagcagcaaaagacggccaaaattctgacgaggactccgaatccggatctgaagacgactcagatgctgccgatggtgacgacgctcccgaagtttctaagcgttcagccaatgcagccccatcattcggcagcttcgccgcgcccgtatcaacaggcatggccgccgccgctcaagacaagaccggcgtataccgacctcccaagatcacacccaccgtcatgcccacaaccgagcgaaaggagagagccgagcgacgcccattgaaatccgcatcaatgaacgaatacatcgcagacgagctctcaaccgccccatccgcacttcccagcgttggttcgaatgttgtgttcggcggcaggaaggtcaagacaaccgctgagcgcgaggccgaggaccgcagacgtgattacgaagagaccaacttcgtgcgcctgcccaaggagagcaagaagcaacgcgccgagaagaacaaggcagagcgtcgcagcggcaagatgagcttcggtggtgaggaatggcgcgagatcggcgaaggtgcagaccgcatcgacaagttgacgagaaggagggagggtggcaaccgaggtacgaaggcgctgctagagatgagcaggaagagaggccgcgagacgacggacagcgatcgtggaagtggactaaacagcggtacgagagagattggagagaggttcaataagaaggtcaaggttatggagggcggtagaagagatcgcggtaaaagatag

SEQ ID NO: 10605 - protein, 373 aa, Muscodor strobelii
  misc_feature: SGI Peptide ID NO. 563372
  misc_feature (10)..(97): Pfam Id: PF04000 Pfam Desc: Sas10/Utp3/C1D family
  misc_feature (1)..(365): NCBI GI: 261352821 Blast Desc: conserved [Verticillium albo-atrum VaMs.102]
  misc_feature (1)..(372): NCBI GI: 256726809 Blast Desc: NECHADRAFT_16750 [Nectria haematococca mpVI 77-13-4]
  misc_feature (1)..(372): NCBI GI: 116194834 Blast Desc: CHGG_04015 [Chaetomium globosum CBS 148.51] gi|88179928|gb|EAQ87396.1| CHGG_04015 [Chaetomium globosum CBS 148.51]
  misc_feature (1)..(373): NCBI GI: 85107998 Blast Desc: NCU07331 [Neurospora crassa OR74A] gi|28924096|gb|EAA33253.1| [Neurospora crassa OR74A]
  misc_feature (1)..(367): NCBI GI: 171683239 Blast Desc: protein product [Podospora anserina] gi|170941579|emb|CAP67233.1| protein product [Podospora anserina]
  misc_feature (1)..(361): NCBI GI: 46136297 Blast Desc: FG09664.1 [Gibberella zeae PH-1]
  misc_feature (3)..(372): NCBI GI: 39972263 Blast Desc: MGG_07433 [Magnaporthe grisea 70-15] gi|145016616|gb|EDK01046.1| MGG_07433 [Magnaporthe grisea 70-15]
  misc_feature (1)..(371): NCBI GI: 156030873 Blast Desc: SS1G_14217 [Sclerotinia sclerotiorum 1980] gi|154700608|gb|EDO00347.1| SS1G_14217 [Sclerotinia sclerotiorum 1980]
  misc_feature (1)..(371): NCBI GI: 154293848 Blast Desc: BC1G_14252 [Botryotinia fuckeliana B05.10] gi|150845225|gb|EDN20418.1| BC1G_14252 [Botryotinia fuckeliana B05.10]
  misc_feature (2)..(368): NCBI GI: 255946630 Blast Desc: Pc22g00370 [Penicillium chrysogenum Wisconsin 54-1255] gi|211591099|emb|CAP97325.1| Pc22g00370 [Penicillium chrysogenum Wisconsin 54-1255]
  misc_feature: Useful for introducing or modulating the production of volatile compounds
MAAPTTLTALLETLTSSLSSAFEATPKIAGVDETENGVSLLDVKNELLLSYLQNLVFLILIKIRNAKSDASDSDNDSPNLTDDVVNKLVELRLYLDKGVRPLEERLRFTLDKIVRTADDADRAQQAAKDGQNSDEDSESGSEDDSDAADGDDAPEVSKRSANAAPSFGSFAAPVSTGMAAAAQDKTGVYRPPKITPTVMPTTERKERAERRPLKSASMNEYIADELSTAPSALPSVGSNVVFGGRKVKTTAEREAEDRRRDYEETNFVRLPKESKKQRAEKNKAERRSGKMSFGGEEWREIGEGADRIDKLTRRREGGNRGTKALLEMSRKRGRETTDSDRGSGLNSGTREIGERFNKKVKVMEGGRRDRGKR

SEQ ID NO: 10606 - DNA, 1548 bp, Muscodor strobelii
  misc_feature: SGI cDNA ID NO. 563373
  misc_feature: Reduced expression when VOC is produced
  misc_feature: Encodes the peptide sequence at SEQ ID NO 10607
atgggggccagaattcatctccgaaatcctatattccaccctattatctttgtcttccagatctttcaatggtttgtagacaaaatattgtccccagcgccgcccaaagaaggtgcacagcttggcagacccaaaatcgccatcatcggtgctggtattacgggtgtatcgtctgcagcgcactgcgttggacgtggattcgatgtcaccatctttgaagctgggagcgagaagaacctgggtggtatctgggccaacgtgaacaatacatcaagccttcagatccattcggcaatgtttcgatttcacccctcagtgcaatgggatcgcggatatcccaaccgacaacagatcgttagccaggtcaagcatgtgtggcagacatatggactcgacaagaagaccaaattcgacacgaaagtcgagaaagtgtataaagacgaccacgacagatgggttatcaacaatacggccaatggacgctttgatgcaattatcgcagctgttggtacctgtggggatccaaagatgcccaatatgcctggccttgagtcgttcaagaagcctatccgtcactcaagccaattgacaggcgtcgatgtcaaagacaaaaccatggtcattatcggaggcggagcaagtgccgtcgaagcactcgaatatgctttcgaagaaggtgctaagaaagtttatatcctgtctcgcagtgacaagtggatcattcctcgcaacccattcatcgacgtattgctatctttcaacatcttaggtcaagagaccatgttctcatggatccccgaaggcctactaaagcgctttttctaccgcgaccttcgggacatcgccccggataataagggtattttcacagatacccctatggtgaactccgacatcatggacaaacttagatctggtaaggcggaatgggtacgctgcgacatcgactccttctcggaacacagcatacaggtcaacaagcgcgagaaaggagttcccaagggcgggcctggcaagagcgttaaaatcgacgcagatatgctagtcatggcaacgggttacaaacgaccatcacttgagtttctgcctgacgatggtatcttcgatgagccatacggacctccaaattggtatcttcaaacattccctcctcgtcatccgtccgtatgtgccatcaactgcacatacgtctccgccatcggaacagtcggtaactggcacatcggtatctacacgcgtatcctattaatgttcctcgtcgatcctctcacccggccttccacattctggatggagcgttggatcgacatgaccaaagtcctcaaagccgctgctccaactggtgcattcgacttcttcacttatctggagctgatctggtggttcacgttctgtgttgcctttaaccctttcagatggaagtgggcctttttcgtcttcttcggtctgggatttgcgcttccgaggaggatcgtagagacggaggaggtaataaggaatgggttgggggtcaatggcgatagtcgggatgttggctacagcttttag

SEQ ID NO: 10607 - protein, 515 aa, Muscodor strobelii
  misc_feature: SGI Peptide ID NO. 563373
  misc_feature (45)..(73): Pfam Id: PF02737 Pfam Desc: 3-hydroxyacyl-CoA dehydrogenase, NAD binding domain
  misc_feature (45)..(75): Pfam Id: PF01266 Pfam Desc: FAD dependent oxidoreductase
  misc_feature (1)..(515): NCBI GI: 261352822 Blast Desc: conserved [Verticillium albo-atrum VaMs.102]
  misc_feature (1)..(515): NCBI GI: 116194836 Blast Desc: CHGG_04016 [Chaetomium globosum CBS 148.51] gi|88179929|gb|EAQ87397.1| CHGG_04016 [Chaetomium globosum CBS 148.51]
  misc_feature (7)..(515): NCBI GI: 46124323 Blast Desc: FG06539.1 [Gibberella zeae PH-1]
  misc_feature (5)..(515): NCBI GI: 154318108 Blast Desc: BC1G_03037 [Botryotinia fuckeliana B05.10] gi|150843695|gb|EDN18888.1| BC1G_03037 [Botryotinia fuckeliana B05.10]
  misc_feature (1)..(515): NCBI GI: 256726545 Blast Desc: [Nectria haematococca mpVI 77-13-4]
  misc_feature (5)..(503): NCBI GI: 156049933 Blast Desc: SS1G_07552 [Sclerotinia sclerotiorum 1980] gi|154691954|gb|EDN91692.1| SS1G_07552 [Sclerotinia sclerotiorum 1980]
  misc_feature (14)..(514): NCBI GI: 145615414 Blast Desc: MGG_05574 [Magnaporthe grisea 70-15] gi|145022246|gb|EDK06266.1| MGG_05574 [Magnaporthe grisea 70-15]
  misc_feature (1)..(502): NCBI GI: 85108002 Blast Desc: NCU07332 [Neurospora crassa OR74A] gi|28924097|gb|EAA33254.1| conserved [Neurospora crassa OR74A]
  misc_feature (11)..(496): NCBI GI: 119197021 Blast Desc: CIMG_02885 [Coccidioides immitis RS]
  misc_feature (11)..(496): NCBI GI: 240110712 Blast Desc: Flavin-binding monooxygenase-like family protein [Coccidioides posadasii C735 delta SOWgp]
  misc_feature (45)..(387): SWISSPROT Homolog: EC 1.14.13.8 Flavin-containing monooxygenase
  misc_feature: Useful for introducing or modulating the production of volatile compounds
MGARIHLRNPIFHPIIFVFQIFQWFVDKILSPAPPKEGAQLGRPKIAIIGAGITGVSSAAHCVGRGFDVTIFEAGSEKNLGGIWANVNNTSSLQIHSAMFRFHPSVQWDRGYPNRQQIVSQVKHVWQTYGLDKKTKFDTKVEKVYKDDHDRWVINNTANGRFDAIIAAVGTCGDPKMPNMPGLESFKKPIRHSSQLTGVDVKDKTMVIIGGGASAVEALEYAFEEGAKKVYILSRSDKWIIPRNPFIDVLLSFNILGQETMFSWIPEGLLKRFFYRDLRDIAPDNKGIFTDTPMVNSDIMDKLRSGKAEWVRCDIDSFSEHSIQVNKREKGVPKGGPGKSVKIDADMLVMATGYKRPSLEFLPDDGIFDEPYGPPNWYLQTFPPRHPSVCAINCTYVSAIGTVGNWHIGIYTRILLMFLVDPLTRPSTFWMERWIDMTKVLKAAAPTGAFDFFTYLELIWWFTFCVAFNPFRWKWAFFVFFGLGFALPRRIVETEEVIRNGLGVNGDSRDVGYSF

SEQ ID NO: 10608 - DNA, 3363 bp, Muscodor strobelii
  misc_feature: SGI EST ID NO. CUFF.25260.1
  misc_feature: Variant of the nucleotide sequence at SEQ ID NO 10606
aagctgtgtataataagagattctgcgccttttattgtgaatatttcttgtcgaatattttcagtattcttctttttttctctactattcagagtccctgaaagtcattgggagacacacaccccttacattcaagatgggggccagaattcatctccgaaatcctatattccaccctattatctttgtcttccagatctttcaatggtttgtagacaaaatattgtccccagcgccgcccaaagaaggtgcacagcttggcagacccaaaatcgccatcatcggtgctggtattacgggtgtatcgtctgcagcgcactgcgttggacgtggattcgatgtcaccatctttgaagctgggagcgagaagaacctgggtggtatctgggccaacgtgaacaatacatcaagccttcagatccattcggcaatgtttcgatttcacccctcagtgcaatgggatcgcggatatcccaaccgacaacagatcgttagccaggtcaagcatgtgtggcagacatatggactcgacaagaagaccaaattcgacacgaaagtcgagaaagtgtataaagacgaccacgacagatgggttatcaacaatacggccaatggacgctttgatgcaattatcgcagctgttggtacctgtggggatccaaagatgcccaatatgcctggccttgagtcgttcaagaagcctatccgtcactcaagccaattgacaggcgtcgatgtcaaagacaaaaccatggtcattatcggaggcggagcaagtgccgtcgaagcactcgaatatgctttcgaagaaggtgctaagaaagtttatatcctgtctcgcagtgacaagtggatcattcctcgcaacccattcatcgacgtattgctatctttcaacatcttaggtcaagagaccatgttctcatggatccccgaaggcctactaaagcgctttttctaccgcgaccttcgggacatcgccccggataataagggtattttcacagatacccctatggtgaactccgacatcatggacaaacttagatctggtaaggcggaatgggtacgctgcgacatcgactccttctcggaacacagcatacaggtcaacaagcgcgagaaaggagttcccaagggcgggcctggcaagagcgttaaaatcgacgcagatatgctagtcatggcaacgggttacaaacgaccatcacttgagtttctgcctgacgatggtatcttcgatgagccatacggacctccaaattggtatcttcaaacattccctcctcgtcatccgtccgtatgtgccatcaactgcacatacgtctccgccatcggaacagtcggtaactggcacatcggtatctacacgcgtatcctattaatgttcctcgtcgatcctctcacccggccttccacattctggatggagcgttggatcgacatgaccaaagtcctcaaagccgctgctccaactggtgcattcgacttcttcacttatctggagctgatctggtggttcacgttctgtgttgcctttaaccctttcagatggaagtgggcctttttcgtcttcttcggtctgggatttgcgcttccgaggaggatcgtagagacggaggaggtaataaggaatgggttgggggtcaatggcgatagtcgggatgttggctacagcttttagatgggcatgagtggtagaagacatcccgaggatttggacgtataacgtcacacctgagtcgcacgttcctcaaactattgacggttatagatagaagaagattcatgcaccgcatgagctgcgctgaaagtgcagcttgatatacttaatacaagccttagaagatccatgctatggtaaaagaaaaaaaaggacatcgagcattaaaaagtcatccttgctacaatcacaatcttttataccgtgaaatgggtagtaatggacttatatattgtgtcatagctgacgtccattattatgaggcatatctacaattgctcgaagccatacagatgacaagacgatgtaacagtgaagtccgctatcttttaccgcgatctcttctaccgccctccataaccttgaccttcttattgaacctctctccaatctctctcgtaccgctgtttagtccacttccacgatcgctgtccgtcgtctcgcggcctctcttcctgctcatctctagcagcgccttcgtacctcggttgccaccctccctccttctcgtcaacttgtcgatgcggtctgcaccttcgccgatctcgcgccattcctcaccaccgaagctcatcttgccgctgcgacgctctgccttgttcttctcggcgcgttgcttcttgctctccttgggcaggcgcacgaagttggtctcttcgtaatcacgtctgcggtcctcggcctcgcgctcagcggttgtcttgaccttcctgccgccgaacacaacattcgaaccaacgctgggaagtgcggatggggcggttgagagctcgtctgcgatgtattcgttcattgatgcggatttcaatgggcgtcgctcggctctctcctttcgctcggttgtgggcatgacggtgggtgtgatcttgggaggtcggtatacgccggtcttgtcttgagcggcggcggccatgcctgttgatacgggcgcggcgaagctgccgaatgatggggctgcattggctgaacgcttagaaacttcgggagcgtcgtcaccatcggcagcatctgagtcgtcttcagatccggattcggagtcctcgtcagaattttggccgtcttttgctgcttgttgagctcggtcggcatcatctgcggtgcggacaatcttgtctaatgtgaagcgtaggcgctcttccagaggacgtacgcccttgtcgagatataggcggagctcgacaagtttgttgaccacatcgtctgtaaggtttggggagtcgttgtctgagtccgaggcatcgcttttcgcattgcgaatcttaatcaggatgagaaagacgagattctgcaaataagacaagagaagttcgttttttacgtcgagaagcgaaaccccattttcggtctcgtcaacgccggcaatcttgggcgtggcttcgaatgcagatgatagagaactcgtgagggtctcaagcaatgctgtaagagttgtgggcgcggccatcgttggcgcggctaagtggtcgtgttcccaagaataaagacgaaggtctgtacgcaatagagaaattgcccctccagactggattcggatgctcagagttgccatgcgatctgattccccgaaaaaatatcctgacttacatggatccgataagataagagctgctctgtttccactgtgcgggacgtccggctcg

SEQ ID NO: 10609 - DNA, 2085 bp, Muscodor strobelii
  misc_feature: SGI cDNA ID NO. 563374
  misc_feature: Elevated expression when VOC is produced
  misc_feature: Encodes the peptide sequence at SEQ ID NO 10610
atggagatgctaccagagccaatgacgcccctatcgtacgaacgcacatatgggggcaatcgagcatttcacaatttcttcaatgatttctctcacatacaagatccgaacttgcgtcgacgactcgcgctctctgagattgataagatacccttcggtctataccatgtgagggccgtcttagttgcaggcataggattctttctggactcatacgatattttcgccattaatctcgtcacaacgttactaggagtggttttttggcagggtacatccaaagaggccatttacggatatggaggtaataacggagagttaccagtcagtgtgagtcagacactcaaggcatcgactagtgcaggcatcattatcggccaggttctgttcgggtggttagcagacaaatacggtcggcggaagatgtatggtgtcgaactggggatcatcgtgttctcgacattggcttgcactctcgtcgctgcaagtcaagctgttagtttcactgggcttatgacattttggcgagtcatgatgggtgtcggtattgggggcgactatccactcagttcggtgataacgtctgaattcgcaccgacaagatggcgaggggctatgatggctgctgtattctccatgcagggcattggtcaacttatcgctgctatcgtggctcttattgcgacagctgccttttacgatgcatttggcaatgcacgcgatgcagcccattgcgattatacctgtcaaacggccgccgaccgctgctggagaatcattatcggtgtgggtgttgttccggccgtttttgccttgtactaccgcataacaatccccgagactcctcgttacacatttgaggtggcgaaagatattgagaaaggcgccgctgatgtgaaggcttatatggcgagtcagtctgaaggcgaggttgacgaaatcaaacaagcacggatgaagaaagttgccgctcctgctttgaatgtgccatccgcttcttgggccgatctacgggattatttctcccagtggaaaaacttcaaggtactattaggcacaaccctgtcgtggttcttccttgacttggcattctacggtcttagccttaacaatcaagttatattacaagctatagggttttcgagcgccggcaatctctatcacacgctctggaacggcgcagttggtaccatcatattagtcgttgccggctcgctacctggatattgggcatccgtcttactagttgacactatcgggcgcaagacacttcagatcttaggcttctctatactcactatagtctttagcgtaataggcttctgctacgaccggctcgacaaaggctcactccttgcactctacgtagtagcaaatttcttcttcaacttcggtccgaacacaacgacctttataattccaggagagtgttttcctacgcgttacagatcgaccggccacggtatctcggcagctgcgggtaaagtaggtgctatcatcgcccaattcatctccagcccactcctcgagaagggcaaagaagaaggatgcgtgggcagtgcatgctcaccatggctcccaaaacttatgcaaatatttgctttgttcatgctttcgggactagtcgtctcatttctacttccggaaaccaaaggctacacgctggaagaactcgcaggtgaagctccgacatcttacaacgcaggccgaaatggcagtatcgtggagaaacctaggaaatggtggaatccgttcggcggtggacgaccagctggttttctgtatccaagtcaaggaactttccgaacgggtagccgcgtcgggattatgacgagtccagaaatcgctgcgcagaacgcagctgaaagaaaaagaccgttctggaggaggcggaaacgtcaggctgaacctcagcaacgagcagatagcatgagttcgtcttctaatctgcatgagacgccggctgatggcatcggcgtgctgcctggttggggtgcgggctggggccgaatagaccgtggtggaaatcctctgactatggataacatccggttacaggacgttggtagtttacttttgaattag

SEQ ID NO: 10610 - protein, 694 aa, Muscodor strobelii
  misc_feature: SGI Peptide ID NO. 563374
  misc_feature (63)..(502): Pfam Id: PF07690 Pfam Desc: Major Facilitator Superfamily
  misc_feature (59)..(562): Pfam Id: PF00083 Pfam Desc: Sugar (and other) transporter
  misc_feature (59)..(227): Pfam Id: PF00083 Pfam Desc: Sugar (and other) transporter
  misc_feature (373)..(562): Pfam Id: PF00083 Pfam Desc: Sugar (and other) transporter
  misc_feature (257)..(293): Pfam Id: PF00083 Pfam Desc: Sugar (and other) transporter
  misc_feature (2)..(692): NCBI GI: 46122563 Blast Desc: FG05659.1 [Gibberella zeae PH-1]
  misc_feature (1)..(614): NCBI GI: 156061169 Blast Desc: SS1G_02727 [Sclerotinia sclerotiorum 1980] gi|154700131|gb|EDN99869.1| SS1G_02727 [Sclerotinia sclerotiorum 1980]
  misc_feature (16)..(567): NCBI GI: 154305146 Blast Desc: BC1G_08663 [Botryotinia fuckeliana B05.10] gi|150853826|gb|EDN29018.1| BC1G_08663 [Botryotinia fuckeliana B05.10]
  misc_feature (14)..(574): NCBI GI: 156042770 Blast Desc: SS1G_11184 [Sclerotinia sclerotiorum 1980] gi|154695569|gb|EDN95307.1| SS1G_11184 [Sclerotinia sclerotiorum 1980]
  misc_feature (16)..(567): NCBI GI: 119191924 Blast Desc: CIMG_00339 [Coccidioides immitis RS]
  misc_feature (16)..(567): NCBI GI: 240106293 Blast Desc: Inorganic phosphate transporter, [Coccidioides posadasii C735 delta SOWgp]
  misc_feature (16)..(567): NCBI GI: 258573421 Blast Desc: phosphate:H+ symporter [Uncinocarpus reesii 1704] gi|237901158|gb|EEP75559.1| phosphate:H+ symporter [Uncinocarpus reesii 1704]
  misc_feature (3)..(561): NCBI GI: 256724387 Blast Desc: [Nectria haematococca mpVI 77-13-4]
  misc_feature (15)..(561): NCBI GI: 46127033 Blast Desc: FG07894.1 [Gibberella zeae PH-1]
  misc_feature (2)..(561): NCBI GI: 156059470 Blast Desc: SS1G_03747 [Sclerotinia sclerotiorum 1980] gi|154701534|gb|EDO01273.1| SS1G_03747 [Sclerotinia sclerotiorum 1980]
  misc_feature: Useful for introducing or modulating the production of volatile compounds
MEMLPEPMTPLSYERTYGGNRAFHNFFNDFSHIQDPNLRRRLALSEIDKIPFGLYHVRAVLVAGIGFFLDSYDIFAINLVTTLLGVVFWQGTSKEAIYGYGGNNGELPVSVSQTLKASTSAGIIIGQVLFGWLADKYGRRKMYGVELGIIVFSTLACTLVAASQAVSFTGLMTFWRVMMGVGIGGDYPLSSVITSEFAPTRWRGAMMAAVFSMQGIGQLIAAIVALIATAAFYDAFGNARDAAHCDYTCQTAADRCWRIIIGVGVVPAVFALYYRITIPETPRYTFEVAKDIEKGAADVKAYMASQSEGEVDEIKQARMKKVAAPALNVPSASWADLRDYFSQWKNFKVLLGTTLSWFFLDLAFYGLSLNNQVILQAIGFSSAGNLYHTLWNGAVGTIILVVAGSLPGYWASVLLVDTIGRKTLQILGFSILTIVFSVIGFCYDRLDKGSLLALYVVANFFFNFGPNTTTFIIPGECFPTRYRSTGHGISAAAGKVGAIIAQFISSPLLEKGKEEGCVGSACSPWLPKLMQIFALFMLSGLVVSFLLPETKGYTLEELAGEAPTSYNAGRNGSIVEKPRKWWNPFGGGRPAGFLYPSQGTFRTGSRVGIMTSPEIAAQNAAERKRPFWRRRKRQAEPQQRADSMSSSSNLHETPADGIGVLPGWGAGWGRIDRGGNPLTMDNIRLQDVGSLLLN

SEQ ID NO: 10611 - DNA, 3289 bp, Muscodor strobelii
  misc_feature: SGI EST ID NO. CUFF.25190.1
  misc_feature: Variant of the nucleotide sequence at SEQ ID NO 10609
gcgcattgcccacatagagaaggtcgtcctcccactttcatatcgtagtcacaaactttagcttccgttgcgcactgatattcaacgacaaaagacagcacggatgaaaaaactgacgcagcgcgcaatggcgtccactagttagagacccgttcccgtatgactggatcagacgtgattgataattgtcagcccccaacgcaccgcaaccatcgaaaccgttgtggaagcaacccaagccatttctcagcctaccgaaagccttggctcgtcacgtccgattcgcaccgagagaactgccaaagcccccgtgcctcttgtttccattggtcatgtccaatagtcccccatcgcatctggccgtaccttttcaagctttatcctagacataatcccacgctatcagggcttcaaacatctttcctatgttgcctcatgaccgccacagaacatacatagagtaaacgagagcaagtgatcggcataggatcagacctactccgttcctcccggtagcacaaggctttgtatcttccaacttcacaataactcagacggcattatctcttctcttcctcgtcactccttccatatactacgatcaactttggagctgcacccaatcaagcttattccaagcctccaagccgcaattcccgctactcaaacgcctccttacccgacatcgttttggttctttgatatacaattcccactctaaacctgagcacacagaggtaatgactgctaggaaattcgtcatgggtacaacataaccatcccttttgtgtcatcgaatgattttctccgagtatacgatataggctccgccgagtagcctcctcactgctttggccgcattgccagtcctgttttgcatgagacaccatcaaaatggtcaatatggagatgctaccagagccaatgacgcccctatcgtacgaacgcacatatgggggcaatcgagcatttcacaatttcttcaatgatttctctcacatacaagatccgaacttgcgtcgacgactcgcgctctctgagattgataagatacccttcggtctataccatgtgagggccgtcttagttgcaggcataggattctttctggactcatacgatattttcgccattaatctcgtcacaacgttactaggagtggttttttggcagggtacatccaaagaggccatttacggatatggaggtaataacggagagttaccagtcagtgtgagtcagacactcaaggcatcgactagtgcaggcatcattatcggccaggttctgttcgggtggttagcagacaaatacggtcggcggaagatgtatggtgtcgaactggggatcatcgtgttctcgacattggcttgcactctcgtcgctgcaagtcaagctgttagtttcactgggcttatgacattttggcgagtcatgatgggtgtcggtattgggggcgactatccactcagttcggtgataacgtctgaattcgcaccgacaagatggcgaggggctatgatggctgctgtattctccatgcagggcattggtcaacttatcgctgctatcgtggctcttattgcgacagctgccttttacgatgcatttggcaatgcacgcgatgcagcccattgcgattatacctgtcaaacggccgccgaccgctgctggagaatcattatcggtgtgggtgttgttccggccgtttttgccttgtactaccgcataacaatccccgagactcctcgttacacatttgaggtggcgaaagatattgagaaaggcgccgctgatgtgaaggcttatatggcgagtcagtctgaaggcgaggttgacgaaatcaaacaagcacggatgaagaaagttgccgctcctgctttgaatgtgccatccgcttcttgggccgatctacgggattatttctcccagtggaaaaacttcaaggtactattaggcacaaccctgtcgtggttcttccttgacttggcattctacggtcttagccttaacaatcaagttatattacaagctatagggttttcgagcgccggcaatctctatcacacgctctggaacggcgcagttggtaccatcatattagtcgttgccggctcgctacctggatattgggcatccgtcttactagttgacactatcgggcgcaagacacttcagatcttaggcttctctatactcactatagtctttagcgtaataggcttctgctacgaccggctcgacaaaggctcactccttgcactctacgtagtagcaaatttcttcttcaacttcggtccgaacacaacgacctttataattccaggagagtgttttcctacgcgttacagatcgaccggccacggtatctcggcagctgcgggtaaagtaggtgctatcatcgcccaattcatctccagcccactcctcgagaagggcaaagaagaaggatgcgtgggcagtgcatgctcaccatggctcccaaaacttatgcaaatatttgctttgttcatgctttcgggactagtcgtctcatttctacttccggaaaccaaaggctacacgctggaagaactcgcaggtgaagctccgacatcttacaacgcaggccgaaatggcagtatcgtggagaaacctaggaaatggtggaatccgttcggcggtggacgaccagctggttttctgtatccaagtcaaggaactttccgaacgggtagccgcgtcgggattatgacgagtccagaaatcgctgcgcagaacgcagctgaaagaaaaagaccgttctggaggaggcggaaacgtcaggctgaacctcagcaacgagcagatagcatgagttcgtcttctaatctgcatgagacgccggctgatggcatcggcgtgctgcctggttggggtgcgggctggggccgaatagaccgtggtggaaatcctctgactatggataacatccggttacaggacgttggtagtttacttttgaattagcaaggatttgatttgggcattagtggcgtcggtttgttttcggcatatcggattgaaggatgtgggtggcgtgcattgataaactctggacatacttgtttaccaacatattgcacttctgctcatacgagcaagatatatatcatagtcaggtagtcgggaatttcctaccgtccagtgtgaagaaaactgcgagacgtctcggattccctgacattctcaatgtcgatggtagtttcaaactatagtcgcttaatattagtatggacactccaatcaaatcttgtctcctttaactaag

SEQ ID NO: 10612 - DNA, 1479 bp, Muscodor strobelii
  misc_feature: SGI cDNA ID NO. 563375
  misc_feature: Encodes the peptide sequence at SEQ ID NO 10613
atggccccgaataatgggcaaactggctctgtgcccaaatttgcaagggttcagacacaagcagaaaaccccttcgcatcactgatcccagagcaagagatcgctataatcccaagcttcacgcttgagtctggtgtcgttctaaataatttacctttagcatatacaacccgaggaaagctatctgctaacgctgacaatgtcatggtcatctgccatgcactcaccgggtctgccgatgtcagtgactggtggggaccactcatcggaggccctggccgtgccttcgatacctcgcgattctttgtagtttgtatgaatagtttgggcagtccttatggtaccgcaagtccagtcactgccaaagacggtaacccggaagaagaaaactacgggcctgagttcccgctgactacgattcgagacgacgtcaatctacacaagatgctacttgacgaattaggagttcgtcaaatagcagccgttgttggcggatctatgggaggcatgcttgtgctcgaatgggcatactttggcaaagactacgttcgatgcattgtgccaatcgcaacatcgagtcaacatagtgcctggggcatcagctggggcgaagcccagcggcagagtatatatgccgacccaaagtacgaggacggatattattcgttctctgacccgccagtgactggtcttggagctgctcgtatgtctgcactcctgacttacagaagccggaattctttcgaggctcgatttggccgtaacatccctaacccggcccgacgtcagacgatccgtgagagaccacgaccaagcacgccatccgaggctcatttccagatccacaacgacggccacaagacaacgcggctatctcggaataacagccagaccaactcaccgcctcaggtgttgtctgatgtagaggagccaaatggcagttcgttagacccccaattttcaggtcccaagcctggcagtacacctggcggtttaactggaggggacgcttttccttcaaccacttatttctctgctcagtcctatttacgatatcaaggagagaaatttgtcaagcgttttgacagtaattgctatatcgctattacaagaaagctcgacacccatgatgtctcacgataccgcgccgatagtattgccgaggcgctagctatgattgagcagccgaccttggttcttgggatagaaagtgatgggctcttcacatttgcggagcaagaagagatagcacagcacatcaagaacgccaggctagaaaagatagacagccaggagggtcacgatgcattcttactgcaattcgaacaggtcaatcgatatgttcttgaattttttcacgagatattaccggatatcatgagcaagagtggcgagcatgtagaggctgcgagcgttggacagttgctcaagtcgagcacattcggagaagcagaggttgaagatattaccgcctggtga

SEQ ID NO: 10613 - protein, 492 aa, Muscodor strobelii
  misc_feature: SGI Peptide ID NO. 563375
  misc_feature (101)..(450): Pfam Id: PF00561 Pfam Desc: alpha/beta hydrolase fold
  misc_feature (1)..(492): NCBI GI: 116194738 Blast Desc: CHGG_03967 [Chaetomium globosum CBS 148.51] gi|88179880|gb|EAQ87348.1| CHGG_03967 [Chaetomium globosum CBS 148.51]
  misc_feature (1)..(492): NCBI GI: 39951653 Blast Desc: MGG_01469 [Magnaporthe grisea 70-15] gi|145020692|gb|EDK04821.1| MGG_01469 [Magnaporthe grisea 70-15]
  misc_feature (12)..(492): NCBI GI: 164424438 Blast Desc: homoserine O-acetyltransferase [Neurospora crassa OR74A] gi|157070512|gb|EAA33405.2| homoserine O-acetyltransferase [Neurospora crassa OR74A]
  misc_feature (14)..(492): NCBI GI: 256729812 Blast Desc: [Nectria haematococca mpVI 77-13-4]
  misc_feature (16)..(492): NCBI GI: 15982697 Blast Desc: homoserine o-acetyltransferase [Neurospora crassa]
  misc_feature (17)..(492): NCBI GI: 46122561 Blast Desc: FG05658.1 [Gibberella zeae PH-1]
  misc_feature (13)..(492): NCBI GI: 218511622 Blast Desc: homoserine-O-acetyltransferase [Epichloe festucae]
  misc_feature (9)..(492): NCBI GI: 171683413 Blast Desc: protein product [Podospora anserina] gi|170941666|emb|CAP67320.1| protein product [Podospora anserina]
  misc_feature (12)..(492): NCBI GI: 156061163 Blast Desc: SS1G_02724 [Sclerotinia sclerotiorum 1980] gi|154700128|gb|EDN99866.1| SS1G_02724 [Sclerotinia sclerotiorum 1980]
  misc_feature (1)..(492): NCBI GI: 119479863 Blast Desc: homoserine O-acetyltransferase, [Neosartorya fischeri NRRL 181] gi|119408114|gb|EAW18063.1| homoserine O-acetyltransferase, [Neosartorya fischeri NRRL 181]
  misc_feature (13)..(492): SWISSPROT Homolog: EC 2.3.1.31 Homoserine O-acetyltransferase
MAPNNGQTGSVPKFARVQTQAENPFASLIPEQEIAIIPSFTLESGVVLNNLPLAYTTRGKLSANADNVMVICHALTGSADVSDWWGPLIGGPGRAFDTSRFFVVCMNSLGSPYGTASPVTAKDGNPEEENYGPEFPLTTIRDDVNLHKMLLDELGVRQIAAVVGGSMGGMLVLEWAYFGKDYVRCIVPIATSSQHSAWGISWGEAQRQSIYADPKYEDGYYSFSDPPVTGLGAARMSALLTYRSRNSFEARFGRNIPNPARRQTIRERPRPSTPSEAHFQIHNDGHKTTRLSRNNSQTNSPPQVLSDVEEPNGSSLDPQFSGPKPGSTPGGLTGGDAFPSTTYFSAQSYLRYQGEKFVKRFDSNCYIAITRKLDTHDVSRYRADSIAEALAMIEQPTLVLGIESDGLFTFAEQEEIAQHIKNARLEKIDSQEGHDAFLLQFEQVNRYVLEFFHEILPDIMSKSGEHVEAASVGQLLKSSTFGEAEVEDITAW

SEQ ID NO: 10614 - DNA, 3354 bp, Muscodor strobelii
  misc_feature: SGI EST ID NO. CUFF.24985.0
  misc_feature: Variant of the nucleotide sequence at SEQ ID NO 10612
gtcggaattccctatctaggggtttgaatcttctaaccatgatgtgtcaccgctcctcataaccaaaggccgactcaggaaattattgatacgctgggaagaattgcgggatcgtctcggatcatccgatttgactcttcatcatctcaaatcccgctgttacctagcgatatatctatgctcaagtttttatagtcttcgaccgctccgcctacgtcggactggaaatccaccattttgctaccctcaggcaattcagaagttgagatggccccgaataatgggcaaactggctctgtgcccaaatttgcaagggttcagacacaagcagaaaaccccttcgcatcactgatcccagagcaagagatcgctataatcccaagcttcacgcttgagtctggtgtcgttctaaataatttacctttagcatatacaacccgaggaaagctatctgctaacgctgacaatgtcatggtcatctgccatgcactcaccgggtctgccgatgtcagtgactggtggggaccactcatcggaggccctggccgtgccttcgatacctcgcgattctttgtagtttgtatgaatagtttgggcagtccttatggtaccgcaagtccagtcactgccaaagacggtaacccggaagaagaaaactacgggcctgagttcccgctgactacgattcgagacgacgtcaatctacacaagatgctacttgacgaattaggagttcgtcaaatagcagccgttgttggcggatctatgggaggcatgcttgtgctcgaatgggcatactttggcaaagactacgttcgatgcattgtgccaatcgcaacatcgagtcaacatagtgcctggggcatcagctggggcgaagcccagcggcagagtatatatgccgacccaaagtacgaggacggatattattcgttctctgacccgccagtgactggtcttggagctgctcgtatgtctgcactcctgacttacagaagccggaattctttcgaggctcgatttggccgtaacatccctaacccggcccgacgtcagacgatccgtgagagaccacgaccaagcacgccatccgaggctcatttccagatccacaacgacggccacaagacaacgcggctatctcggaataacagccagaccaactcaccgcctcaggtgttgtctgatgtagaggagccaaatggcagttcgttagacccccaattttcaggtcccaagcctggcagtacacctggcggtttaactggaggggacgcttttccttcaaccacttatttctctgctcagtcctatttacgatatcaaggagagaaatttgtcaagcgttttgacagtaattgctatatcgctattacaagaaagctcgacacccatgatgtctcacgataccgcgccgatagtattgccgaggcgctagctatgattgagcagccgaccttggttcttgggatagaaagtgatgggctcttcacatttgcggagcaagaagagatagcacagcacatcaagaacgccaggctagaaaagatagacagccaggagggtcacgatgcattcttactgcaattcgaacaggtcaatcgatatgttcttgaattttttcacgagatattaccggatatcatgagcaagagtggcgagcatgtagaggctgcgagcgttggacagttgctcaagtcgagcacattcggagaagcagaggttgaagatattaccgcctggtgagagcaactattaattgctagcggcgcagccaagactttgtgctcgagacatgatgtgatttgggcaacctgatgacatggaggattgggatctgggatcgcacatcccacgcgtcacaaagcatgtggcgccgatgataacataacccatggcagccaatagcgtgaaagagataatttcttctcggatcggtcaactccttgagacaccatgggcttagcttcgaccgcatcatctattcagctgtcctaaaattgcaattttcgaaaattggtctaaatccgcgtatcctcaatgaagctgttgggattgttgttgtagtgagcctgttgttttccgtcagaagtagatggtgtgtgagccgttttttttgtcacctggcgcatcgccgaattaactgtattgacacccattgccatcactatattaccacgaaactgtatgcgagaggaggctgaatgcgcacgcgtttcgcatgtattcagacaaggaccgaaattagtgaaccctcaatgaagctagactaggcattgtgatacaatctcgactgcaaagttgaaacttaggctcatgcagtagctagcttctagaagttttctatttcacacacgagtcatcaagttgattaaagtcaaaaatcctgccgctgtacctgcattcccatctcccataagatttaggctttccacacgggagcaacagacctcttagatagtctataaatattcgttttagaatccacaatttcttttcctagatatcgacgtttcttgtgggctatatttacatggaagtctctctgacgatatgaaattcacgaagctaccagatcgactgccaagatttcctattcaactgcctcgagatgcacgcactgcttgcaagctatctgtgattatcggtgatattttggggttaactgggtacgccacaccgaagaggatctcggacggtcaaacccgcacgtggtcgaatacgatgctttgattggccatcccactctctcgcgtcaacctcctccgtccacgtttttgaatcttgacttcacaactgtcgctggccttacacattgacagggaaaatttccacataccacgcccaatcccacgccattggaaccgatccttccgggtgcctgtcgggaacacttactttaactgtccttaccaccaattgaagcctcgactagaacgacgagtgactcccgctgcttccagaagccattagaccgagatatcaatggacgcgcaaaggcttggccacaatttatagtatgcatactggacaaacctggtcaacgcgcgcttgcatcaagtacagaatacttttgctccatttccatcgaccaatactcctcctatggacccttctaaaatctcactgctatgtctccgagtcattttaccgacaacatggaagcgctcgttcagcttgtatatcatgtacgaagcaccaacattctcgtcttccggtctgatcgtaattttgttggcgagactaagcgactatgagctgtggtatacgcaatgcactataaaagaggcttataaatgcggactcgcataagactcctggtgtgagtgacgtaagggaaatcgggtaacaagt

SEQ ID NO: 10615 - DNA, 6912 bp, Muscodor strobelii
  misc_feature: SGI cDNA ID NO. 563376
  misc_feature: Reduced expression when VOC is produced
  misc_feature: Encodes the peptide sequence at SEQ ID NO 10616
atggcccctgcgccagcaccctcgacgacttcgtttccccctcccccgcctccccgagcccctgtcgtctccaactacaactatctcgtgctgagcgaagcacgcctctcaacatggcagcaggccggccgccaggaggtcatcgaccacggcgtcacgtcgcgtgtcgacgaagatatcgaagagatagccaccatctcccaagagttcatccgcgctgtgctcgagcatcgcctgacccccgccgatgctggcgactgcatcagacagatcctaggccctgcggtggagagcgaccagggcgctaacttcgccctcgaggcccagactctgttcctcgacaccatatctgtcttcttagattctgaagagggcgccttcagctcacagttccgagactttgtcattgccacggggctgtcacctaagctgatgcgtgaagtccttgatgcaccggctctccaacagcttggtctaatccgagacaacttcgtcaagttgggcatcaaatttgctacgaatcagttgtatcgccaagccaactacaatctgctgagggaggagtcggagggctactcaaagctcgcggcggagctgtatcgcacaccatatcagtcccagggccaccatgactttatgctcgtccaagcaacctgggaacggatcaaagcactgataggcacatttgacctcgatgtgggacgcgttctagacgtcgtcatcgacgttttctccgccacgatgctgaggaatctgcagttcttcaccaaattactgcgcattagttcctggtggccacacaaccagattgagcatgcggagaaagtgtttgccggaggactgcctaaatgggcgttgcctgaaaacgaaacagttgcagcggaagatctcagggccgaacttgaaagccaggccgaagcccgcgatgtcgcattttgggatcgagcgcgtcaagttcaactcgatgctttttttgagcttgcggggagacgaatcgacgaagaagatttgagacggctggaggacaccacgtccgaaacaggcgccagctccaatccgtctctggaatggatgagagctacgaaaacactacccccgtgcggaaatcgggttgctgcacaactgctcggcttcaagtttcgcttttatacctccgacgcgagagacaagggagaaacgctgccagccaatctttattaccttgcagctttcctaataaaaattgggtttgtctccttggctgacctatacgcccacctgtggcctgccgacgacgatatgggtgcgctcagacttcgacgtgaagaggaacttgctgagaaagagaggactgccaggcaagggaatgagccgaatgccctgctgatggccggcgcattacccgacgatacggctccggcaccatcgaggccccgagaagctaacactaccaaagtggaggggaaggagcaagaaccaaacggtgaagcccaagctgatccgacaagccttcctgaacccaaagaagctcaaaaggcagatctcgtcgctcatcttcttgttgtcggcgctatccctgaagccctgtttatcattgggcgatttccttggctccctgaggcatatccagacgagatctatccagccatcaaccgcatcctcctccactccataagcaaggtctacgacgcaacacgcccaatgaatatgcgacctacatcgtcaatttccaagcccgacctagccgtcgaccaagcaggaatgccgaaaggaaacttaagattcgtggatggctcggttgcgaagattctgaggtggcctcacgcagacggcaccgcaagaggtactctttaccgattctacctcgacgagtggtccgacaatgttcctgtgtgccagacggtcgacgatgtcttcactctttgccatacgctcctcaatatttccggtgtgaatatcggtcgagaccccactctggtgaagaaaatcgccgccattggagccagaagcctccacgaggataaatcgccgcaaaacttctcccgctggcaagatctactccgtcgcactttagtaccgtctctctgtctgacaagtgccaatgtcgatgcggtgcgtgccgtgtgggacctccttaaacagtatcccacacctacccgatacaccatttatgccgagtgctacgaaggatctatctcacggttagatgctatgaagcaggcctttaaagcggcaagatcagacacgctcgcgactctcaaaagactgtcatttaaaactataccaaagtcagcaaagaagctggctaagattgcattatcgtctcccgggatagtctgcaaagtcgcactcgatcagatcgaggcttattctaatctcatcgaggcttttgttgagtgtaccgactatttcacggaaatgggccatgatgtcttggtgtggtcgctccttagctctctgggtggcaagcaaaggatccgcacttcagagacgtctattctcctgactagcagatggctgcaagccctctcaaaattctctggcaaggttttccgaagagccgagaatgtggatcccacaccggttatacaatatgtgaatgaccaggtggcacaaaacaactctactgacctggttattcttcgagagctcatcaactcgatggctgggatcgtcactgatgtggacttcacggatgctcagttatctgccctgactggcggtgaacttctgcgacgtcaaactctgacagctctgggtgataagcgctatgaatctggcaagagtgcgactcgtttcatgaaggcattactccagtcagatatggcctcgctgctgttggttaacttggcacaatatcgacaaacggctatttatcgcgttccggaagacgaagcacatatcaagtacttggcaaccctcatcgacgattctcagcaagctctcgttctgtaccttgaattactacaccacaatctatcggcagagcagttcaatgcgcgcgttcctggcataccaaccctgatgacggagttagggcttgatgcgaatcttgccttcatgattggccgcgcaagtctcacatattacatgacaggccctggagataaagtgcctgtgaagcctgttgcggatatcgaaggagatgtctctatggatgccacgaatgccgccgctgatgtcagtgtgcccgagaatttgtccgacgccatggttgtggacaatacagagaccagtgtgagctctccgccatcacacattccttctgcagtgcagagccagtcatcggatcgcttcactgaagttttgagtcccatcatcgagacggtcaaaaccactcttccccagaacatctggaataatatcagtccagagttctttgtacttttctgggcgcttcaaacaggcgacctcgacgtacctatgaacagttatacagccgaattcacgaaattagacaaggaacgagacgaagtcaaaagagacaggagcaacatgagccgccagggcgcaaatgagaaggcagccaaaatcgccgcaatcgaacgcctgtctaaagaattgcccgatgaggcaagtatctgcaaagaacgagtgtcgaaaaccaaacttctcttgatcagacaaagtcccaaatggttcagtgcttctgccaacacagactcgatcatggacacattcatagaggagtgtcttctaccccgtatcttagtttcttccggagatgctgatttcactcatcgtatgatcaaattcatgcactcgagtcgggtaccgaacttcaagctatccagcttgtacaaccggttctttcatgtgaatcggctgcgatctgtgatattcggctgcactgtgcgagaagctgagttcctcggccgtttcattaaactaacactcggtgatctgtcggtctggcataagaacgagaagatttacgagaaagaggctattggacagaaccgtgttagtttcgcgactgtcctagatgagagtggcaagccgacgtcgttcatgacatataatgaatatcgtgatcttctctggacatggcatcggaacttttttacagcccttaagagttgtctggcagacatggaatggatgcacattcgaaatgcaatcacgattctgaaagccgctctggatcatttcccgtcggtagacttcatgggacggcaactacagactagtctcgagaatattgccaggcgtgaggccaagtcagacggtgacgatggacaaggccatcggggcgacctggcagtgacggctaatacagcgatctcggcgctgaagagatacgcaaagaaatgggttatggtgcaagcattccggtcgaacactagcggtgattctgcggaagataagaaactcatagaagccaacaagtcttctggtctccggccagatgccccagaattcaagcccacggctgacagtgcgccaacacgtcctcgacccgctgctgaggaagaagacggcgaagtcaaagatggtggtgcatcctcagctgctgttcctaaaacgcaagacgcaatcccttcgcgtccatcctcatcgcagcgcgacaatgcacagccggcgacatctacaacaccaaaagtagactccaagccagaccagagcaaaccatcaacatcgagttcagcaggagccccgggacctccctctgcgactggtggacgccaagaatcgacgcggtcatcattgggcccgactcccagtggtccacacggtttgcccagtcgacctgaggtgccacttccagcccacttctcacacgatcattttgggacaatcaaaacgcttcatcctcacgaccaccgagaggctagggatcaccgtgatccaagagaacaacagagaccaacaaggaatccaagggacaccagagattccaactcaagggatgcacgggattccagggatccaagatcacagcgggtcccacttgaagatccccgtccacctcgtatgagagatcagcaaacttccgagcgtcgagtaccagaaaatctacctggtcatccacataactcaggaagagaacgaccgcctcatcgaccagaccctattcgacggccggatgcttcactgccacaagaacgtgattctcgtttaccacgcgacagaattccgtcaaatacaggcatacctcgggggcctgaggtaaacagagatccgcgagaggcaccagccgtcacatccatgccccctcctcaccatccggaagctcaaggcccaactgtgaatcccgagcgtgcacgcctgatcaatgcagaccgccctgatgaccgtcccagtacagcgaatgcgataaatccagcacgagctgccatgctcagtgatggacgacatggtcgagaggatagtcgagaacgcaatttgtcccgaggagcctccccaagaagaggcgatcgtgcggagccacgcggaagcgaatcctctcgtgatgatcgtcgttcacaccgttcagaacatcacacttctagtcgcgatcatcggaacgagtcacaaggcccctcgggagcgcgaagtggcagaatcggagaatcagataatgacaacctcatgcctgataggccgcctttacctccattccctggaccgcctccatcccgcaacgaacccgaaatgggtagattcaacatgcaagatccagactacggtcgtcttagttcgataccatccgtcggcgacatgggcaacccaccggaaggtccacgagggcgtggtcgcaacgtgacacgcggccccggtggaccaggcaatatgccaccggcaagacctgacagccggctacctggaaatgatgctcatagaccaatatcacctgagaggcatcatcctcctactgggccatcgtcgtctaggccacgacgtaaccagaatggaggaccgcatgcttctaatttgccaccttcgccagcaactaacagaccatctacattaccaggtgtgcatcccgagcgaatgcagcagcttaacactagtgtagccggagcgccctcgcctccccaaccctctcaccagactactatgccggcgccgacaccggtatctgtccatccggatcgcatggcacagatagctccgcaatcttctgcgaatagcagtcctcatcagggtggccgctcactgcctccaattcaaacacccgatcgaccgcacggactcatgtcaaatcatcgtccaccttccggcatgtatcctagcgccgataatagccccataacggcaccaaccggccctgctgctaccaccgatcgctctaaaaacgggcgaagacaattgtctggtatcaacaccattcttcaacaaggcggtccgggtgttcgacccaggggttcaagatcaaatttggcaggatcagatgcccagattctaactggcgcctcgccagtttctaccccaaccgttgaaaggtctgaacctttccccccgaaggatcggtccggtcgaaacgaccatgagcgcgggcgtagagagcatgacagtagtgatcggtcgtcccgctctcaacgccgtagcagtcgcgagcgcagtcccgggagagaaagtcgatcatcaaaagatcatcgcgactatcgcgaccgtaagtcgggagcgagcagagaagcagagaaggatttgagccggcagccgaggagagaccccgccattataaatcgagagcctataccgatggtgcctaggggcgatattggaggcaatagtagagatatgtcgcgtgaattgcgtcatcgaggagatggtgggaatgggaggcacgaagacatggcccgcagtggaggtagaagaggtggaccacgcggtgaggatcgacgaggggatggccgtggaccaggtgacgagcatcgcaacgcgagaaagcgccagagtgacgagtatgggggaccacctgagaagcggccaagacgcacgggtcagtag

SEQ ID NO: 10616 - protein, 2303 aa, Muscodor strobelii
  misc_feature: SGI Peptide ID NO. 563376
  misc_feature (22)..(2257): NCBI GI: 171683415 Blast Desc: protein product [Podospora anserina] gi|170941667|emb|CAP67321.1| protein product [Podospora anserina]
  misc_feature (18)..(2139): NCBI GI: 85108762 Blast Desc: NCU07002 [Neurospora crassa OR74A] gi|28924252|gb|EAA33406.1| [Neurospora crassa OR74A]
  misc_feature (26)..(2135): NCBI GI: 116194740 Blast Desc: CHGG_03968 [Chaetomium globosum CBS 148.51] gi|88179881|gb|EAQ87349.1| CHGG_03968 [Chaetomium globosum CBS 148.51]
  misc_feature (22)..(2300): NCBI GI: 46122559 Blast Desc: FG05657.1 [Gibberella zeae PH-1]
  misc_feature (18)..(2249): NCBI GI: 256729633 Blast Desc: NECHADRAFT_62693 [Nectria haematococca mpVI 77-13-4]
  misc_feature (25)..(2244): NCBI GI: 145613640 Blast Desc: MGG_01468 [Magnaporthe grisea 70-15] gi|145020693|gb|EDK04822.1| MGG_01468 [Magnaporthe grisea 70-15]
  misc_feature (26)..(2300): NCBI GI: 156061161 Blast Desc: SS1G_02723 [Sclerotinia sclerotiorum 1980] gi|154700127|gb|EDN99865.1| SS1G_02723 [Sclerotinia sclerotiorum 1980]
  misc_feature (26)..(2100): NCBI GI: 159126350 Blast Desc: THO complex component (Rlr1), [Aspergillus fumigatus A1163]
  misc_feature (26)..(2186): NCBI GI: 115437974 Blast Desc: conserved [Aspergillus terreus NIH2624] gi|114188762|gb|EAU30462.1| conserved [Aspergillus terreus NIH2624]
  misc_feature (26)..(2100): NCBI GI: 146324095 Blast Desc: THO complex component (Rlr1) [Aspergillus fumigatus Af293] gi|129558071|gb|EBA27443.1| THO complex component (Rlr1), [Aspergillus fumigatus Af293]
  misc_feature: Useful for introducing or modulating the production of volatile compounds
MAPAPAPSTTSFPPPPPPRAPVVSNYNYLVLSEARLSTWQQAGRQEVIDHGVTSRVDEDIEEIATISQEFIRAVLEHRLTPADAGDCIRQILGPAVESDQGANFALEAQTLFLDTISVFLDSEEGAFSSQFRDFVIATGLSPKLMREVLDAPALQQLGLIRDNFVKLGIKFATNQLYRQANYNLLREESEGYSKLAAELYRTPYQSQGHHDFMLVQATWERIKALIGTFDLDVGRVLDVVIDVFSATMLRNLQFFTKLLRISSWWPHNQIEHAEKVFAGGLPKWALPENETVAAEDLRAELESQAEARDVAFWDRARQVQLDAFFELAGRRIDEEDLRRLEDTTSETGASSNPSLEWMRATKTLPPCGNRVAAQLLGFKFRFYTSDARDKGETLPANLYYLAAFLIKIGFVSLADLYAHLWPADDDMGALRLRREEELAEKERTARQGNEPNALLMAGALPDDTAPAPSRPREANTTKVEGKEQEPNGEAQADPTSLPEPKEAQKADLVAHLLVVGAIPEALFIIGRFPWLPEAYPDEIYPAINRILLHSISKVYDATRPMNMRPTSSISKPDLAVDQAGMPKGNLRFVDGSVAKILRWPHADGTARGTLYRFYLDEWSDNVPVCQTVDDVFTLCHTLLNISGVNIGRDPTLVKKIAAIGARSLHEDKSPQNFSRWQDLLRRTLVPSLCLTSANVDAVRAVWDLLKQYPTPTRYTIYAECYEGSISRLDAMKQAFKAARSDTLATLKRLSFKTIPKSAKKLAKIALSSPGIVCKVALDQIEAYSNLIEAFVECTDYFTEMGHDVLVWSLLSSLGGKQRIRTSETSILLTSRWLQALSKFSGKVFRRAENVDPTPVIQYVNDQVAQNNSTDLVILRELINSMAGIVTDVDFTDAQLSALTGGELLRRQTLTALGDKRYESGKSATRFMKALLQSDMASLLLVNLAQYRQTAIYRVPEDEAHIKYLATLIDDSQQALVLYLELLHHNLSAEQFNARVPGIPTLMTELGLDANLAFMIGRASLTYYMTGPGDKVPVKPVADIEGDVSMDATNAAADVSVPENLSDAMVVDNTETSVSSPPSHIPSAVQSQSSDRFTEVLSPIIETVKTTLPQNIWNNISPEFFVLFWALQTGDLDVPMNSYTAEFTKLDKERDEVKRDRSNMSRQGANEKAAKIAAIERLSKELPDEASICKERVSKTKLLLIRQSPKWFSASANTDSIMDTFIEECLLPRILVSSGDADFTHRMIKFMHSSRVPNFKLSSLYNRFFHVNRLRSVIFGCTVREAEFLGRFIKLTLGDLSVWHKNEKIYEKEAIGQNRVSFATVLDESGKPTSFMTYNEYRDLLWTWHRNFFTALKSCLADMEWMHIRNAITILKAALDHFPSVDFMGRQLQTSLENIARREAKSDGDDGQGHRGDLAVTANTAISALKRYAKKWVMVQAFRSNTSGDSAEDKKLIEANKSSGLRPDAPEFKPTADSAPTRPRPAAEEEDGEVKDGGASSAAVPKTQDAIPSRPSSSQRDNAQPATSTTPKVDSKPDQSKPSTSSSAGAPGPPSATGGRQESTRSSLGPTPSGPHGLPSRPEVPLPAHFSHDHFGTIKTLHPHDHREARDHRDPREQQRPTRNPRDTRDSNSRDARDSRDPRSQRVPLEDPRPPRMRDQQTSERRVPENLPGHPHNSGRERPPHRPDPIRRPDASLPQERDSRLPRDRIPSNTGIPRGPEVNRDPREAPAVTSMPPPHHPEAQGPTVNPERARLINADRPDDRPSTANAINPARAAMLSDGRHGREDSRERNLSRGASPRRGDRAEPRGSESSRDDRRSHRSEHHTSSRDHRNESQGPSGARSGRIGESDNDNLMPDRPPLPPFPGPPPSRNEPEMGRFNMQDPDYGRLSSIPSVGDMGNPPEGPRGRGRNVTRGPGGPGNMPPARPDSRLPGNDAHRPISPERHHPPTGPSSSRPRRNQNGGPHASNLPPSPATNRPSTLPGVHPERMQQLNTSVAGAPSPPQPSHQTTMPAPTPVSVHPDRMAQIAPQSSANSSPHQGGRSLPPIQTPDRPHGLMSNHRPPSGMYPSADNSPITAPTGPAATTDRSKNGRRQLSGINTILQQGGPGVRPRGSRSNLAGSDAQILTGASPVSTPTVERSEPFPPKDRSGRNDHERGRREHDSSDRSSRSQRRSSRERSPGRESRSSKDHRDYRDRKSGASREAEKDLSRQPRRDPAIINREPIPMVPRGDIGGNSRDMSRELRHRGDGGNGRHEDMARSGGRRGGPRGEDRRGDGRGPGDEHRNARKRQSDEYGGPPEKRPRRTGQ

SEQ ID NO: 10617 - DNA, 8331 bp, Muscodor strobelii
  misc_feature: SGI EST ID NO. CUFF.25400.1
  misc_feature: Variant of the nucleotide sequence at SEQ ID NO 10615
atccgcaatctgactgcagcgtcagacagacaaggtcgattgtcgcgcgacgaagcccctcgtccctctcgtcctcttatcacccacctatcgagagctggccgtatcgcatccttggtctgcgccgcgtgcgatagatgccctccgtgcgtggttgattgtcggcaagaggagatggtcgccggaaggccctgcccaccagcccattcttcacgctttctttgttcaaccacttgtgtgcacctgctccattgagagtcctgcctcgcactcaccacggcccctctctctgctgcattgttgcatcctgcatcttgcatcctcctctgactcttaatgactcctaccatctaatctcttcgcgccgccttcgaatcgcacagtcaaactcccatttgtatcatcatcatcgccgtccttttttctcatttgtctcttctccacacccacgacgcagccgatgccacccaccatcgcgccgcctcatcgcccgtctctccattaacctcagcgtggttcgacctccgatgaccaacctctccccttaatcctcgcctccacctcatcatggctcccaacagcggaagcgcaacgacaacgtcggtggtggccgccccgcccctcaccgtcccaacgacaccgccctcgcacagcacgatcgggacttcgccgatggcccctcacagcaccgccgtgcctctggccccggcagaaacacgaggcgcaacaacgaccgccgagactcgtcagcttaccagtccggccctgctcacaaccatcgcggcccgccctcgcccgttcttcctcgacccaccagctcgtcttcacagcctgcgcccatggcccctgcgccagcaccctcgacgacttcgtttccccctcccccgcctccccgagcccctgtcgtctccaactacaactatctcgtgctgagcgaagcacgcctctcaacatggcagcaggccggccgccaggaggtcatcgaccacggcgtcacgtcgcgtgtcgacgaagatatcgaagagatagccaccatctcccaagagttcatccgcgctgtgctcgagcatcgcctgacccccgccgatgctggcgactgcatcagacagatcctaggccctgcggtggagagcgaccagggcgctaacttcgccctcgaggcccagactctgttcctcgacaccatatctgtcttcttagattctgaagagggcgccttcagctcacagttccgagactttgtcattgccacggggctgtcacctaagctgatgcgtgaagtccttgatgcaccggctctccaacagcttggtctaatccgagacaacttcgtcaagttgggcatcaaatttgctacgaatcagttgtatcgccaagccaactacaatctgctgagggaggagtcggagggctactcaaagctcgcggcggagctgtatcgcacaccatatcagtcccagggccaccatgactttatgctcgtccaagcaacctgggaacggatcaaagcactgataggcacatttgacctcgatgtgggacgcgttctagacgtcgtcatcgacgttttctccgccacgatgctgaggaatctgcagttcttcaccaaattactgcgcattagttcctggtggccacacaaccagattgagcatgcggagaaagtgtttgccggaggactgcctaaatgggcgttgcctgaaaacgaaacagttgcagcggaagatctcagggccgaacttgaaagccaggccgaagcccgcgatgtcgcattttgggatcgagcgcgtcaagttcaactcgatgctttttttgagcttgcggggagacgaatcgacgaagaagatttgagacggctggaggacaccacgtccgaaacaggcgccagctccaatccgtctctggaatggatgagagctacgaaaacactacccccgtgcggaaatcgggttgctgcacaactgctcggcttcaagtttcgcttttatacctccgacgcgagagacaagggagaaacgctgccagccaatctttattaccttgcagctttcctaataaaaattgggtttgtctccttggctgacctatacgcccacctgtggcctgccgacgacgatatgggtgcgctcagacttcgacgtgaagaggaacttgctgagaaagagaggactgccaggcaagggaatgagccgaatgccctgctgatggccggcgcattacccgacgatacggctccggcaccatcgaggccccgagaagctaacactaccaaagtggaggggaaggagcaagaaccaaacggtgaagcccaagctgatccgacaagccttcctgaacccaaagaagctcaaaaggcagatctcgtcgctcatcttcttgttgtcggcgctatccctgaagccctgtttatcattgggcgatttccttggctccctgaggcatatccagacgagatctatccagccatcaaccgcatcctcctccactccataagcaaggtctacgacgcaacacgcccaatgaatatgcgacctacatcgtcaatttccaagcccgacctagccgtcgaccaagcaggaatgccgaaaggaaacttaagattcgtggatggctcggttgcgaagattctgaggtggcctcacgcagacggcaccgcaagaggtactctttaccgattctacctcgacgagtggtccgacaatgttcctgtgtgccagacggtcgacgatgtcttcactctttgccatacgctcctcaatatttccggtgtgaatatcggtcgagaccccactctggtgaagaaaatcgccgccattggagccagaagcctccacgaggataaatcgccgcaaaacttctcccgctggcaagatctactccgtcgcactttagtaccgtctctctgtctgacaagtgccaatgtcgatgcggtgcgtgccgtgtgggacctccttaaacagtatcccacacctacccgatacaccatttatgccgagtgctacgaaggatctatctcacggttagatgctatgaagcaggcctttaaagcggcaagatcagacacgctcgcgactctcaaaagactgtcatttaaaactataccaaagtcagcaaagaagctggctaagattgcattatcgtctcccgggatagtctgcaaagtcgcactcgatcagatcgaggcttattctaatctcatcgaggcttttgttgagtgtaccgactatttcacggaaatgggccatgatgtcttggtgtggtcgctccttagctctctgggtggcaagcaaaggatccgcacttcagagacgtctattctcctgactagcagatggctgcaagccctctcaaaattctctggcaaggttttccgaagagccgagaatgtggatcccacaccggttatacaatatgtgaatgaccaggtggcacaaaacaactctactgacctggttattcttcgagagctcatcaactcgatggctgggatcgtcactgatgtggacttcacggatgctcagttatctgccctgactggcggtgaacttctgcgacgtcaaactctgacagctctgggtgataagcgctatgaatctggcaagagtgcgactcgtttcatgaaggcattactccagtcagatatggcctcgctgctgttggttaacttggcacaatatcgacaaacggctatttatcgcgttccggaagacgaagcacatatcaagtacttggcaaccctcatcgacgattctcagcaagctctcgttctgtaccttgaattactacaccacaatctatcggcagagcagttcaatgcgcgcgttcctggcataccaaccctgatgacggagttagggcttgatgcgaatcttgccttcatgattggccgcgcaagtctcacatattacatgacaggccctggagataaagtgcctgtgaagcctgttgcggatatcgaaggagatgtctctatggatgccacgaatgccgccgctgatgtcagtgtgcccgagaatttgtccgacgccatggttgtggacaatacagagaccagtgtgagctctccgccatcacacattccttctgcagtgcagagccagtcatcggatcgcttcactgaagttttgagtcccatcatcgagacggtcaaaaccactcttccccagaacatctggaataatatcagtccagagttctttgtacttttctgggcgcttcaaacaggcgacctcgacgtacctatgaacagttatacagccgaattcacgaaattagacaaggaacgagacgaagtcaaaagagacaggagcaacatgagccgccagggcgcaaatgagaaggcagccaaaatcgccgcaatcgaacgcctgtctaaagaattgcccgatgaggcaagtatctgcaaagaacgagtgtcgaaaaccaaacttctcttgatcagacaaagtcccaaatggttcagtgcttctgccaacacagactcgatcatggacacattcatagaggagtgtcttctaccccgtatcttagtttcttccggagatgctgatttcactcatcgtatgatcaaattcatgcactcgagtcgggtaccgaacttcaagctatccagcttgtacaaccggttctttcatgtgaatcggctgcgatctgtgatattcggctgcactgtgcgagaagctgagttcctcggccgtttcattaaactaacactcggtgatctgtcggtctggcataagaacgagaagatttacgagaaagaggctattggacagaaccgtgttagtttcgcgactgtcctagatgagagtggcaagccgacgtcgttcatgacatataatgaatatcgtgatcttctctggacatggcatcggaacttttttacagcccttaagagttgtctggcagacatggaatggatgcacattcgaaatgcaatcacgattctgaaagccgctctggatcatttcccgtcggtagacttcatgggacggcaactacagactagtctcgagaatattgccaggcgtgaggccaagtcagacggtgacgatggacaaggccatcggggcgacctggcagtgacggctaatacagcgatctcggcgctgaagagatacgcaaagaaatgggttatggtgcaagcattccggtcgaacactagcggtgattctgcggaagataagaaactcatagaagccaacaagtcttctggtctccggccagatgccccagaattcaagcccacggctgacagtgcgccaacacgtcctcgacccgctgctgaggaagaagacggcgaagtcaaagatggtggtgcatcctcagctgctgttcctaaaacgcaagacgcaatcccttcgcgtccatcctcatcgcagcgcgacaatgcacagccggcgacatctacaacaccaaaagtagactccaagccagaccagagcaaaccatcaacatcgagttcagcaggagccccgggacctccctctgcgactggtggacgccaagaatcgacgcggtcatcattgggcccgactcccagtggtccacacggtttgcccagtcgacctgaggtgccacttccagcccacttctcacacgatcattttgggacaatcaaaacgcttcatcctcacgaccaccgagaggctagggatcaccgtgatccaagagaacaacagagaccaacaaggaatccaagggacaccagagattccaactcaagggatgcacgggattccagggatccaagatcacagcgggtcccacttgaagatccccgtccacctcgtatgagagatcagcaaacttccgagcgtcgagtaccagaaaatctacctggtcatccacataactcaggaagagaacgaccgcctcatcgaccagaccctattcgacggccggatgcttcactgccacaagaacgtgattctcgtttaccacgcgacagaattccgtcaaatacaggcatacctcgggggcctgaggtaaacagagatccgcgagaggcaccagccgtcacatccatgccccctcctcaccatccggaagctcaaggcccaactgtgaatcccgagcgtgcacgcctgatcaatgcagaccgccctgatgaccgtcccagtacagcgaatgcgataaatccagcacgagctgccatgctcagtgatggacgacatggtcgagaggatagtcgagaacgcaatttgtcccgaggagcctccccaagaagaggcgatcgtgcggagccacgcggaagcgaatcctctcgtgatgatcgtcgttcacaccgttcagaacatcacacttctagtcgcgatcatcggaacgagtcacaaggcccctcgggagcgcgaagtggcagaatcggagaatcagataatgacaacctcatgcctgataggccgcctttacctccattccctggaccgcctccatcccgcaacgaacccgaaatgggtagattcaacatgcaagatccagactacggtcgtcttagttcgataccatccgtcggcgacatgggcaacccaccggaaggtccacgagggcgtggtcgcaacgtgacacgcggccccggtggaccaggcaatatgccaccggcaagacctgacagccggctacctggaaatgatgctcatagaccaatatcacctgagaggcatcatcctcctactgggccatcgtcgtctaggccacgacgtaaccagaatggaggaccgcatgcttctaatttgccaccttcgccagcaactaacagaccatctacattaccaggtgtgcatcccgagcgaatgcagcagcttaacactagtgtagccggagcgccctcgcctccccaaccctctcaccagactactatgccggcgccgacaccggtatctgtccatccggatcgcatggcacagatagctccgcaatcttctgcgaatagcagtcctcatcagggtggccgctcactgcctccaattcaaacacccgatcgaccgcacggactcatgtcaaatcatcgtccaccttccggcatgtatcctagcgccgataatagccccataacggcaccaaccggccctgctgctaccaccgatcgctctaaaaacgggcgaagacaattgtctggtatcaacaccattcttcaacaaggcggtccgggtgttcgacccaggggttcaagatcaaatttggcaggatcagatgcccagattctaactggcgcctcgccagtttctaccccaaccgttgaaaggtctgaacctttccccccgaaggatcggtccggtcgaaacgaccatgagcgcgggcgtagagagcatgacagtagtgatcggtcgtcccgctctcaacgccgtagcagtcgcgagcgcagtcccgggagagaaagtcgatcatcaaaagatcatcgcgactatcgcgaccgtaagtcgggagcgagcagagaagcagagaaggatttgagccggcagccgaggagagaccccgccattataaatcgagagcctataccgatggtgcctaggggcgatattggaggcaatagtagagatatgtcgcgtgaattgcgtcatcgaggagatggtgggaatgggaggcacgaagacatggcccgcagtggaggtagaagaggtggaccacgcggtgaggatcgacgaggggatggccgtggaccaggtgacgagcatcgcaacgcgagaaagcgccagagtgacgagtatgggggaccacctgagaagcggccaagacgcacgggtcagtagtaatggcttgaagcgcttcaagctgctggaagaacgaaaatattcgatcgagaggaactcatggggcgaaacatctccttccagcgtgtaacatcaataaatcgactgagactgaaagggtggaaagccgatgttcaagtcctgatggcaaaccatgtttaattgcaaacttccatttcggtcgggggattttacggggcacagggaaagtctaaagaatttgttcaatcaatcatatccaatattcgaccggttcttaaaacaagcgtcacaagcattgcgcggcgttatcgcttttattacgaggtgctctttgcatttacaacactgagggtgttgccgaccaagtgcatcattattttcctaattacatgcgaacgaagacacgaacagccttatagcagtattgctttccggcggtgatagatgtatgagcttgtgaaacatagctggaaggtcggcgttaagatcttatatgtaaaaagacattgtgatacaattgtacatattgaggagatgttgtgtatatacattaagaaagaatagaagaggcttcatctatggatcttctaaacttggc

SEQ ID NO: 10618 - DNA, 1977 bp, Muscodor strobelii
  misc_feature: SGI cDNA ID NO. 563377
  misc_feature: Encodes the peptide sequence at SEQ ID NO 10619
atgtcgtccctcacacagtcgctatcgatgttgctcgtcggatttctttccataatatcagtggttgaggccgtcgatcccctcaaagtgccatggtcaagcatgacgtttggcccagatgggccgtggcctgcggtggaagtcaccatcggatctgatcaaatagtcgccatgtatccgggccgagaatttcagtcgttcgttctcacgagcgaatactgcagacacaatacctccgacggatgtgcggctacgagagctggagtttacaacgaggccgaatcgcagatagacaatacgggctcggcgggtcaaatccagtttgcaccaggtcccaactacatgtcgggtctcaatgtagcaggagacaatgcagtgtcatggatcgactatatggacgtcggaggcatgtctgtacccaacgtttcgatggcacttctttcgaatgcgtatgccgtctacccagacgagacgtggtatcctctttctgttggctgcttgggaataggcgcgccagggacagtcaaccagtctttttcgaccgatgggtattcaggcgacggtgccccgataaatgctagtttaattcctggcatattgaatgcggaggaccagattccctccaacagttttggcatgcacatcggctcagcaaatccgatcatgagtggttcgctctattttggaggctatgaccagaatcgcatcgtcggggacattttaagttataccgaccacataacgaaatctatcaatttgaaggatattggtattaaagtgatcgatggatcgtcgccttggagcttcgagaccaagtctgggctccttgctgcgaacaacgactccattccttctggcggtatcgaggtctccgtcgatggctgttcaccatatctaactctacccaagtcaacttgcgacgcaattgcggaagaactccccgtaacttacaacaaggcgcttggtctctacacctggaacactgacgacgcaaaatacagtcagatagtcagctcggcatctgctctacaattcactttcactgctggctctaacaccaagacggtcacaatcaatgtaccttttcctcacctcaacttgactttgacccagccactcgtcgacgaagacgtgcaatatttcccatgctacactggacctgccggtcaatacacgcttggtcgagcatttctacaagatgctttcattggagctcattggggaaataagaagtggtggctcgctcaagctcctggccctaatattcctagcgcgaacgtcatcactatcgagaaggcggacactgcagtccaagcaagcagcaatgactggaaagcctcatgggatggatcgtggaaggcattaacagcggatcagaccaccaattcatctactgttacccctgaaggctctaattcgaacagcggcaataatacaacgaattcatcatcgtcatcgggtttgtccactggggctaaagctggtatcggtgttggtgctggagtaggcgcacttgccattatcggcgccttggttttcttcttccttcggcgacgccgccaatcatccgaaaagggtgcagaaaccgcttcggacgaaacaccatacaatcctcaagcagctgctgcacctgctcatcccatgcacggcacgccccagcaaggctattatgcacctgtcaagaaccctggcgagacgtctcctgctatgtcgaatgcctattctcacagtcctcattcggtcaatgcagcaatgtacaaccaacaatatcctcagcaatatcctcaacaatacgccccctatccaccgcagcagcagtacagtgccgagctgacagcaattggcaacacacctcaagagttgcctgcttcagatatgtatggagcgcatggaacggcccactctccctatcctccaagtcatgaactacccaatcctaccccttcaggtcatgaattatcgggcgcggctcgttag

SEQ ID NO: 10619 - protein, 658 aa, Muscodor strobelii
  misc_feature: SGI Peptide ID NO. 563377
  misc_feature (45)..(417): Pfam Id: PF00026 Pfam Desc: Eukaryotic aspartyl protease
  misc_feature (15)..(460): NCBI GI: 261355446 Blast Desc: conserved [Verticillium albo-atrum VaMs.102]
  misc_feature (4)..(563): NCBI GI: 256729031 Blast Desc: NECHADRAFT_40333 [Nectria haematococca mpVI 77-13-4]
  misc_feature (27)..(530): NCBI GI: 46138885 Blast Desc: FG10957.1 [Gibberella zeae PH-1]
  misc_feature (24)..(527): NCBI GI: 145245229 Blast Desc: An11g09240 [Aspergillus niger] gi|134079578|emb|CAK97054.1| protein product [Aspergillus niger]
  misc_feature (8)..(563): NCBI GI: 159125200 Blast Desc: AFUB_066520 [Aspergillus fumigatus A1163]
  misc_feature (24)..(467): NCBI GI: 212529684 Blast Desc: conserved [Penicillium marneffei ATCC 18224] gi|210074397|gb|EEA28484.1| conserved [Penicillium marneffei ATCC 18224]
  misc_feature (6)..(464): NCBI GI: 115433018 Blast Desc: [Aspergillus terreus NIH2624] gi|114189498|gb|EAU31198.1| [Aspergillus terreus NIH2624]
  misc_feature (8)..(455): NCBI GI: 169771583 Blast Desc: [Aspergillus oryzae RIB40] gi|238485834|ref|XP_002374155.1| aspartic-type endopeptidase, [Aspergillus flavus NRRL3357] gi|83768120|dbj|BAE58259.1| protein
  misc_feature (10)..(521): NCBI GI: 240109643 Blast Desc: CPC735_031480 [Coccidioides posadasii C735 delta SOWgp]
  misc_feature (10)..(521): NCBI GI: 119183576 Blast Desc: CIMG_06704 [Coccidioides immitis RS]
MSSLTQSLSMLLVGFLSIISVVEAVDPLKVPWSSMTFGPDGPWPAVEVTIGSDQIVAMYPGREFQSFVLTSEYCRHNTSDGCAATRAGVYNEAESQIDNTGSAGQIQFAPGPNYMSGLNVAGDNAVSWIDYMDVGGMSVPNVSMALLSNAYAVYPDETWYPLSVGCLGIGAPGTVNQSFSTDGYSGDGAPINASLIPGILNAEDQIPSNSFGMHIGSANPIMSGSLYFGGYDQNRIVGDILSYTDHITKSINLKDIGIKVIDGSSPWSFETKSGLLAANNDSIPSGGIEVSVDGCSPYLTLPKSTCDAIAEELPVTYNKALGLYTWNTDDAKYSQIVSSASALQFTFTAGSNTKTVTINVPFPHLNLTLTQPLVDEDVQYFPCYTGPAGQYTLGRAFLQDAFIGAHWGNKKWWLAQAPGPNIPSANVITIEKADTAVQASSNDWKASWDGSWKALTADQTTNSSTVTPEGSNSNSGNNTTNSSSSSGLSTGAKAGIGVGAGVGALAIIGALVFFFLRRRRQSSEKGAETASDETPYNPQAAAAPAHPMHGTPQQGYYAPVKNPGETSPAMSNAYSHSPHSVNAAMYNQQYPQQYPQQYAPYPPQQQYSAELTAIGNTPQELPASDMYGAHGTAHSPYPPSHELPNPTPSGHELSGAAR

SEQ ID NO: 10620 - DNA, 2769 bp, Muscodor strobelii
  misc_feature: SGI EST ID NO. CUFF.25006.0
  misc_feature: Variant of the nucleotide sequence at SEQ ID NO 10618
cgagccacctcttttcgaggagaatcccctatcccgtcgctaaggctctgattgcaatcacagtgtgcttgaactgtatcacgattctgtgagctgtcccttgaggcttgcacacacgacatacgctagcggtacagtgtgtatgagagccaagagctacaagcctgagatagcccatatgagagagaggatcgtctcatgtgccgggggtgtctacttgtaatgtctcccatgtggatgtccccccgttgttttccctccagggctgctcgtggaacctccttcctactcgctcattctcaaattgtaaaacctgcgtctacctgctagccctatcttctgctctttttcaccggcagctaggtgattttgtaactcttgtaattcttgcgctgcgcgcgcctggttcgccgtcgaatcgagatatccgagatgtcgtccctcacacagtcgctatcgatgttgctcgtcggatttctttccataatatcagtggttgaggccgtcgatcccctcaaagtgccatggtcaagcatgacgtttggcccagatgggccgtggcctgcggtggaagtcaccatcggatctgatcaaatagtcgccatgtatccgggccgagaatttcagtcgttcgttctcacgagcgaatactgcagacacaatacctccgacggatgtgcggctacgagagctggagtttacaacgaggccgaatcgcagatagacaatacgggctcggcgggtcaaatccagtttgcaccaggtcccaactacatgtcgggtctcaatgtagcaggagacaatgcagtgtcatggatcgactatatggacgtcggaggcatgtctgtacccaacgtttcgatggcacttctttcgaatgcgtatgccgtctacccagacgagacgtggtatcctctttctgttggctgcttgggaataggcgcgccagggacagtcaaccagtctttttcgaccgatgggtattcaggcgacggtgccccgataaatgctagtttaattcctggcatattgaatgcggaggaccagattccctccaacagttttggcatgcacatcggctcagcaaatccgatcatgagtggttcgctctattttggaggctatgaccagaatcgcatcgtcggggacattttaagttataccgaccacataacgaaatctatcaatttgaaggatattggtattaaagtgatcgatggatcgtcgccttggagcttcgagaccaagtctgggctccttgctgcgaacaacgactccattccttctggcggtatcgaggtctccgtcgatggctgttcaccatatctaactctacccaagtcaacttgcgacgcaattgcggaagaactccccgtaacttacaacaaggcgcttggtctctacacctggaacactgacgacgcaaaatacagtcagatagtcagctcggcatctgctctacaattcactttcactgctggctctaacaccaagacggtcacaatcaatgtaccttttcctcacctcaacttgactttgacccagccactcgtcgacgaagacgtgcaatatttcccatgctacactggacctgccggtcaatacacgcttggtcgagcatttctacaagatgctttcattggagctcattggggaaataagaagtggtggctcgctcaagctcctggccctaatattcctagcgcgaacgtcatcactatcgagaaggcggacactgcagtccaagcaagcagcaatgactggaaagcctcatgggatggatcgtggaaggcattaacagcggatcagaccaccaattcatctactgttacccctgaaggctctaattcgaacagcggcaataatacaacgaattcatcatcgtcatcgggtttgtccactggggctaaagctggtatcggtgttggtgctggagtaggcgcacttgccattatcggcgccttggttttcttcttccttcggcgacgccgccaatcatccgaaaagggtgcagaaaccgcttcggacgaaacaccatacaatcctcaagcagctgctgcacctgctcatcccatgcacggcacgccccagcaaggctattatgcacctgtcaagaaccctggcgagacgtctcctgctatgtcgaatgcctattctcacagtcctcattcggtcaatgcagcaatgtacaaccaacaatatcctcagcaatatcctcaacaatacgccccctatccaccgcagcagcagtacagtgccgagctgacagcaattggcaacacacctcaagagttgcctgcttcagatatgtatggagcgcatggaacggcccactctccctatcctccaagtcatgaactacccaatcctaccccttcaggtcatgaattatcgggcgcggctcgttagaaagatatttaactgctaaaatgtactctgaatttggaaaacgggctcatgtggttggattcaatagcgggcgttttggctgattgtttgggcaaattaacttagacatagcatttactcacatatacatcttttttataatgtgttcaaaaactcccactccacccaatactgtccatgcgaagtaaggagcgggatataacaatcacaatctcgatttaggaattgtacaatacatgagtgatttgtttacatagaacacaatacatgaacaacttctctcacctggatgaaaccatatggcccaggtttgagacggattgccaatatgccgttcataatccatgatcaaactaggta

SEQ ID NO: 10621 - DNA, 1140 bp, Muscodor strobelii
  misc_feature: SGI cDNA ID NO. 563378
  misc_feature: Encodes the peptide sequence at SEQ ID NO 10622
atggcacctaacgcctctgctaccggcgacgccgactcacatctaaagcccagcttgggacagatactatcatccaagcgcgtgcgatatgctgccttcgctctcgctgccttcgggctcttctctttagccttccgaaactacgatcagctctcgtctatgcgcccctacggtggcagtctcggtggcacctccttgtctaccgataatcagaattgcccgcctgctatcgtaccgtccttcgaggaggcatccatcaactggggtcgatatgcctacactcaatatgtgaccaacgccgcctatctctgcaactcggtcatgatcttcgagaccctatttcggctaaaggccaaagccgaccgcgtcatgatgtatcccgacagcatgatggatcctgccgagaccgatcccaaatccaatgacgccaagttgcttgtaaaagcccgagatcaatataaggtgaaattggtaccagtgtccgtccagaggaggaacggaggagatgccacttgggccgagtccttcaccaaactgctggctttcaaccaaactcagtatcaacgtgttctcaacgtggattctgatgcaactatcctgcagcctatggatgagctcttcctcatgcccccgtgtccagttgccatgcctcgagcgtactggctcttccctgataacaagatcctgtcgtcacagttgatgcttgtgcaacccagcgcagtcgaatttgaccggattatgaagcaggtcgagggttctgggcgagatgactacgacatggagatcgtcaaccagctctatgccgacagtgccatgattctccctcatcgaccttacgacctcttaactggtgagttccgtggcgataagcacgaaaaatacctggggacagatcgtgaagagtgggaccccgtggcagtcttcaacgaagccaagtaccttcatttctcagattggccggtgcctaagccgtggatttccatggccgagaccatgcgcacagccaaccagcctgcctgccaaacaaggaacggacaagaagactgcaccgagagagagctatggaatggcttttacaaggatttcacagacaggcgctccaccgtttgtaacacagcgaagcccaagtccaggagatga

SEQ ID NO: 10622 - protein, 379 aa, Muscodor strobelii
  misc_feature: SGI Peptide ID NO. 563378
  misc_feature (17)..(366): NCBI GI: 261355447 Blast Desc: glucose N-acetyltransferase [Verticillium albo-atrum VaMs.102]
  misc_feature (15)..(371): NCBI GI: 171677476 Blast Desc: protein product [Podospora anserina] gi|170936806|emb|CAP61464.1| protein product [Podospora anserina]
  misc_feature (86)..(379): NCBI GI: 256729046 Blast Desc: NECHADRAFT_79931 [Nectria haematococca mpVI 77-13-4]
  misc_feature (114)..(371): NCBI GI: 116201135 Blast Desc: CHGG_08452 [Chaetomium globosum CBS 148.51] gi|88176970|gb|EAQ84438.1| CHGG_08452 [Chaetomium globosum CBS 148.51]
  misc_feature (88)..(349): NCBI GI: 46138843 Blast Desc: FG10936.1 [Gibberella zeae PH-1] gi|81170630|sp|Q4HVS2.1|GNT1_GIBZE RecName: Full=Glucose N-acetyltransferase 1; AltName:
  misc_feature (86)..(373): NCBI GI: 145245431 Blast Desc: An11g10260 [Aspergillus niger] gi|134079683|emb|CAK97109.1| protein product [Aspergillus niger]
  misc_feature (137)..(378): NCBI GI: 256728855 Blast Desc: NECHADRAFT_39806 [Nectria haematococca mpVI 77-13-4]
  misc_feature (86)..(373): NCBI GI: 255948882 Blast Desc: Pc22g12650 [Penicillium chrysogenum Wisconsin 54-1255] gi|211592225|emb|CAP98553.1| Pc22g12650 [Penicillium chrysogenum Wisconsin 54-1255]
  misc_feature (75)..(372): NCBI GI: 240111715 Blast Desc: CPC735_011780 [Coccidioides posadasii C735 delta SOWgp]
  misc_feature (75)..(372): NCBI GI: 119172958 Blast Desc: CIMG_10029 [Coccidioides immitis RS]
MAPNASATGDADSHLKPSLGQILSSKRVRYAAFALAAFGLFSLAFRNYDQLSSMRPYGGSLGGTSLSTDNQNCPPAIVPSFEEASINWGRYAYTQYVTNAAYLCNSVMIFETLFRLKAKADRVMMYPDSMMDPAETDPKSNDAKLLVKARDQYKVKLVPVSVQRRNGGDATWAESFTKLLAFNQTQYQRVLNVDSDATILQPMDELFLMPPCPVAMPRAYWLFPDNKILSSQLMLVQPSAVEFDRIMKQVEGSGRDDYDMEIVNQLYADSAMILPHRPYDLLTGEFRGDKHEKYLGTDREEWDPVAVFNEAKYLHFSDWPVPKPWISMAETMRTANQPACQTRNGQEDCTERELWNGFYKDFTDRRSTVCNTAKPKSRR

SEQ ID NO: 10623 - DNA, 1870 bp, Muscodor strobelii
  misc_feature: SGI EST ID NO. CUFF.25017.0
  misc_feature: Variant of the nucleotide sequence at SEQ ID NO 10621
cgcgacacaagaatctggttccacgcactgtgtctccttgtctgtccccagactttgtggatgcctacaagagcagcggaagcctctttgccaagctggcctatagatatcgatcgcaacgcatttacctgtgtcgcttcgccctactggttggttggcgctgtctttaacgacggcttccaatattctgaacgtttgctgctcaattgccttatagtcctcgcatcaaaagtttgcattctcaataccacggacctgtcctctttctttgctgtcaccccaaccaccacccgatgctgcgtggtgcaacggccgactcgtactgactttgtcagcccatcgtcatcgaactgccacatccaacgccagcttctggcgctgtcgtcggtatttgcatttcctcatctgagtttgcaacccctgggcgtctccggcttcattagtgggattccaggactgcgcgacgacgacagtagaccacaatggcacctaacgcctctgctaccggcgacgccgactcacatctaaagcccagcttgggacagatactatcatccaagcgcgtgcgatatgctgccttcgctctcgctgccttcgggctcttctctttagccttccgaaactacgatcagctctcgtctatgcgcccctacggtggcagtctcggtggcacctccttgtctaccgataatcagaattgcccgcctgctatcgtaccgtccttcgaggaggcatccatcaactggggtcgatatgcctacactcaatatgtgaccaacgccgcctatctctgcaactcggtcatgatcttcgagaccctatttcggctaaaggccaaagccgaccgcgtcatgatgtatcccgacagcatgatggatcctgccgagaccgatcccaaatccaatgacgccaagttgcttgtaaaagcccgagatcaatataaggtgaaattggtaccagtgtccgtccagaggaggaacggaggagatgccacttgggccgagtccttcaccaaactgctggctttcaaccaaactcagtatcaacgtgttctcaacgtggattctgatgcaactatcctgcagcctatggatgagctcttcctcatgcccccgtgtccagttgccatgcctcgagcgtactggctcttccctgataacaagatcctgtcgtcacagttgatgcttgtgcaacccagcgcagtcgaatttgaccggattatgaagcaggtcgagggttctgggcgagatgactacgacatggagatcgtcaaccagctctatgccgacagtgccatgattctccctcatcgaccttacgacctcttaactggtgagttccgtggcgataagcacgaaaaatacctggggacagatcgtgaagagtgggaccccgtggcagtcttcaacgaagccaagtaccttcatttctcagattggccggtgcctaagccgtggatttccatggccgagaccatgcgcacagccaaccagcctgcctgccaaacaaggaacggacaagaagactgcaccgagagagagctatggaatggcttttacaaggatttcacagacaggcgctccaccgtttgtaacacagcgaagcccaagtccaggagatgattggagttggtgttgtatttataacttggacataaactgcccacgtgagccttggctttgaccggctctacctgtattttacgtttcacgacaggacatacgacatgattatcagggcgactctatatatatatactgcgttgaatgcgaaaaggaaaggttctaacttctttccgccctgcatcttctctaatgatcatttagaattgcgattcaaaatttgagattttatacaatgactacccatg

SEQ ID NO: 10624 - DNA, 1617 bp, Muscodor strobelii
  misc_feature: SGI cDNA ID NO. 563379
  misc_feature: Encodes the peptide sequence at SEQ ID NO 10625
atgaggttgtccaacctctttaccgtcgctttggcgacgaatgctgtcgttgccagcagctggttcagcaaagcagcctacaacaaatggcacgagaacgagctcgagcgctggctgtcagataatgacattccctaccccactccggcggaccgtaaggacctggagaatctgatccagaagaactgggagacgtatgcagttgcgccttacaagtcttgggacaccgataagctcgctgcctacttgaaggccaagggtgttgagaccaagggcactgccgaggccaacaaggacactctcgtctctcaagttcaggctcagtggtacgagactgaggacaaggctcaggccgcctggtccaacaccaaggactggattctcgacacctggaccgagagcactctcaagtccttcgctgacaagcacggcattcccgtccctcaacctcgtgcacgtgacactctcctccaaaaggtgcgctccaactacgagagcgttgccaagaaggccggagaggttacatcataccctgggaactggttgtacgaaacctggtccgagtcagacttgaaagagtggctcgacactcatggcttcccgaacccccaacctactggtcgcgacaagctcattgcttcggtccgccgcaattctcgcatcgcttacttgaaatctcaagaacagcttgcctctgcagctgcaagtgccaatgctgcctatgccactcttaccgacaaggttattgatgcatggagcgagtctcaactcaaggaattctgtgacaagaactcgatcaatgtccctcaaggcaccaagacgaatgagttgcgtgcacttgttcgcaagcaccgcgctgagctactaggcgacactgtctcgggtactgccgtcagtgcctttggagctgctaccagcaaggccggtaacgagtttgcaaaggccaccaacgatgccagtctcgcggcccaggaagcctttaacgaggccgttggaacatggtccgacagtcgcctcaagggctatcttgacgctcgcggcgttccagtgcctcaagcatccaaaaccgacgaactccgtgccttagtccgaaagaatgctcacaaggccgcttctggcttcactgcatggacgtgggacgatctttctctcgagaatctgaagaactatctcatcaacacaggtgattccaccgccaagaaggtcggtgaaagtgcgtctgccacccgtgaggatctcgtcgacgctgctcagtctgcctatgcttctgcatcaagcgccggtggtggttcctacgcctcggccacaagttacttggctcaagctacccagtccgctaaggataccgtcttcgatacctggagcgaaagtgagctgaagtcgtatctggatagctatggtgtgcctgtccctcagggctcgactttaaacgagctgaaggctgaggcccgcaagcaatcgacgtatttcaaatacggcaccaccaaccccgtagatacggcctttgccaaactcagtgaaagcgttaagggtgcttatcaatgggttgctagccagcttggtgctggatccgaggaagcaaagaagaaagcccagaacgtcaagaatgaattgtaa

SEQ ID NO: 10625 - protein, 538 aa, Muscodor strobelii
  misc_feature: SGI Peptide ID NO. 563379
  misc_feature (1)..(531): NCBI GI: 261352872 Blast Desc: conserved [Verticillium albo-atrum VaMs.102]
  misc_feature (1)..(532): NCBI GI: 171690954 Blast Desc: protein product [Podospora anserina] gi|170945425|emb|CAP71537.1| protein product [Podospora anserina]
  misc_feature (1)..(528): NCBI GI: 46140175 Blast Desc: FG11602.1 [Gibberella zeae PH-1]
  misc_feature (1)..(531): NCBI GI: 85085366 Blast Desc: NCU04415 [Neurospora crassa OR74A] gi|28918584|gb|EAA28256.1| conserved [Neurospora crassa OR74A] gi|40882205|emb|CAF06031.1| related to brefeldin A resistance
  misc_feature (1)..(523): NCBI GI: 39940152 Blast Desc: MGG_05164 [Magnaporthe grisea 70-15] gi|145010574|gb|EDJ95230.1| MGG_05164 [Magnaporthe grisea 70-15]
  misc_feature (1)..(531): NCBI GI: 256721981 Blast Desc: [Nectria haematococca mpVI 77-13-4]
  misc_feature (3)..(531): NCBI GI: 156053195 Blast Desc: SS1G_06765 [Sclerotinia sclerotiorum 1980] gi|154704543|gb|EDO04282.1| SS1G_06765 [Sclerotinia sclerotiorum 1980]
  misc_feature (3)..(531): NCBI GI: 154318215 Blast Desc: BC1G_03275 [Botryotinia fuckeliana B05.10] gi|150842798|gb|EDN17991.1| BC1G_03275 [Botryotinia fuckeliana B05.10]
  misc_feature (1)..(532): NCBI GI: 121705580 Blast Desc: stress response protein (Ish1), [Aspergillus clavatus NRRL 1] gi|119399199|gb|EAW09627.1| stress response protein (Ish1), [Aspergillus clavatus NRRL 1]
  misc_feature (1)..(532): NCBI GI: 119491831 Blast Desc: stress response protein (Ish1), [Neosartorya fischeri NRRL 181] gi|119411570|gb|EAW21513.1| stress response protein (Ish1), [Neosartorya fischeri NRRL 181]
MRLSNLFTVALATNAVVASSWFSKAAYNKWHENELERWLSDNDIPYPTPADRKDLENLIQKNWETYAVAPYKSWDTDKLAAYLKAKGVETKGTAEANKDTLVSQVQAQWYETEDKAQAAWSNTKDWILDTWTESTLKSFADKHGIPVPQPRARDTLLQKVRSNYESVAKKAGEVTSYPGNWLYETWSESDLKEWLDTHGFPNPQPTGRDKLIASVRRNSRIAYLKSQEQLASAAASANAAYATLTDKVIDAWSESQLKEFCDKNSINVPQGTKTNELRALVRKHRAELLGDTVSGTAVSAFGAATSKAGNEFAKATNDASLAAQEAFNEAVGTWSDSRLKGYLDARGVPVPQASKTDELRALVRKNAHKAASGFTAWTWDDLSLENLKNYLINTGDSTAKKVGESASATREDLVDAAQSAYASASSAGGGSYASATSYLAQATQSAKDTVFDTWSESELKSYLDSYGVPVPQGSTLNELKAEARKQSTYFKYGTTNPVDTAFAKLSESVKGAYQWVASQLGAGSEEAKKKAQNVKNEL

SEQ ID NO: 10626 - DNA, 2308 bp, Muscodor strobelii
  misc_feature: SGI EST ID NO. CUFF.25029.0
  misc_feature: Variant of the nucleotide sequence at SEQ ID NO 10624
cccaaagctgcccttcccacacgctattgccaactgcctggcgagcctggaacagcccgcatctgtatcaggactaggtagcagccccgattgtcgtctccctgcgagacccagctgacgtaggttcaacaaaaccatcctcatccctcgtcacgcacatcttgttcccccatttctctcctcaatacatcccttcctctactcataccctacctttcccatccatcctcgactactgcgagctcaccagtgcatcgcacacatctgtagactacgtagactacgtcgacatcgacatctgaacacttgcacaatacttgggttggtcgtcacgcagaccccgccgtcatgaggttgtccaacctctttaccgtcgctttggcgacgaatgctgtcgttgccagcagctggttcagcaaagcagcctacaacaaatggcacgagaacgagctcgagcgctggctgtcagataatgacattccctaccccactccggcggaccgtaaggacctggagaatctgatccagaagaactgggagacgtatgcagttgcgccttacaagtcttgggacaccgataagctcgctgcctacttgaaggccaagggtgttgagaccaagggcactgccgaggccaacaaggacactctcgtctctcaagttcaggctcagtggtacgagactgaggacaaggctcaggccgcctggtccaacaccaaggactggattctcgacacctggaccgagagcactctcaagtccttcgctgacaagcacggcattcccgtccctcaacctcgtgcacgtgacactctcctccaaaaggtgcgctccaactacgagagcgttgccaagaaggccggagaggttacatcataccctgggaactggttgtacgaaacctggtccgagtcagacttgaaagagtggctcgacactcatggcttcccgaacccccaacctactggtcgcgacaagctcattgcttcggtccgccgcaattctcgcatcgcttacttgaaatctcaagaacagcttgcctctgcagctgcaagtgccaatgctgcctatgccactcttaccgacaaggttattgatgcatggagcgagtctcaactcaaggaattctgtgacaagaactcgatcaatgtccctcaaggcaccaagacgaatgagttgcgtgcacttgttcgcaagcaccgcgctgagctactaggcgacactgtctcgggtactgccgtcagtgcctttggagctgctaccagcaaggccggtaacgagtttgcaaaggccaccaacgatgccagtctcgcggcccaggaagcctttaacgaggccgttggaacatggtccgacagtcgcctcaagggctatcttgacgctcgcggcgttccagtgcctcaagcatccaaaaccgacgaactccgtgccttagtccgaaagaatgctcacaaggccgcttctggcttcactgcatggacgtgggacgatctttctctcgagaatctgaagaactatctcatcaacacaggtgattccaccgccaagaaggtcggtgaaagtgcgtctgccacccgtgaggatctcgtcgacgctgctcagtctgcctatgcttctgcatcaagcgccggtggtggttcctacgcctcggccacaagttacttggctcaagctacccagtccgctaaggataccgtcttcgatacctggagcgaaagtgagctgaagtcgtatctggatagctatggtgtgcctgtccctcagggctcgactttaaacgagctgaaggctgaggcccgcaagcaatcgacgtatttcaaatacggcaccaccaaccccgtagatacggcctttgccaaactcagtgaaagcgttaagggtgcttatcaatgggttgctagccagcttggtgctggatccgaggaagcaaagaagaaagcccagaacgtcaagaatgaattgtaagatttcgcagcgaactgaaaagtacgcaatggtcgctgcataatcgctgcataatttttcacgaggatacgacgagtaaatgatggaccggtttactgccatggcaaaaagttgtctgtttctttgatttaatacgcaatggtgtacggtcagggtctcttttgctttgcacggtttgaccgtcggacatgtactatgaatgacagatccacgaagggatttcggacgagggcggcttggcgtttgcaaagcactccgaaatatagctagttttgagaaaatgaacttgtgttcacagaactacttgtgttgcaaatgcgtgaccatatcggaagtatctgcg

SEQ ID NO: 10627 - DNA, 1911 bp, Muscodor strobelii
  misc_feature: SGI cDNA ID NO. 563380
  misc_feature: Encodes the peptide sequence at SEQ ID NO 10628
atgaagtcaacttcgctcgcactccttgccggcgcctctatgctggccaatgcccatcctgctgataggaatgctggcaaggccgtccaccgtcgtgccatggatattacatctcataagatgcagacctcgtcctcttatgtcaacagccacgccgcgaagagcgactcatccttgactctgttaaagcgatcaacctacgttgagactgctaccgctgtcgtcaacaagattgctcctaacgccgagttccgggttaagagtgaccactacgtcggtaaaaacggcgttgctcatgtctacttcaagcaaaccgtgaacggccttgacgttggcaacgctgacttcaacgtcaacatcaacgtcgatggctctgtcatgtcttacggacacagtttctacacaggcaaggcaccctccagccctctccagaagagagagttttcggacccgatgacggcgctcaggggagcaatgactgagctgaagttgcccatttccatgaccaaagacgtaactgttgaggaccttgaggactttgaggcatataccatcaagggtatcacgggggctgtcaaagacccgactgctcgtttgatgtacgtcgtcaagccagatggagatttggcactaagttggaaggtggagaccaaccttcgcacgagctggcttcattcgtatgtcgacgctgctgatagcagcaagatccacggcgtgatcgactgggtttgggctgctacttataaggtctacccatgggaagtcgatagccccgaaactggggcgcgtacggtcgtcaccgacccatgggagattgctgcctctcctttcacttgggagtccgatggaacgacaaactacaccacaacccgaggtaacaacggtctcgcagagcaagactggtatggcagtggagaatctatcgacggttatgcgcctgagagcgacgatcttaagttcgaatacgaggtcgaccactctgccagagatcctaatacataccgtgatgcctctatcacccaacaattctacactgccaatttctatcacgacgtcctgtacgaccttggatttgacgaggcggccggaaacttccagatggagaacggcgataagggaggcaaagatggcgactatgtcatcttatccgcacaggattcgtttactaccaataacgccttcttcactcctcccgtcgacggagagaatggcatcatgcagatgttcctttggactaccgccaaccccgtgcgagactgcacattcgagaaggatgtcgttgtccacgagtacacacacggtctctccacccgtctaaccggtggccccgataactcggactgcctttctaacggcgaggctgccggtatgggtgaaggctggagcgacttcttcgcgctggccaacagcgtcaagtcaaacatgaccggcaaggaccatactgtgatcggagcatgggttgccaatgaccccgagggaatccgaactgttccttacactaccgatatgactgccaaccctaacacctacgagactctaaatggtcttagcgaggagcacgacatcggtgagacatgggccacaacgctttgggaagtgctgtgggctctggttgagaagtacggcaagaacaagggacctaagcccgtctttggtgacgatggcgtccccgtcgatggtgttttcttggctcagaagcttaccatggatggcatggctctccaaccttgcaaccctacctttgtctcggctcgtgatggtatcgttgatgccgacatggctttgactggcggtgccaacttgtgcgagctctggaccgcctttgctaagcgtggtctcggcgttgatgctgcgtttattgatgatacccacagaactgtcagcttcgatctgcccgatggtgtgtgctag

SEQ ID NO: 10628 - protein, 636 aa, Muscodor strobelii
  misc_feature: SGI Peptide ID NO. 563380
  misc_feature (83)..(134): Pfam Id: PF07504 Pfam Desc: Fungalysin/Thermolysin Propeptide Motif
  misc_feature (246)..(636): Pfam Id: PF02128 Pfam Desc: Fungalysin metallopeptidase (M36)
  misc_feature (28)..(633): NCBI GI: 119182038 Blast Desc: CIMG_06073 [Coccidioides immitis RS]
  misc_feature (28)..(633): NCBI GI: 66363476 Blast Desc: metalloproteinase 10 [Coccidioides posadasii] gi|240109138|gb|EER27307.1| Extracellular elastinolytic metalloproteinase precursor, [Coccidioides posadasii C735 delta
  misc_feature (18)..(636): NCBI GI: 119485809 Blast Desc: elastinolytic metalloproteinase Mep [Neosartorya fischeri NRRL 181] gi|119410403|gb|EAW20350.1| elastinolytic metalloproteinase Mep [Neosartorya fischeri NRRL 181]
  misc_feature (18)..(636): NCBI GI: 169782538 Blast Desc: [Aspergillus oryzae RIB40] gi|83774475|dbj|BAE64598.1| protein product [Aspergillus oryzae]
  misc_feature (3)..(636): NCBI GI: 145603594 Blast Desc: MGG_13250 [Magnaporthe grisea 70-15] gi|145603598|ref|XP_001404702.1| MGG_13252 [Magnaporthe grisea 70-15] gi|145011804|gb|EDJ96460.1| MGG_13250 [Magnaporthe grisea
  misc_feature (18)..(636): NCBI GI: 238492159 Blast Desc: elastinolytic metalloproteinase Mep [Aspergillus flavus NRRL3357] gi|220695810|gb|EED52152.1| elastinolytic metalloproteinase Mep [Aspergillus flavus NRRL3357]
  misc_feature (18)..(636): NCBI GI: 6165646 Blast Desc: AF099904_1 neutral protease I [Aspergillus oryzae]
  misc_feature (18)..(635): NCBI GI: 169615080 Blast Desc: SNOG_10695 [Phaeosphaeria nodorum SN15] gi|160702883|gb|EAT82089.2| SNOG_10695 [Phaeosphaeria nodorum SN15]
  misc_feature (18)..(636): NCBI GI: 70983961 Blast Desc: elastinolytic metalloproteinase Mep [Aspergillus fumigatus Af293] gi|85541646|sp|P46075.3|ELM_ASPFU RecName: Full=Extracellular elastinolytic metalloproteinase; Flags: Mep
  misc_feature (18)..(636): NCBI GI: 3776613 Blast Desc: metalloprotease (MEP) [Aspergillus fumigatus]
MKSTSLALLAGASMLANAHPADRNAGKAVHRRAMDITSHKMQTSSSYVNSHAAKSDSSLTLLKRSTYVETATAVVNKIAPNAEFRVKSDHYVGKNGVAHVYFKQTVNGLDVGNADFNVNINVDGSVMSYGHSFYTGKAPSSPLQKREFSDPMTALRGAMTELKLPISMTKDVTVEDLEDFEAYTIKGITGAVKDPTARLMYVVKPDGDLALSWKVETNLRTSWLHSYVDAADSSKIHGVIDWVWAATYKVYPWEVDSPETGARTVVTDPWEIAASPFTWESDGTTNYTTTRGNNGLAEQDWYGSGESIDGYAPESDDLKFEYEVDHSARDPNTYRDASITQQFYTANFYHDVLYDLGFDEAAGNFQMENGDKGGKDGDYVILSAQDSFTTNNAFFTPPVDGENGIMQMFLWTTANPVRDCTFEKDVVVHEYTHGLSTRLTGGPDNSDCLSNGEAAGMGEGWSDFFALANSVKSNMTGKDHTVIGAWVANDPEGIRTVPYTTDMTANPNTYETLNGLSEEHDIGETWATTLWEVLWALVEKYGKNKGPKPVFGDDGVPVDGVFLAQKLTMDGMALQPCNPTFVSARDGIVDADMALTGGANLCELWTAFAKRGLGVDAAFIDDTHRTVSFDLPDGVC

SEQ ID NO: 10629 - DNA, 982 bp, Muscodor strobelii
  misc_feature: SGI EST ID NO. CUFF.25044.0
  misc_feature: Variant of the nucleotide sequence at SEQ ID NO 10627
ggcggccggaaacttccagatggagaacggcgataagggaggcaaagatggcgactatgtcatcttatccgcacaggattcgtttactaccaataacgccttcttcactcctcccgtcgacggagagaatggcatcatgcagatgttcctttggactaccgccaaccccgtgcgagactgcacattcgagaaggatgtcgttgtccacgagtacacacacggtctctccacccgtctaaccggtggccccgataactcggactgcctttctaacggcgaggctgccggtatgggtgaaggctggagcgacttcttcgcgctggccaacagcgtcaagtcaaacatgaccggcaaggaccatactgtgatcggagcatgggttgccaatgaccccgagggaatccgaactgttccttacactaccgatatgactgccaaccctaacacctacgagactctaaatggtcttagcgaggagcacgacatcggtgagacatgggccacaacgctttgggaagtgctgtgggctctggttgagaagtacggcaagaacaagggacctaagcccgtctttggtgacgatggcgtccccgtcgatggtgttttcttggctcagaagcttaccatggatggcatggctctccaaccttgcaaccctacctttgtctcggctcgtgatggtatcgttgatgccgacatggctttgactggcggtgccaacttgtgcgagctctggaccgcctttgctaagcgtggtctcggcgttgatgctgcgtttattgatgatacccacagaactgtcagcttcgatctgcccgatggtgtgtgctagatgtatggcgggtttattgtatatgattgagatgagatgatgggcttgtaaataatttttgcatattaccaggctggatggaaatgtgtggattgcatggtggggtgttttgttctatacttactctaaatgagcaatgttatgatgatg

SEQ ID NO: 10630 - DNA, 903 bp, Muscodor strobelii
  misc_feature: SGI cDNA ID NO. 563381
  misc_feature: Encodes the peptide sequence at SEQ ID NO 10631
atgtgtcggccaacgagaggcccaccagcgatagagatcttaccgatccccaaaacaaaaggggtagaccctattgatagatggcgctggatatggtcaaagctatttccgtccatgaagcctccggatagtccatggtttgatgaaaacgaccggcggaaacaaatcatcctatcaaccataaatgcggtcaaagaggacgagtcaagtttacagtcattggagcaacaactcatttttcaagtcgacctcgttaacaggtgggcgctcaacccacctgaacaccttccagatctcgttcgagggcatactcaacgtaatgagagacgacccaaaattgcgaatcagccgggagattcagtaaatttcgcccctgcattatttgagagtctcccagatccccagcctaggcctgtccatggctcatctgaacgaatagaatggaatgactcggcaggcggccccccttctttgaacacacaaggctcttactctttaaatcctgaaaatgattttgccaacacagatccttcgccaggtccgctttcagcggaggccagagctatcgatagagacctgcgcgatgactcagatgctgattatcatatatctgttgaagacactttggggatcatagcttttgacaacgccagatggatttctatgcctgaagatgacctgttcagagcggtaaatcctagtgatatggattttccaacattattgaatggagatgaccctacgtcgttctacaggattgaaaatttcgagtcgcaatttgaaacgcttttcggagtcatggatcccatccagcgaggggaggaggcgctcggtgcgggggctacgagttttgagccaagacagtcaggatatgacaactacgatttggatttcctggggtag

SEQ ID NO: 10631 - protein, 300 aa, Muscodor strobelii
  misc_feature: SGI Peptide ID NO. 563381
MCRPTRGPPAIEILPIPKTKGVDPIDRWRWIWSKLFPSMKPPDSPWFDENDRRKQIILSTINAVKEDESSLQSLEQQLIFQVDLVNRWALNPPEHLPDLVRGHTQRNERRPKIANQPGDSVNFAPALFESLPDPQPRPVHGSSERIEWNDSAGGPPSLNTQGSYSLNPENDFANTDPSPGPLSAEARAIDRDLRDDSDADYHISVEDTLGIIAFDNARWISMPEDDLFRAVNPSDMDFPTLLNGDDPTSFYRIENFESQFETLFGVMDPIQRGEEALGAGATSFEPRQSGYDNYDLDFLG

SEQ ID NO: 10632 - DNA, 1543 bp, Muscodor strobelii
  misc_feature: SGI EST ID NO. CUFF.25053.0
  misc_feature: Variant of the nucleotide sequence at SEQ ID NO 10630
aaatcctagtgatatggattttccaacattattgaatggagatgaccctacgtcgttctacaggattgaaaatttcgagtcgcaatttgaaacgcttttcggagtcatggatcccatccagcgaggggaggaggcgctcggtgcgggggctacgagttttgagccaagacagtcaggatatgacaactacgatttggatttcctggggtaggcagagacgtatggtgaataggtgatttcctcatcagcaaggtacacgttgggcaacgattggaataaaatgactttttcgtcatgccgtcattactacaaacgatgactcataagaacaggaaccatacacatcagaagaggttattcggcatatttgaagttaatcacaaacttgacaaatggtactgcagcaaagaaataggttcaaaagtcgtctcgacatttagcctagaaatcgacgaggcggtagatcttccgattatttgatgttcatacctaaggatcttgacggtggttttaataagagcgacatctgtgctctggcactgcccgatatgcagcattgcaggcagacacgcgcgcctttaaccagcactttctatcttcgcgattaaacactcagaaaaacttgacgaagcttgttacattggtcgagctgaaatggggaagcacatcgtcaaccatttcgtcagctggagcacctttcccctgcactactattatctaccagcgccataggcataagaagagcaatcttggtggaaatggcagatgtaacggcgaacacgcttcgtgtcgtgatagcgccttgtccaagcactacgtgacgcagtcgtcaaggagaaaaaacttactcaaatctaggggacgagcgaagcatactggacagcacattaatcaacaactgcaactagcaactctaagagaagtctcaatgtagacacgaaattgccacaagattagagttagtttattcaagagatatcgtggacctctttgcgattgtagaagctacgtacaaggtggccatttgcagatatgacagcttaacagggtgaggaacaataacgccaaaggcaaaccaactctgcaaggcgctaaagaatatattgacctaaataactctaagtcgggctgcagtctgcgccgaagcccgaaattttcgcgtacatgacccttgaaagcggccaagcaaagcgcacaactggccgcctggttgtgaaacgccatctcaacgcggtacgagccgggagactacgcgtgtaagaagtagactgagtagcagtcaggcaatagagattgtacgaattaattatggttgctcagtagcgtcagcagattgttgcactacgaaagagtatactggcggccctgttgttgatatttggacgccccgaatctagaatctgatgcccatcaatcttaaacacactatcgaggttagccaggcatacaaaaggtcaaatgatccgccatctcgatcttcaagacgataatgcatggtgcagaatctggtgaaagttgaagtgctcgatacgctggtttctta

SEQ ID NO: 10633 - DNA, 834 bp, Muscodor strobelii
  misc_feature: SGI cDNA ID NO. 563382
  misc_feature: Elevated expression when VOC is produced
  misc_feature: Encodes the peptide sequence at SEQ ID NO 10634
atggcggaaacaaaccaaacagacccctccttcaactcgatacggtatttgccaacaaacgaggcctacgacaaatgggctgaagtctacgacaccgacggcaacttcctgcaagcaatggatgacgtggaactgaagatcttgtttccacgttttctagactcaatcaccacgcctaaaccttggcgaattgtagatcttgggtgtgggactggcaggaacactgcattgctgctcggaatcccagacgcagaaatagtggcgctagattcaagcaagggaatgcttgaagtagcaagaagccgacttgcgccatcttcagggcagacctctaattcaaatacggccggaaacgacacctcaccaactcagcccaatcttcgcttcgagatctttgatatgttggcatccaaatcaccgccagactcaatcaagccaaacacagtagacgcgattatcagcacattagtggtggaacacattcctcttgcaacattcttcgaacatgtttcgaagctccttcgtccgggtggggtcctattactgactaatatgcactctgaaatgggaggtatttcgcaagctgggtttgtggataagtctacaggcgagaaaattcggccaacgagcaacgcgcacaccatggacgatgtgatgcttgaggcgagcaaaattgggctcgaggtcttacgtgaagggaaggaacagggactaatagagagagcagtagacaaagatatggtcagaaagttgggtttacgcagcaagaagtgggttggtgttgcatgctggtttggagggttgttcaggcttaccaatgcaactgctcagtga

SEQ ID NO: 10634 - protein, 277 aa, Muscodor strobelii
  misc_feature: SGI Peptide ID NO. 563382
  misc_feature (65)..(182): Pfam Id: PF08241 Pfam Desc: Methyltransferase domain
  misc_feature (65)..(180): Pfam Id: PF08242 Pfam Desc: Methyltransferase domain
  misc_feature (65)..(104): Pfam Id: PF08242 Pfam Desc: Methyltransferase domain
  misc_feature (126)..(180): Pfam Id: PF08242 Pfam Desc: Methyltransferase domain
  misc_feature (10)..(269): NCBI GI: 145608084 Blast Desc: MGG_03391 [Magnaporthe grisea 70-15] gi|145015592|gb|EDK00082.1| MGG_03391 [Magnaporthe grisea 70-15]
  misc_feature (7)..(270): NCBI GI: 169763332 Blast Desc: [Aspergillus oryzae RIB40] gi|83770594|dbj|BAE60727.1| protein product [Aspergillus oryzae]
  misc_feature (14)..(270): NCBI GI: 121701353 Blast Desc: methyltransferase small domain protein [Aspergillus clavatus NRRL 1] gi|119397084|gb|EAW07515.1| methyltransferase small domain protein [Aspergillus clavatus NRRL 1]
  misc_feature (7)..(270): NCBI GI: 238489223 Blast Desc: conserved [Aspergillus flavus NRRL3357] gi|220698237|gb|EED54577.1| conserved [Aspergillus flavus NRRL3357]
  misc_feature (14)..(270): NCBI GI: 240109033 Blast Desc: CPC735_025380 [Coccidioides posadasii C735 delta SOWgp]
  misc_feature (14)..(270): NCBI GI: 238844600 Blast Desc: methyltransferase [Microsporum canis CBS 113480]
  misc_feature (12)..(266): NCBI GI: 67516749 Blast Desc: AN0656.2 [Aspergillus nidulans FGSC A4] gi|74681487|sp|Q5BFM4.1|Y0656_EMENI RecName: Full=Uncharacterized methyltransferase AN0656 gi|40746276|gb|EAA65432.1| AN0656.2 FGSC
  misc_feature (13)..(270): NCBI GI: 242774846 Blast Desc: conserved [Talaromyces stipitatus ATCC 10500] gi|218722143|gb|EED21561.1| conserved [Talaromyces stipitatus ATCC 10500]
  misc_feature (14)..(270): NCBI GI: 226280625 Blast Desc: methyltransferase small domain-containing protein [Paracoccidioides brasiliensis Pb01]
  misc_feature (13)..(270): NCBI GI: 212532163 Blast Desc: conserved [Penicillium marneffei ATCC 18224] gi|210071602|gb|EEA25691.1| conserved [Penicillium marneffei ATCC 18224]
  misc_feature (48)..(254): SWISSPROT Homolog: EC 2.1.1.144 Trans-aconitate 2-methyltransferase
  misc_feature: Useful for introducing or modulating the production of volatile compounds
MAETNQTDPSFNSIRYLPTNEAYDKWAEVYDTDGNFLQAMDDVELKILFPRFLDSITTPKPWRIVDLGCGTGRNTALLLGIPDAEIVALDSSKGMLEVARSRLAPSSGQTSNSNTAGNDTSPTQPNLRFEIFDMLASKSPPDSIKPNTVDAIISTLVVEHIPLATFFEHVSKLLRPGGVLLLTNMHSEMGGISQAGFVDKSTGEKIRPTSNAHTMDDVMLEASKIGLEVLREGKEQGLIERAVDKDMVRKLGLRSKKWVGVACWFGGLFRLTNATAQ

SEQ ID NO: 10635 - DNA, 1222 bp, Muscodor strobelii
  misc_feature: SGI EST ID NO. CUFF.25074.0
  misc_feature: Variant of the nucleotide sequence at SEQ ID NO 10633
tagaaagacacaattgtgatcaattgtgtcaagagtttataatctttgactcactgcgttttgtctcattatcgacgtctggtgaatactcctgagcccaatttgtcatggcggaaacaaaccaaacagacccctccttcaactcgatacggtatttgccaacaaacgaggcctacgacaaatgggctgaagtctacgacaccgacggcaacttcctgcaagcaatggatgacgtggaactgaagatcttgtttccacgttttctagactcaatcaccacgcctaaaccttggcgaattgtagatcttgggtgtgggactggcaggaacactgcattgctgctcggaatcccagacgcagaaatagtggcgctagattcaagcaagggaatgcttgaagtagcaagaagccgacttgcgccatcttcagggcagacctctaattcaaatacggccggaaacgacacctcaccaactcagcccaatcttcgcttcgagatctttgatatgttggcatccaaatcaccgccagactcaatcaagccaaacacagtagacgcgattatcagcacattagtggtggaacacattcctcttgcaacattcttcgaacatgtttcgaagctccttcgtccgggtggggtcctattactgactaatatgcactctgaaatgggaggtatttcgcaagctgggtttgtggataagtctacaggcgagaaaattcggccaacgagcaacgcgcacaccatggacgatgtgatgcttgaggcgagcaaaattgggctcgaggtcttacgtgaagggaaggaacagggactaatagagagagcagtagacaaagatatggtcagaaagttgggtttacgcagcaagaagtgggttggtgttgcatgctggtttggagggttgttcaggcttaccaatgcaactgctcagtgagggcaagtgttgaacacatagtaatgagaaaattggtcgataaatggcgattggtttgtccctttgcaatagccattccttaaatggcaatcaacaatattatatgtttagcgaaatgcttattatgtatattgagacttttcgttgcattacgccttgtccaacggtcttatcaatgaacaaatcagagagctctcaacaaaaaacttatctctcagacaggcaggtcagatgacaagcaaagatggcagattttgaacttcgttctcgatggcttttta

SEQ ID NO: 10636 - DNA, 567 bp, Muscodor strobelii
  misc_feature: SGI cDNA ID NO. 563383
  misc_feature: Encodes the peptide sequence at SEQ ID NO 10637
atggccggacgcgatgctcttgtgtggatcgattgcgagatgacgggtctagaccctgatcgagaggagattatcgagatcttttgtatcattactactgcaacgctggaagttgtcgacgaggaaggttggggcaccgtagttcatcagacaaaggagaggatggacatgatggacgaatggtgtactcatacgcactcgaaaagtggactgacggctgctgtcatcgcatctgatgtgacacccgagcaggcagctgaagaactgctggcctatatcaagagatatgtgccagatgcaaagactgctctactggctggaaatagtgtgcatgccgatcgtgcattcctccgaaaagagccctacaagaaagttgtccagcatttgcatcaccgtcttcttgacgtgagcgcaatcaaggaggcagcgcgccggtggtcctccccagacgtattggacagtgttcccatgaagcgcggccttcatcaggcaaaagaagacattctcgagagcatcgaggaagctcgttattataagagagccatcttcgagaaaaactccagttaa

SEQ ID NO: 10637 - protein, 188 aa, Muscodor strobelii
  misc_feature: SGI Peptide ID NO. 563383
  misc_feature (7)..(175): Pfam Id: PF00929 Pfam Desc: Exonuclease
  misc_feature (5)..(183): NCBI GI: 46105698 Blast Desc: FG00388.1 [Gibberella zeae PH-1]
  misc_feature (1)..(185): NCBI GI: 39945028 Blast Desc: MGG_04496 [Magnaporthe grisea 70-15] gi|145011396|gb|EDJ96052.1| MGG_04496 [Magnaporthe grisea 70-15]
  misc_feature (2)..(183): NCBI GI: 256734581 Blast Desc: [Nectria haematococca mpVI 77-13-4]
  misc_feature (12)..(183): NCBI GI: 171680369 Blast Desc: protein product [Podospora anserina] gi|170939811|emb|CAP65037.1| protein product [Podospora anserina]
  misc_feature (7)..(184): NCBI GI: 156052617 Blast Desc: SS1G_06475 [Sclerotinia sclerotiorum 1980] gi|154704254|gb|EDO03993.1| SS1G_06475 [Sclerotinia sclerotiorum 1980]
  misc_feature (5)..(183): NCBI GI: 238486688 Blast Desc: RNA exonuclease Rex2, [Aspergillus flavus NRRL3357] gi|220699461|gb|EED55800.1| RNA exonuclease Rex2, [Aspergillus flavus NRRL3357]
  misc_feature (13)..(183): NCBI GI: 261357633 Blast Desc: oligoribonuclease [Verticillium albo-atrum VaMs.102]
  misc_feature (5)..(183): NCBI GI: 238838246 Blast Desc: oligoribonuclease [Microsporum canis CBS 113480]
  misc_feature (5)..(187): NCBI GI: 70999440 Blast Desc: RNA exonuclease Rex2 [Aspergillus fumigatus Af293] gi|66852076|gb|EAL92401.1| RNA exonuclease Rex2, [Aspergillus fumigatus Af293] gi|159127455|gb|EDP52570.1| RNA exonuclease
  misc_feature (13)..(184): NCBI GI: 154314837 Blast Desc: BC1G_04760 [Botryotinia fuckeliana B05.10] gi|150848298|gb|EDN23491.1| BC1G_04760 [Botryotinia fuckeliana B05.10]
MAGRDALVWIDCEMTGLDPDREEIIEIFCIITTATLEVVDEEGWGTVVHQTKERMDMMDEWCTHTHSKSGLTAAVIASDVTPEQAAEELLAYIKRYVPDAKTALLAGNSVHADRAFLRKEPYKKVVQHLHHRLLDVSAIKEAARRWSSPDVLDSVPMKRGLHQAKEDILESIEEARYYKRAIFEKNSS

SEQ ID NO: 10638 - DNA, 3661 bp, Muscodor strobelii
  misc_feature: SGI EST ID NO. CUFF.25099.0
  misc_feature: Variant of the nucleotide sequence at SEQ ID NO 10636
tttgagtcatcctgagcgggtaagctttggatttagagagagagagagctatgtatcaaattaaatgctcaaactctacactcggagataccgttgcgcacaagaatggagtcaaaaaggcacatatttctcgaatatatataagtcactggcagtcctacggttatttcctcacacttaccacgcataatactcaaatacacctttagctcctggagagaacctaccaagcccaacagctaccagcaactatcacgtgacaacaaacacagacattcgttttgggcgtggcctagcactgagatcaattcttccaccgtatacctagtccgcaactctccttaccggaatttcggtcaaaaagatagagttcgctgacctcgagagccatctatccaacccctgtcaaagatattttcgctgaggagtcaccatcaaacgccatggccggacgcgatgctcttgtgtggatcgattgcgagatgacgggtctagaccctgatcgagaggagattatcgagatcttttgtatcattactactgcaacgctggaagttgtcgacgaggaaggttggggcaccgtagttcatcagacaaaggagaggatggacatgatggacgaatggtgtactcatacgcactcgaaaagtggactgacggctgctgtcatcgcatctgatgtgacacccgagcaggcagctgaagaactgctggcctatatcaagagatatgtgccagatgcaaagactgctctactggctggaaatagtgtgcatgccgatcgtgcattcctccgaaaagagccctacaagaaagttgtccagcatttgcatcaccgtcttcttgacgtgagcgcaatcaaggaggcagcgcgccggtggtcctccccagacgtattggacagtgttcccatgaagcgcggccttcatcaggcaaaagaagacattctcgagagcatcgaggaagctcgttattataagagagccatcttcgagaaaaactccagttaaccttcgccgagattcgcaaacagctttcctcaacgataacgatctcctcttctcacgggtgtcaaaaacaaaattgagaagcaaagcgactgtccgggacaatacacccattaacattacgatatctaatgttgctattattgccaatggctttattgtagcgtcttaggcgaagacgatgtgctacttgtcacatcattattctggcgaggctacccgagatctaaagcaatagcataactactttcattgcagctggtcaagacggcatggtggcgattgtggcttcatgtttactgggattcagggacaaaaaatcgcacaggaccctgaaaagcaaatcaatatatgcacgttggctacgactcgacagctcaatggccgctcagctcagctgtctgtcggataacaattaatgttccgatactgtgacgtcgcaaatatttgggcagccatcacaccgtgataccaactggcgaaaacttattacctatcaacttctcttgccgcggacctgaattggtgtgcatgcccaccttgcagaagcccatgttgaaatgagatcactacgcgttgtgggggggaccaagaaccccgccataggcagtctcccctctgcaagaccacaacgtaacagaccaccactttcacaagctctgttccttgtttattttaagtatctccacggatcctactttcgcacattcacttctgctcttgatatctctagaatcatcagctgcatctcttagatactatccataatgagcgtcaagacagtcgagttcaagtccttcacggaccagaagccgggaacctcgggacttcgcaagaaggtcaaggtcttccagcaaccccactacagtgaatccttcgtcaccagcattttgctctccatccccgagggcgtcgagggatctttcctcgtcattggtggtgacggccgtttctggaaccctgaagtcgtccagttgattgccaagatcggtgctgcatatggagtcaagaagctattaatcgggcagaatggcattctgtcgacccctgctgccagccatgtcattcgaaagcgtcaggccactggaggtatcctcctgacagccagccacaaccctggcggcccgaccgaagactttggcatcaagtacaacctagccaacggcggtcctgcccccgaaagcgttaccaacaagatatacgaggcttcgaagaccttgacatcctacaagatcgcagatatccccgatgtcgacatctccaccattggctccaagacctacggaaacctcgaggtggaaatcatcgatagcgttgcagactacatgcagatgctgaaggatatcttcgactttgacgtgatcaagaagttcttcaagaataaccctgacttcaaggtcctctttgacggtctacacggcgtcactggcccttacggcaaggccatcttcgatgaagagcttgggctcaagggcgcaacccagaactgtgtcccggctcccgacttcaatggcggacacccggatccaaacttgacctatgcccattcgcttgtctccgtggtcgacaagaactccatccctttcggtgctgcttctgatggcgatggcgaccgaaatatgatctacggtgcaggtgcctttgtgtctcccggtgatagtttagccattatcgcccactatgccaacctgatcccgtacttcaagaagcagggtgtctacggccttgctcgaagtatgcccacatctggtgctgttgacttagtggccaaagctcagggattgaattgctacgaggttcctaccggatggaaattcttctgtgctctcttcgatgccgacaaattgagtatttgtggcgaagagagtttcggcacaggcagcaaccacgtccgcgagaaggacggtctctgggccgtcgttgcttggcttaacatcatcgctggtctcggcgaggcgaaccccagtgtcacccctagcatcaaggagattcagaaagagttctggaacacgtatggtcgtgtcttttttactcgctacgactacgagaatgttgattcagacggcgccaacaaggttgttagtactctaaaagaccttgttgccgactcaaatttcatcggaagcaagattggagaacgtaccgttactgatgcgggtaatttctcgtacactgatcttgatggatccgtctcttcaggccagggtctgtatgctcgcttctccagcggaagccgcattgttgtccgcctctctggcactggttcatcaggtgccaccatccgtctgtacattgagcagtacagcaaggacccttcaacatacggccaagatgcccaggacttcttgaaggacgagatcaagtttgcgactgacttgttgaaattcaaagagtatgttggacgtgatgaacctgatgtcaagacgtagacgtggggattaaaacggatgctgtggtgggtcgtggatagactataaatttcctaaagttcactaatacaaatacattactacgagtttcttttagttgcgatccgcagaatgaaacaggtgatatatagtaactccttaaaactcccaaacttgcaagacctcgattgcaagattacaacaaagctattctcacaggagaccatcttagggaaataaaaaacg

SEQ ID NO: 10639 - DNA, 1662 bp, Muscodor strobelii
  misc_feature: SGI cDNA ID NO. 563384
  misc_feature: Elevated expression when VOC is produced
  misc_feature: Encodes the peptide sequence at SEQ ID NO 10640
atgagcgtcaagacagtcgagttcaagtccttcacggaccagaagccgggaacctcgggacttcgcaagaaggtcaaggtcttccagcaaccccactacagtgaatccttcgtcaccagcattttgctctccatccccgagggcgtcgagggatctttcctcgtcattggtggtgacggccgtttctggaaccctgaagtcgtccagttgattgccaagatcggtgctgcatatggagtcaagaagctattaatcgggcagaatggcattctgtcgacccctgctgccagccatgtcattcgaaagcgtcaggccactggaggtatcctcctgacagccagccacaaccctggcggcccgaccgaagactttggcatcaagtacaacctagccaacggcggtcctgcccccgaaagcgttaccaacaagatatacgaggcttcgaagaccttgacatcctacaagatcgcagatatccccgatgtcgacatctccaccattggctccaagacctacggaaacctcgaggtggaaatcatcgatagcgttgcagactacatgcagatgctgaaggatatcttcgactttgacgtgatcaagaagttcttcaagaataaccctgacttcaaggtcctctttgacggtctacacggcgtcactggcccttacggcaaggccatcttcgatgaagagcttgggctcaagggcgcaacccagaactgtgtcccggctcccgacttcaatggcggacacccggatccaaacttgacctatgcccattcgcttgtctccgtggtcgacaagaactccatccctttcggtgctgcttctgatggcgatggcgaccgaaatatgatctacggtgcaggtgcctttgtgtctcccggtgatagtttagccattatcgcccactatgccaacctgatcccgtacttcaagaagcagggtgtctacggccttgctcgaagtatgcccacatctggtgctgttgacttagtggccaaagctcagggattgaattgctacgaggttcctaccggatggaaattcttctgtgctctcttcgatgccgacaaattgagtatttgtggcgaagagagtttcggcacaggcagcaaccacgtccgcgagaaggacggtctctgggccgtcgttgcttggcttaacatcatcgctggtctcggcgaggcgaaccccagtgtcacccctagcatcaaggagattcagaaagagttctggaacacgtatggtcgtgtcttttttactcgctacgactacgagaatgttgattcagacggcgccaacaaggttgttagtactctaaaagaccttgttgccgactcaaatttcatcggaagcaagattggagaacgtaccgttactgatgcgggtaatttctcgtacactgatcttgatggatccgtctcttcaggccagggtctgtatgctcgcttctccagcggaagccgcattgttgtccgcctctctggcactggttcatcaggtgccaccatccgtctgtacattgagcagtacagcaaggacccttcaacatacggccaagatgcccaggacttcttgaaggacgagatcaagtttgcgactgacttgttgaaattcaaagagtatgttggacgtgatgaacctgatgtcaagacgtag

SEQ ID NO: 10640 - protein, 553 aa, Muscodor strobelii
  misc_feature: SGI Peptide ID NO. 563384
  misc_feature (13)..(155): Pfam Id: PF02878 Pfam Desc: Phosphoglucomutase/phosphomannomutase, alpha/beta/alpha domain I
  misc_feature (184)..(293): Pfam Id: PF02879 Pfam Desc: Phosphoglucomutase/phosphomannomutase, alpha/beta/alpha domain II
  misc_feature (294)..(416): Pfam Id: PF02880 Pfam Desc: Phosphoglucomutase/phosphomannomutase, alpha/beta/alpha domain III
  misc_feature (450)..(542): Pfam Id: PF00408 Pfam Desc: Phosphoglucomutase/phosphomannomutase, C-terminal domain
  misc_feature (460)..(542): Pfam Id: PF00408 Pfam Desc: Phosphoglucomutase/phosphomannomutase, C-terminal domain
  misc_feature (1)..(553): NCBI GI: 261357634 Blast Desc: phosphoglucomutase [Verticillium albo-atrum VaMs.102]
  misc_feature (1)..(553): NCBI GI: 85110945 Blast Desc: phosphoglucomutase 2 [Neurospora crassa OR74A] gi|28925418|gb|EAA34468.1| phosphoglucomutase 2 [Neurospora crassa OR74A]
  misc_feature (1)..(553): NCBI GI: 171680367 Blast Desc: protein product [Podospora anserina] gi|170939810|emb|CAP65036.1| protein product [Podospora anserina]
  misc_feature (1)..(553): NCBI GI: 256734582 Blast Desc: [Nectria haematococca mpVI 77-13-4]
  misc_feature (1)..(553): NCBI GI: 46105684 Blast Desc: FG00387.1 [Gibberella zeae PH-1]
  misc_feature (1)..(553): NCBI GI: 116206846 Blast Desc: conserved [Chaetomium globosum CBS 148.51] gi|88183313|gb|EAQ90781.1| conserved [Chaetomium globosum CBS 148.51]
  misc_feature (1)..(553): NCBI GI: 39945026 Blast Desc: MGG_04495 [Magnaporthe grisea 70-15] gi|145011397|gb|EDJ96053.1| MGG_04495 [Magnaporthe grisea 70-15]
  misc_feature (1)..(553): NCBI GI: 156052615 Blast Desc: phosphoglucomutase [Sclerotinia sclerotiorum 1980] gi|154704253|gb|EDO03992.1| phosphoglucomutase [Sclerotinia sclerotiorum 1980]
  misc_feature (1)..(553): NCBI GI: 189205126 Blast Desc: phosphoglucomutase [Pyrenophora tritici-repentis Pt-1C-BFP] gi|187985997|gb|EDU51485.1| phosphoglucomutase [Pyrenophora tritici-repentis Pt-1C-BFP]
  misc_feature (1)..(553): NCBI GI: 212526338 Blast Desc: phosphoglucomutase PgmA [Penicillium marneffei ATCC 18224] gi|210072724|gb|EEA26811.1| phosphoglucomutase PgmA [Penicillium marneffei ATCC 18224]
  misc_feature (1)..(553): SWISSPROT Homolog: EC 5.4.2.2 Phosphoglucomutase
  misc_feature: Useful for introducing or modulating the production of volatile compounds
MSVKTVEFKSFTDQKPGTSGLRKKVKVFQQPHYSESFVTSILLSIPEGVEGSFLVIGGDGRFWNPEVVQLIAKIGAAYGVKKLLIGQNGILSTPAASHVIRKRQATGGILLTASHNPGGPTEDFGIKYNLANGGPAPESVTNKIYEASKTLTSYKIADIPDVDISTIGSKTYGNLEVEIIDSVADYMQMLKDIFDFDVIKKFFKNNPDFKVLFDGLHGVTGPYGKAIFDEELGLKGATQNCVPAPDFNGGHPDPNLTYAHSLVSVVDKNSIPFGAASDGDGDRNMIYGAGAFVSPGDSLAIIAHYANLIPYFKKQGVYGLARSMPTSGAVDLVAKAQGLNCYEVPTGWKFFCALFDADKLSICGEESFGTGSNHVREKDGLWAVVAWLNIIAGLGEANPSVTPSIKEIQKEFWNTYGRVFFTRYDYENVDSDGANKVVSTLKDLVADSNFIGSKIGERTVTDAGNFSYTDLDGSVSSGQGLYARFSSGSRIVVRLSGTGSSGATIRLYIEQYSKDPSTYGQDAQDFLKDEIKFATDLLKFKEYVGRDEPDVKT

SEQ ID NO: 10641 - DNA, 3661 bp, Muscodor strobelii; identical to SEQ ID NO: 10638
  misc_feature: SGI EST ID NO. CUFF.25099.0
  misc_feature: Variant of the nucleotide sequence at SEQ ID NO 10639

SEQ ID NO: 10642 - DNA, 1419 bp, Muscodor strobelii
  misc_feature: SGI cDNA ID NO. 563385
  misc_feature: Reduced expression when VOC is produced
  misc_feature: Encodes the peptide sequence at SEQ ID NO 10643
atggcagcgaagacggtgatagtggtaggttccggcctcgccggctcatccgcagcgtacgaagcgttgaagaaaggcgcgaatgtacacatgttggagcgggcgcccaagcctggtggcaatagcatgaaggcctcgtcgggaatcaacggtgctggtactaagttccagaaagactgcggtgtggaaagtgacgagagtttctttgatgatactgtctcgtccgctggattgagactttctcaagctgcggaacagcaaggaaaagatcgaagggatctgattgagattctgacgacacgatcgaaagacgcagtctcttggcttacggatgagattggtgtcgatctcagtgttgtcgctcaactcggtggacactcagtgccgcggacgcaccgtggtaaaggaaatccgcctccgggtgctgctatcgtgggtacgctgctgaagaagctgggagagaattcgaggtttacaattagcacatcggcgaacgttgatgcgctactcactagcccgaacggagatggtagtgtgcgagtcactggtgttcgttataccgttgagggtgaaacccgcgaacttattggtccggttgtattcgctgctggtggcttcgcgggagacgctcaaggtctacttgctaagtatcgaccggacctggctggattcccgtctacgaatgatgctcgacctggttctcatggtctacttgcggatattggagcggagttcgtagatatggactccgtgcaaatccatcctaccgataagattctggctgccgaggcgttgaggggtgaaggcggtatcttgctctctgcggatggccatagattcgtcaatgaaatggagagaagggacgtggtcagcaatgccatcatgcagctcgcccgtgcagactccgaggctgagaaagtagaggttaagcagtggcatatcacacttctgcttgatccaggggcttgcgaagcctctgcttcccatcttggcttttatctatggaaggggctgatgcagaagaagaaagttaaggatcttccacctcctatcatcgatgctgtcgataaatatgctcattctgttgccttgggatctgacgagcacttcggaagaaagtcgtttggacactggaaattggtcgcgggagaaggaaatagagacacagaagtatgtattgggactgtgacgccggtgactcatttcaccatgggaggtgttctgttcaacaccaaggcgcaagtccttgggcgcagagaagtttctctggcccctatttacggcatttgggcagcgggagagatcacgggaggcattcatggagataatcggctgggaggttcgtcactgctggaatgtgctgtgtttgggctcatggccggagacgaggctgcaaggagtctgaatttggtagaatga

SEQ ID NO: 10643 - protein, 472 aa, Muscodor strobelii
  misc_feature: SGI Peptide ID NO. 563385
  misc_feature (5)..(450): Pfam Id: PF00890 Pfam Desc: FAD binding domain
  misc_feature (5)..(128): Pfam Id: PF01266 Pfam Desc: FAD dependent oxidoreductase
  misc_feature (5)..(305): Pfam Id: PF00890 Pfam Desc: FAD binding domain
  misc_feature (396)..(450): Pfam Id: PF00890 Pfam Desc: FAD binding domain
  misc_feature (5)..(33): Pfam Id: PF01134 Pfam Desc: Glucose inhibited division protein A
  misc_feature (5)..(38): Pfam Id: PF00070 Pfam Desc: Pyridine nucleotide-disulphide oxidoreductase
  misc_feature (5)..(43): Pfam Id: PF07992 Pfam Desc: Pyridine nucleotide-disulphide oxidoreductase
  misc_feature (1)..(461): NCBI GI: 226506578 Blast Desc: LOC100273236 [Zea mays] gi|194702908|gb|ACF85538.1| [Zea mays]
  misc_feature (2)..(467): NCBI GI: 256735541 Blast Desc: [Nectria haematococca mpVI 77-13-4]
  misc_feature (4)..(463): NCBI GI: 46135715 Blast Desc: FG09373.1 [Gibberella zeae PH-1]
  misc_feature (6)..(466): NCBI GI: 171680839 Blast Desc: protein product [Podospora anserina] gi|27764314|emb|CAD60594.1| protein product [Podospora anserina] gi|170940047|emb|CAP65274.1| protein product [Podospora anserina]
  misc_feature (6)..(465): NCBI GI: 85094033 Blast Desc: NCU06042 [Neurospora crassa OR74A] gi|28921260|gb|EAA30569.1| NCU06042 [Neurospora crassa OR74A]
  misc_feature (3)..(469): NCBI GI: 145605521 Blast Desc: MGG_09226 [Magnaporthe grisea 70-15] gi|145013335|gb|EDJ97976.1| MGG_09226 [Magnaporthe grisea 70-15]
  misc_feature (4)..(465): NCBI GI: 169770989 Blast Desc: [Aspergillus oryzae RIB40] gi|83767823|dbj|BAE57962.1| protein product [Aspergillus oryzae]
  misc_feature (6)..(469): NCBI GI: 67523803 Blast Desc: AN2357.2 [Aspergillus nidulans FGSC A4] gi|40745312|gb|EAA64468.1| AN2357.2 [Aspergillus nidulans FGSC A4]
  misc_feature (6)..(465): NCBI GI: 119482826 Blast Desc: FAD dependent oxidoreductase, [Neosartorya fischeri NRRL 181] gi|119409596|gb|EAW19544.1| FAD dependent oxidoreductase, [Neosartorya fischeri NRRL 181]
  misc_feature (6)..(469): NCBI GI: 259487758 Blast Desc: TPA: FAD dependent oxidoreductase, (AFU_orthologue; AFUA_7G05070) [Aspergillus nidulans FGSC A4]
  misc_feature (1)..(465): SWISSPROT Homolog: EC 1.3.1.6 Fumarate reductase (NADH)
  misc_feature: Useful for introducing or modulating the production of volatile compounds
MAAKTVIVVGSGLAGSSAAYEALKKGANVHMLERAPKPGGNSMKASSGINGAGTKFQKDCGVESDESFFDDTVSSAGLRLSQAAEQQGKDRRDLIEILTTRSKDAVSWLTDEIGVDLSVVAQLGGHSVPRTHRGKGNPPPGAAIVGTLLKKLGENSRFTISTSANVDALLTSPNGDGSVRVTGVRYTVEGETRELIGPVVFAAGGFAGDAQGLLAKYRPDLAGFPSTNDARPGSHGLLADIGAEFVDMDSVQIHPTDKILAAEALRGEGGILLSADGHRFVNEMERRDVVSNAIMQLARADSEAEKVEVKQWHITLLLDPGACEASASHLGFYLWKGLMQKKKVKDLPPPIIDAVDKYAHSVALGSDEHFGRKSFGHWKLVAGEGNRDTEVCIGTVTPVTHFTMGGVLFNTKAQVLGRREVSLAPIYGIWAAGEITGGIHGDNRLGGSSLLECAVFGLMAGDEAARSLNLVE

SEQ ID NO: 10644 - DNA, 711 bp, Muscodor strobelii
  misc_feature: SGI cDNA ID NO. 563386
  misc_feature: Encodes the peptide sequence at SEQ ID NO 10645
atgacgcggtcctaccgctatcttcttcacaacggtctgtccaatcgtctgggttctggcattgctcgtagcctaggaacaagatccaagcaccgcatcgctgaggctttggccgacctctacgacctcgcgacccaatacgtcgatcgcatcgagtcgtacctacccgaggacttcttcgctcgggccaagaactcatgggcatggtcatcatacatgaccgacaacgatttctgggccctgacccttagattattccacgctcgcgccctatttctcgcgacaattcctaacgcccatctatcgcgtgggaacgccttgactcgatctctcgatcgctttcgcacggccttccagacccggtatccccagcgccccatcccgcccggtgccacattacaggaggctgcctcgattgcggaggagaacaacgggaacggccagtgggagctcatgtacttcgagctctcggatcccgagggcgaaggcgaaggcaccgacgccatcaagacatacccggtgacgcccggccagcaacacatcgatgcggtcgccgcacgttatgtgcccaccaaccaggtggaggtggaccaggaccccaatctctgggccaatcttagtggtgccaacaatcctcgcacccgaaccatcaatgcatacgaggaagaactcgctcagggtatggacgctatgatgctatgggacgagtga

SEQ ID NO: 10645 - protein, 236 aa, Muscodor strobelii
  misc_feature: SGI Peptide ID NO. 563386
MTRSYRYLLHNGLSNRLGSGIARSLGTRSKHRIAEALADLYDLATQYVDRIESYLPEDFFARAKNSWAWSSYMTDNDFWALTLRLFHARALFLATIPNAHLSRGNALTRSLDRFRTAFQTRYPQRPIPPGATLQEAASIAEENNGNGQWELMYFELSDPEGEGEGTDAIKTYPVTPGQQHIDAVAARYVPTNQVEVDQDPNLWANLSGANNPRTRTINAYEEELAQGMDAMMLWDE

SEQ ID NO: 10646 - DNA, 570 bp, Muscodor strobelii
  misc_feature: SGI cDNA ID NO. 563387
  misc_feature: Encodes the peptide sequence at SEQ ID NO 10647
atggcgagatattcaaagatagatgacgatgatgagaagtacatatccgacaggcatgatagcacttccagtgaatctgacgatgttcatctgcgttggaatccgagccattcgtattccaacagcccatgttggattttgggcgttgtttggacactgtccatcatattagcagttgttgcgacggccgtaataacgaaacggaaccagggacacaaccctcttgggacccttgatgccggatatctgagcgaatttcgtccagcacgatcagctgcgagtgagatgcaacgagcatttacagggagccctctgttcagcgaagagagaggggaatatatccctgacgattctccgagtctgaagtacattggctcaactaccgaggtggatgaggcgtgggaagagcttatcaaagatcgatattttctgctcacagacgaagaggctcaagaagcatggggagagcagtataccgaattctggcatgacagagcaggaggctatctggcggggatcacttacgccagtcgttataccccgatgcatacgaccatggggaggggatga

SEQ ID NO: 10647 - protein, 189 aa, Muscodor strobelii
  misc_feature: SGI Peptide ID NO. 563387
  misc_feature (30)..(173): NCBI GI: 189204938 Blast Desc: conserved [Pyrenophora tritici-repentis Pt-1C-BFP] gi|187985903|gb|EDU51391.1| conserved [Pyrenophora tritici-repentis Pt-1C-BFP]
  misc_feature (88)..(169): NCBI GI: 189211607 Blast Desc: [Pyrenophora tritici-repentis Pt-1C-BFP] gi|187979332|gb|EDU45958.1| [Pyrenophora tritici-repentis Pt-1C-BFP]
MARYSKIDDDDEKYISDRHDSTSSESDDVHLRWNPSHSYSNSPCWILGVVWTLSIILAVVATAVITKRNQGHNPLGTLDAGYLSEFRPARSAASEMQRAFTGSPLFSEERGEYIPDDSPSLKYIGSTTEVDEAWEELIKDRYFLLTDEEAQEAWGEQYTEFWHDRAGGYLAGITYASRYTPMHTTMGRG

SEQ ID NO: 10648 - DNA, 603 bp, Muscodor strobelii
  misc_feature: SGI cDNA ID NO. 563388
  misc_feature: Encodes the peptide sequence at SEQ ID NO 10649
atgaagggagaggaacaccgtatggagactgctcgctttctcgacgacgttgagatacccgagaaagcctacaaggtgggaggattgatccgacagaggactcatatctcctttgccgttatgatcatccacggttctattatcgctttctatactatcatctttatattttttacgcaaacgaatacaaccagagcagacggatatgagtctcttcgggttccatcgccggcttgggaggccattcactatgagcagaaatacttcgttaacgataagatacacatgaagacatatttcggggagccaactgaggaaagagaaaccagctggaatgaactgcttgcagccgccacaattagtcttactcctgaagaactgagagaacaagataagcccgcagataaaaccgtacagctcccggatggagactacgttgcagccttgactgtattccatgacttacattgtctccgacgtgttggaagaatgttatatcaagaccactactggccaaacattacggacgaagaaaagagcgccaatctcatgcactctcgtaagtcatcattccagagtcttgatttgatggatgaagcctaa

SEQ ID NO: 10649 - protein, 200 aa, Muscodor strobelii
  misc_feature: SGI Peptide ID NO. 563388
  misc_feature (9)..(186): NCBI GI: 242809614 Blast Desc: conserved [Talaromyces stipitatus ATCC 10500] gi|218716032|gb|EED15454.1| conserved [Talaromyces stipitatus ATCC 10500]
  misc_feature (45)..(188): NCBI GI: 240281141 Blast Desc: conserved [Ajellomyces capsulatus H143]
  misc_feature (40)..(186): NCBI GI: 154279258 Blast Desc: [Ajellomyces capsulatus NAm1] gi|150412385|gb|EDN07772.1| [Ajellomyces capsulatus NAm1]
  misc_feature (45)..(186): NCBI GI: 225562435 Blast Desc: conserved [Ajellomyces capsulatus G186AR]
  misc_feature (15)..(186): NCBI GI: 156057281 Blast Desc: SS1G_04371 [Sclerotinia sclerotiorum 1980] gi|154702157|gb|EDO01896.1| SS1G_04371 [Sclerotinia sclerotiorum 1980]
  misc_feature (41)..(186): NCBI GI: 225680940 Blast Desc: conserved [Paracoccidioides brasiliensis Pb03]
  misc_feature (41)..(186): NCBI GI: 226292649 Blast Desc: conserved [Paracoccidioides brasiliensis Pb18]
  misc_feature (41)..(186): NCBI GI: 28881151 Blast Desc: [Neurospora crassa]
  misc_feature (41)..(186): NCBI GI: 116204067 Blast Desc: CHGG_09917 [Chaetomium globosum CBS 148.51] gi|88176045|gb|EAQ83513.1| CHGG_09917 [Chaetomium globosum CBS 148.51]
  misc_feature (31)..(182): NCBI GI: 242817094 Blast Desc: conserved [Talaromyces stipitatus ATCC 10500] gi|218713348|gb|EED12772.1| conserved [Talaromyces stipitatus ATCC 10500]
MKGEEHRMETARFLDDVEIPEKAYKVGGLIRQRTHISFAVMIIHGSIIAFYTIIFIFFTQTNTTRADGYESLRVPSPAWEAIHYEQKYFVNDKIHMKTYFGEPTEERETSWNELLAAATISLTPEELREQDKPADKTVQLPDGDYVAALTVFHDLHCLRRVGRMLYQDHYWPNITDEEKSANLMHSRKSSFQSLDLMDEA

SEQ ID NO: 10650 - DNA, 363 bp, Muscodor strobelii
  misc_feature: SGI EST ID NO. CUFF.25094.0
  misc_feature: Variant of the nucleotide sequence at SEQ ID NO 10648
cagaaatacttcgttaacgataagatacacatgaagacatatttcggggagccaactgaggaaagagaaaccagctggaatgaactgcttgcagccgccacaattagtcttactcctgaagaactgagagaacaagataagcccgcagataaaaccgtacagctcccggatggagactacgttgcagccttgactgtattccatgacttacattgtctccgacgtgttggaagaatgttatatcaagaccactactggccaaacattacggacgaagaaaagagcgccaatctcatgcactctcgtaagtcatcattccagagtcttgatttgatggatgaagcctaagacttcctgataaaa

SEQ ID NO: 10651 - DNA, 552 bp, Muscodor strobelii
  misc_feature: SGI cDNA ID NO. 563389
  misc_feature: Encodes the peptide sequence at SEQ ID NO 10652
atgcgctgctcacttgctctcattgccgcagcctatgctgccttcgtcagtgctgtgccactcacaaccaacacgatctctcaggaggtacagaagcgagactccgagtcttacgtcgtgtacattcctgactttaaggcacgctctatcgagggcttccagagacgcgcattggaagacatccaaaaacgctccgaggagaagtccgagccctacgttgtctacattcccgacttcaagaaacgctccgaggatgacttgcaaaagcgttctgaggagacatctgaggcctacgttgtatatatccccgacttcaagaagcgctctgaggaagacacggagtcctatatagtgtacattcctgactttaaggtacgctctgaggtcgagttcaggaagcgctcagtgaacgactttcagaaacgctccgctcaagacgtccagaagcgatccgaagagaatttggaatcttacattgtggtgattcctgacttcaagaagcgatctgaagaggcttccgaaccctatattgtatatataccggacttttaa

SEQ ID NO: 10652 - protein, 183 aa, Muscodor strobelii
  misc_feature: SGI Peptide ID NO. 563389
MRCSLALIAAAYAAFVSAVPLTTNTISQEVQKRDSESYVVYIPDFKARSIEGFQRRALEDIQKRSEEKSEPYVVYIPDFKKRSEDDLQKRSEETSEAYVVYIPDFKKRSEEDTESYIVYIPDFKVRSEVEFRKRSVNDFQKRSAQDVQKRSEENLESYIVVIPDFKKRSEEASEPYIVYIPDF

SEQ ID NO: 10653 - DNA, 146 bp, Muscodor strobelii
  misc_feature: SGI EST ID NO. CUFF.25096.0
  misc_feature: Variant of the nucleotide sequence at SEQ ID NO 10651
tttattctcatcagcccgctcaaaggaaatactattctgtcaagagtttaacatcatctaatcgagacaatatcctattcctcaatatgcgctgctcacttgctctcattgccgcagcctatgctgccttcgtcagtgctgtgcca

SEQ ID NO: 10654 - DNA, 1014 bp, Muscodor strobelii
  misc_feature: SGI cDNA ID NO. 563390
  misc_feature: Encodes the peptide sequence at SEQ ID NO 10655
atggtgctccgaaagaaagaagtctacacgattatcacgccgattcctagcttcatcccgcgccaattagccatcgacattctccacagccatggtgaggtcatcaacgtcaatccactcgtcctgagttacaaacagatcaaggcgcctcgcgatgcggccgccgacgaatacttttcaacatggtacgagataaccgagcgggtccaggttctgcctggtatcggcaagttgggatcaagtaagatctcgttcaacgcctgtttccatgatgtcccatggggcctgcagtcgcacgtttatgcgccgttaaatatcgacatgcgcaacaagtatcgtatcggcgggaatcaaccgggcgttgaaccaccaccacaagccgaacttggtctcgcagaacttggtgtgccaaaggacgggctatacttgagagaggatattgagatacgatgcaatattaccatggtgagcacggtgaagtcccaaatgaaggctgccagcaaggaaatggtcaatcgcattattaagaaggcggagttattggatgctggtgttttgagggcgatgatcgaggacggcaaaatgaaaaccttcaacccgcttgaccgaagctacaccggcggcctccaagactcccggtctccgcaactatcgccagccacgccctatggtgcggttcaaccaccaacatcgccaaccgttccctaccacgtgccgcgaccagtttctgtcgatcccaatcgacctggtacatccggttctctaggatatcctgcacactggcaggcgcaacagcaagctgtggcggatcagaataatcgtcaacactatgctgaattgcctaacaatcaaacgatggctccaggaagtcaatcattcccaatggagcttccaggtgatttctatcgacacccaaccatcaccacgctttcaacaacaatcccagccctcacccacaaacccgtcattatatggccgagcttcccccaactcactccagtcacattctcctga

SEQ ID NO: 10655 - protein, 337 aa, Muscodor strobelii
  misc_feature: SGI Peptide ID NO. 563390
  misc_feature (1)..(305): NCBI GI: 39942710 Blast Desc: MGG_03435 [Magnaporthe grisea 70-15] gi|145010021|gb|EDJ94677.1| MGG_03435 [Magnaporthe grisea 70-15]
  misc_feature (2)..(301): NCBI GI: 171691386 Blast Desc: protein product [Podospora anserina] gi|170945641|emb|CAP71754.1| protein product [Podospora anserina]
  misc_feature (2)..(306): NCBI GI: 164429382 Blast Desc: NCU04506 [Neurospora crassa OR74A] gi|157073459|gb|EAA27681.2| conserved [Neurospora crassa OR74A]
  misc_feature (2)..(305): NCBI GI: 256726757 Blast Desc: NECHADRAFT_57875 [Nectria haematococca mpVI 77-13-4]
  misc_feature (2)..(305): NCBI GI: 46122727 Blast Desc: FG05741.1 [Gibberella zeae PH-1]
  misc_feature (2)..(306): NCBI GI: 169609863 Blast Desc: SNOG_08023 [Phaeosphaeria nodorum SN15] gi|160701932|gb|EAT84299.2| SNOG_08023 [Phaeosphaeria nodorum SN15]
  misc_feature (2)..(265): NCBI GI: 212544486 Blast Desc: conserved [Penicillium marneffei ATCC 18224] gi|210065366|gb|EEA19460.1| conserved [Penicillium marneffei ATCC 18224]
  misc_feature (3)..(204): NCBI GI: 255942253 Blast Desc: Pc18g00480 [Penicillium chrysogenum Wisconsin 54-1255] gi|211586628|emb|CAP94272.1| Pc18g00480 [Penicillium chrysogenum Wisconsin 54-1255]
  misc_feature (2)..(305): NCBI GI: 189205194 Blast Desc: conserved [Pyrenophora tritici-repentis Pt-1C-BFP] gi|187986031|gb|EDU51519.1| conserved [Pyrenophora tritici-repentis Pt-1C-BFP]
  misc_feature (2)..(334): NCBI GI: 67538458 Blast Desc: AN5399.2 [Aspergillus nidulans FGSC A4] gi|40743369|gb|EAA62559.1| AN5399.2 [Aspergillus nidulans FGSC A4] gi|259485156|tpe|CBF81973.1| TPA: conserved [Aspergillus FGSC
MVLRKKEVYTIITPIPSFIPRQLAIDILHSHGEVINVNPLVLSYKQIKAPRDAAADEYFSTWYEITERVQVLPGIGKLGSSKISFNACFHDVPWGLQSHVYAPLNIDMRNKYRIGGNQPGVEPPPQAELGLAELGVPKDGLYLREDIEIRCNITMVSTVKSQMKAASKEMVNRIIKKAELLDAGVLRAMIEDGKMKTFNPLDRSYTGGLQDSRSPQLSPATPYGAVQPPTSPTVPYHVPRPVSVDPNRPGTSGSLGYPAHWQAQQQAVADQNNRQHYAELPNNQTMAPGSQSFPMELPGDFYRHPTITTLSTTIPALTHKPVIIWPSFPQLTPVTFS

SEQ ID NO: 10656 - DNA, 2097 bp, Muscodor strobelii
  misc_feature: SGI EST ID NO. CUFF.25118.0
  misc_feature: Variant of the nucleotide sequence at SEQ ID NO 10654
gagcggattgggggcgtgccagtcttgccagttcaactccaaaagcccgttgcacacctgcaccgttgaattctattttttgcgccatgcccattgtttaatgctgacgccagattcaagtagccaaggttgtagaaattagttcatcccaaagtctcttacccccatcatactttttgaccttatcttccgctttggcccgcccccaattccatgagtcgtttgcgctctgtccgtttgtaagcttatgtatgccgcaggagtccccgttggcccagaaagtcccgacacagtccagcgcctgccaccttcattcatcttctactttcacgccatcatacagtagaacgaggagtgcgacatctaaatacatcgacaacaatctcgcgagcaaaacaaaagcagttgcccgcaatggtgctccgaaagaaagaagtctacacgattatcacgccgattcctagcttcatcccgcgccaattagccatcgacattctccacagccatggtgaggtcatcaacgtcaatccactcgtcctgagttacaaacagatcaaggcgcctcgcgatgcggccgccgacgaatacttttcaacatggtacgagataaccgagcgggtccaggttctgcctggtatcggcaagttgggatcaagtaagatctcgttcaacgcctgtttccatgatgtcccatggggcctgcagtcgcacgtttatgcgccgttaaatatcgacatgcgcaacaagtatcgtatcggcgggaatcaaccgggcgttgaaccaccaccacaagccgaacttggtctcgcagaacttggtgtgccaaaggacgggctatacttgagagaggatattgagatacgatgcaatattaccatggtgagcacggtgaagtcccaaatgaaggctgccagcaaggaaatggtcaatcgcattattaagaaggcggagttattggatgctggtgttttgagggcgatgatcgaggacggcaaaatgaaaaccttcaacccgcttgaccgaagctacaccggcggcctccaagactcccggtctccgcaactatcgccagccacgccctatggtgcggttcaaccaccaacatcgccaaccgttccctaccacgtgccgcgaccagtttctgtcgatcccaatcgacctggtacatccggttctctaggatatcctgcacactggcaggcgcaacagcaagctgtggcggatcagaataatcgtcaacactatgctgaattgcctaacaatcaaacgatggctccaggaagtcaatcattcccaatggagcttccaggtgatttctatcggtatgtactcaaagatcccgtgtgattttctttttcggatttcctgagacattgtactaacttggctttaacacccaaccatcaccacgctttcaacaacaatcccagccctcacccacaaacccgtcattatatggccgagcttcccccaactcactccagtcacattctcctgatccgaacgtgcatcgatggtcgcaaggaacaaatgggcaaccaagtccatcaatgaacagctcgcgaccgacatcgtattcatcagatccaggcatcatgggcccctcgccagggctcgactgtaagggctataccgccgagctgtcaacacatcgggagacagccgaggaatatgctgaccgtttggggaaaccgccggcgtacagacatcattctcaaggctatgcttacaatcctgcagactatgccagggccgggcgatagatgaggagtctatgggtcccaattcaatgtcaagcatgccaactaatgtatgagtagcaatcgatcaatctagtgtgcattgttcagtatcatggtgttttggatagggttgcggggagttattgataccgtttgatgttatgcccaattgttggcgttggcggggcatttccatgccagatgtttactggattatgttactgcgaactgttttcatttaaataaaagaaagtttcttaactttccatgcgtacttgcgatagtgccccgtgtcagaacgcaatagcaaaagcgtaggactgaacgtagcatcataggaattttattacccaga

SEQ ID NO: 10657 - DNA, 1482 bp, Muscodor strobelii
  misc_feature: SGI cDNA ID NO. 563391
  misc_feature: Encodes the peptide sequence at SEQ ID NO 10658
atgtctaacgcatttcgactcgacagccctggcgccaatactggaggtgtctcactttccggggttcatccaggcattttccgtccgccaggatcaccatcgctatcgagctcgacctatctgcctggtacgcaagccgacgcagcgacgccagttccgaccgcaaaacgcaaacggctcgggccgagagaatcgacgcctttcagcgattggaactcggcggttgatactgcatacggcacgccgagtgcctccgttgagttcggctcgcgattgaacggacaagaggggaggtacgttctgggccgcatagaatcgccgcctttcggagcggccaagaaagagcttgcgcatatcgaggacagcatttgttcagacgtgaactacagacgcggtctcgggtcaaagcggtcacatgacgatatggactcacccgcttggagaccggtgactggagctcagcaaccttccggttctcctggctggagcgcatttgccataaatacgattggtggtgttgtgggcaaagtctgggacttttgcacagcaggtgcttttcgtggattctacgccggaggaggacgaggttatgatgtttcccgagaggcgcaatcacgatcaacccatcattccccaaaaccaaccgtcacaccacttgactatgactccacccctctgcctggtggtttccctgaactcgaagagccgatttactacgaccgcggaactcccgagtccacaccaccacctgccgcaaagcggcgccagatctctgattcgcggccgaatgatgaaattaggaggaactgggtcatggttggggagacagctaatacaaatcggccgcgctcgacggcatcgcgtgcctcatctcggcctcctactcaacatcctatcacgccgtctctggctcgccgcattaataagcctgttggtcgcttgagtactccaaatttcaaccgtcatcccccgagtagagccagtcaagcaggcttttcaccagccgcggaacgcgaaccagcaagccacgcaagctttgcatcttccagatcgcccgtcgtgacgtccccaatgccgagcaggatacccattcctatcagccgtccacaatctcccagcactcactcaactccacatttctcccaacaaccctctcgaataccgagcccgagtccgtacgctaagcggggccataggaggactcaaagcgctatgccggctgcgactgcttctcaggggaagaagatcagaagaagagagtcgcttcaggaagttcaacagaacagctcgagactggatgccgaagctagaagtctgacgtcgaagcgcataaaagaggagaaggagacggacactagaattaatgattttaatgcccgtcttcaggacatgattcgccaaggtcaggaggcattgggtacgacgttcgaggttgatatggatgatgatgattatgggatggatccgtgggaggatgaatga

SEQ ID NO: 10658 - protein, 493 aa, Muscodor strobelii
  misc_feature: SGI Peptide ID NO. 563391
  misc_feature (20)..(493): NCBI GI: 261352615 Blast Desc: conserved [Verticillium albo-atrum VaMs.102]
  misc_feature (25)..(493): NCBI GI: 171691242 Blast Desc: protein product [Podospora anserina] gi|170945569|emb|CAP71682.1| protein product [Podospora anserina]
  misc_feature (15)..(493): NCBI GI: 256729627 Blast Desc: NECHADRAFT_70952 [Nectria haematococca mpVI 77-13-4]
  misc_feature (15)..(484): NCBI GI: 46122573 Blast Desc: FG05664.1 [Gibberella zeae PH-1]
  misc_feature (10)..(278): NCBI GI: 85083062 Blast Desc: NCU04469 [Neurospora crassa OR74A] gi|28918122|gb|EAA27802.1| [Neurospora crassa OR74A]
  misc_feature (4)..(493): NCBI GI: 39945804 Blast Desc: MGG_08022 [Magnaporthe grisea 70-15] gi|145019256|gb|EDK03484.1| MGG_08022 [Magnaporthe grisea 70-15]
  misc_feature (162)..(491): NCBI GI: 225559185 Blast Desc: conserved [Ajellomyces capsulatus G186AR]
  misc_feature (162)..(491): NCBI GI: 240282117 Blast Desc: conserved [Ajellomyces capsulatus H143]
  misc_feature (159)..(485): NCBI GI: 238840065 Blast Desc: conserved [Microsporum canis CBS 113480]
  misc_feature (157)..(485): NCBI GI: 119178647 Blast Desc: CIMG_08136 [Coccidioides immitis RS]
MSNAFRLDSPGANTGGVSLSGVHPGIFRPPGSPSLSSSTYLPGTQADAATPVPTAKRKRLGPRESTPFSDWNSAVDTAYGTPSASVEFGSRLNGQEGRYVLGRIESPPFGAAKKELAHIEDSICSDVNYRRGLGSKRSHDDMDSPAWRPVTGAQQPSGSPGWSAFAINTIGGVVGKVWDFCTAGAFRGFYAGGGRGYDVSREAQSRSTHHSPKPTVTPLDYDSTPLPGGFPELEEPIYYDRGTPESTPPPAAKRRQISDSRPNDEIRRNWVMVGETANTNRPRSTASRASSRPPTQHPITPSLARRINKPVGRLSTPNFNRHPPSRASQAGFSPAAEREPASHASFASSRSPVVTSPMPSRIPIPISRPQSPSTHSTPHFSQQPSRIPSPSPYAKRGHRRTQSAMPAATASQGKKIRRRESLQEVQQNSSRLDAEARSLTSKRIKEEKETDTRINDFNARLQDMIRQGQEALGTTFEVDMDDDDYGMDPWEDE

SEQ ID NO: 10659 - DNA, 4227 bp, Muscodor strobelii
  misc_feature: SGI EST ID NO. CUFF.25416.0
  misc_feature: Variant of the nucleotide sequence at SEQ ID NO 10657
caatgatagcccctgcaaattgcaatcaccggccgctacacatcgtgccccgccacggtgagggaatcttagtggggcaaatcgcttgctctagaaatcatgaacaactgcgtttggaagcaagtcaataaaccaagcacctaaaacattacgcaaagtcttactacttgattgactggtttgactcaaaatcgctttatagtctctgcttcttcccactccgttcaaccccttctcatcgaacttgccttttcttccacccaatttctgccaaaattcgcactcgaagatacagcgatcacggcggagcgatctgcctctctctcagctgcaattcccagagtcaaaatgtcgccgcaagccaccaatggcagtggcaaaaattttgccgatcccggtatcgtgcctgcacctcaagtttctggcccgtggtcagtagccaaagttctcaagacgatcacgcccgcgcctcccgccgagggcaccaacacccctatctcctactttcacgccctagaaagactcaagacgaacaagcgcgaaggatggcggcggttcgggatcgaaaggtaagcaagttcgcgtaggatggcccggtagacatgagagctgatgggaatcctcagaggcgaatcgatatctgatcacatgtatcgcatgtcactaatgagcatgctctgcccgccgtcgctcgcgccgaaactcgatctgtttaaatgcatgaagatgtgcctggtccatgacatggccgagtcattcgttggagatatcacgccagtcgatggcgttgcgaagcctgagaaaagccgacgggaggccgagaccatggactacatctccaagaatctgcttggaaaggtgtatggtggtctggcaggcgaggagatcagagcaatctggcaagaatatgaggactcaaagacgctggacagccactacgtgcacgacttggacaagatcgagcttctgacgcagatggtggagtacgagaagcggtccaacaaggcgcttgatctcggcgagtttgcatacgtctctaccaagatcgtgctcccagaaatcaaggaatgggccgacggtcttttgcgagagcgcgacgaattttggggacaggtagagcatatccgcggcgaggagcgtgcaggtggtgtggatgctgagaagcttaagcaacaggaggcctattacaacaaggacagtgatgcgacatcttgatcagtgtcactgctaacgggtggttttctcacgtcacggcgtttttagcacggcgttttgactgaagatccggttagaagtggaagcaggcgcactgtgagagaggttaggtgcatgatagattaagggactctccgtccaatgataaaatgaagtaattagacgaaagcaaatgatatagcacgataacacgacgtgtaagatgatggtcgtatccttttcaccaaggaatacaatactcctatccgtaaatctgattcgcttttgtcgcattttgcttgcattggtgaggtacgacaacagtctcgttttggttgagatccctctaacggagcgcctgtcattcgacgaggtctaactgctgatggctccaatcaagatcggttccaacatgcacatggctattgcaactcgcatgcgctgcatttgagtagtggggcacggcacgctggcccagcaacggtaatacaacaaaatgagagtcgcgcactaggcaaacttgcgacccctgatgatattgagcaagatggtgaaatgaaccgatgcaacaatttcaggacccaaaatttcgttgcgaatccaaatcaagcgtgcaaacaccatttgagagaaacgacagtggcactactccttcgccgcgtgtcaggcgtatcttatcaggccaacgccaatcaccaatacgtcacgcagccatatgcattagctgctttccctgcttggatccctcgggtcatctgtctcgtctgctgcgactgggggtagacgcgagctgtgggcgccgtcatcgccatcgccatctagccaaggccagcacacagcgccacatcacataatactgtatctgtgccaggcagacgcaggactgctaaacaccatcgactagtaggtcacgcccgtttctcgtcgcaaaggtcttcggctgtagccgattgcatttgcaccatcccaactcaattccccgagacagcctcagacctcccagcaagcgatacgacagacggcgcaacctcttcacagacccagagtgtgggtcgcagtacagtgacttgcatccttgaaatttaaatccctagacaccgcagttacgtatttttgacaacgtgaaggtgtgcaaggttccttcgcattcaacggctaagagtcgtttgcttctgtttgaaaacaaccatcgccttccttcggcgggtcgaccaccgtaactagggaccttgcgcccttatcaaaaactttatcaaccctctaacgagcttgatatctgagaaatgtcattcagccctggaatcctcatgtctaacgcatttcgactcgacagccctggcgccaatactggaggtgtctcactttccggggttcatccaggcattttccgtccgccaggatcaccatcgctatcgagctcgacctatctgcctggtacgcaagccgacgcagcgacgccagttccgaccgcaaaacgcaaacggctcgggccgagagaatcgacgcctttcagcgattggaactcggcggttgatactgcatacggcacgccgagtgcctccgttgagttcggctcgcgattgaacggacaagaggggaggtacgttctgggccgcatagaatcgccgcctttcggagcggccaagaaagagcttgcgcatatcgaggacagcatttgttcagacgtgaactacagacgcggtctcgggtcaaagcggtcacatgacgatatggactcacccgcttggagaccggtgactggagctcagcaaccttccggttctcctggctggagcgcatttgccataaatacgattggtggtgttgtgggcaaagtctgggacttttgcacagcaggtgcttttcgtggattctacgccggaggaggacgaggttatgatgtttcccgagaggcgcaatcacgatcaacccatcattccccaaaaccaaccgtcacaccacttgactatgactccacccctctgcctggtggtttccctgaactcgaagagccgatttactacgaccgcggaactcccgagtccacaccaccacctgccgcaaagcggcgccagatctctgattcgcggccgaatgatgaaattaggaggaactgggtcatggttggggagacagctaatacaaatcggccgcgctcgacggcatcgcgtgcctcatctcggcctcctactcaacatcctatcacgccgtctctggctcgccgcattaataagcctgttggtcgcttgagtactccaaatttcaaccgtcatcccccgagtagagccagtcaagcaggcttttcaccagccgcggaacgcgaaccagcaagccacgcaagctttgcatcttccagatcgcccgtcgtgacgtccccaatgccgagcaggatacccattcctatcagccgtccacaatctcccagcactcactcaactccacatttctcccaacaaccctctcgaataccgagcccgagtccgtacgctaagcggggccataggaggactcaaagcgctatgccggctgcgactgcttctcaggggaagaagatcagaagaagagagtcgcttcaggaagttcaacagaacagctcgagactggatgccgaagctagaagtctgacgtcgaagcgcataaaagaggagaaggagacggacactagaattaatgattttaatgcccgtcttcaggacatgattcgccaaggtcaggaggcattgggtacgacgttcgaggttgatatggatgatgatgattatgggatggatccgtgggaggatgaatgagaacttcaacagtctttccaattgagttgcagttccaaaggaacgaggtggacgacacatgtaattgtattttgtttggcgcgtggcgttcaaatactgggtcgataccctcagtccattaggcagcctcccggtgatgccttaagtggctttgttgtatatatacacttgtaatgatcttacgtctaatgtcaatgttttgttgctacattcatatgggacgctgtaggtgataatggtaaat

SEQ ID NO: 10660 - DNA, 810 bp, Muscodor strobelii
  misc_feature: SGI cDNA ID NO. 563392
  misc_feature: Encodes the peptide sequence at SEQ ID NO 10661
atgtcgccgcaagccaccaatggcagtggcaaaaattttgccgatcccggtatcgtgcctgcacctcaagtttctggcccgtggtcagtagccaaagttctcaagacgatcacgcccgcgcctcccgccgagggcaccaacacccctatctcctactttcacgccctagaaagactcaagacgaacaagcgcgaaggatggcggcggttcgggatcgaaagaggcgaatcgatatctgatcacatgtatcgcatgtcactaatgagcatgctctgcccgccgtcgctcgcgccgaaactcgatctgtttaaatgcatgaagatgtgcctggtccatgacatggccgagtcattcgttggagatatcacgccagtcgatggcgttgcgaagcctgagaaaagccgacgggaggccgagaccatggactacatctccaagaatctgcttggaaaggtgtatggtggtctggcaggcgaggagatcagagcaatctggcaagaatatgaggactcaaagacgctggacagccactacgtgcacgacttggacaagatcgagcttctgacgcagatggtggagtacgagaagcggtccaacaaggcgcttgatctcggcgagtttgcatacgtctctaccaagatcgtgctcccagaaatcaaggaatgggccgacggtcttttgcgagagcgcgacgaattttggggacaggtagagcatatccgcggcgaggagcgtgcaggtggtgtggatgctgagaagcttaagcaacaggaggcctattacaacaaggacagtgatgcgacatcttga

SEQ ID NO: 10661 - protein, 269 aa, Muscodor strobelii
  misc_feature: SGI Peptide ID NO. 563392
  misc_feature (1)..(264): NCBI GI: 171691244 Blast Desc: protein product [Podospora anserina] gi|170945570|emb|CAP71683.1| protein product [Podospora anserina]
  misc_feature (14)..(263): NCBI GI: 256729626 Blast Desc: [Nectria haematococca mpVI 77-13-4]
  misc_feature (13)..(263): NCBI GI: 46122575 Blast Desc: FG05665.1 [Gibberella zeae PH-1]
  misc_feature (1)..(264): NCBI GI: 116195270 Blast Desc: CHGG_04233 [Chaetomium globosum CBS 148.51] gi|88180146|gb|EAQ87614.1| CHGG_04233 [Chaetomium globosum CBS 148.51]
  misc_feature (14)..(261): NCBI GI: 85083065 Blast Desc: NCU04470 [Neurospora crassa OR74A] gi|28918123|gb|EAA27803.1| conserved [Neurospora crassa OR74A]
  misc_feature (9)..(261): NCBI GI: 156032509 Blast Desc: SS1G_13952 [Sclerotinia sclerotiorum 1980] gi|154699354|gb|EDN99092.1| SS1G_13952 [Sclerotinia sclerotiorum 1980]
  misc_feature (11)..(263): NCBI GI: 39945802 Blast Desc: MGG_08021 [Magnaporthe grisea 70-15] gi|145019255|gb|EDK03483.1| MGG_08021 [Magnaporthe grisea 70-15]
  misc_feature (28)..(234): NCBI GI: 238496465 Blast Desc: HD family hydrolase, [Aspergillus flavus NRRL3357] gi|220694348|gb|EED50692.1| HD family hydrolase, [Aspergillus flavus NRRL3357]
  misc_feature (28)..(234): NCBI GI: 189210343 Blast Desc: HD domain containing protein [Pyrenophora tritici-repentis Pt-1C-BFP] gi|187977596|gb|EDU44222.1| HD domain containing protein [Pyrenophora tritici-repentis Pt-1C-BFP]
  misc_feature (28)..(234): NCBI GI: 119481211 Blast Desc: HD family hydrolase, [Neosartorya fischeri NRRL 181] gi|119408788|gb|EAW18737.1| HD family hydrolase, [Neosartorya fischeri NRRL 181]
MSPQATNGSGKNFADPGIVPAPQVSGPWSVAKVLKTITPAPPAEGTNTPISYFHALERLKTNKREGWRRFGIERGESISDHMYRMSLMSMLCPPSLAPKLDLFKCMKMCLVHDMAESFVGDITPVDGVAKPEKSRREAETMDYISKNLLGKVYGGLAGEEIRAIWQEYEDSKTLDSHYVHDLDKIELLTQMVEYEKRSNKALDLGEFAYVSTKIVLPEIKEWADGLLRERDEFWGQVEHIRGEERAGGVDAEKLKQQEAYYNKDSDATS

SEQ ID NO: 10662 - DNA, 4227 bp, Muscodor strobelii; identical to SEQ ID NO: 10659
  misc_feature: SGI EST ID NO. CUFF.25416.0
  misc_feature: Variant of the nucleotide sequence at SEQ ID NO 10660

SEQ ID NO: 10663 - DNA, 621 bp, Muscodor strobelii
  misc_feature: SGI cDNA ID NO. 563393
  misc_feature: Encodes the peptide sequence at SEQ ID NO 10664
atgacgaggcagtatagccgtgtggcctctccttcagaggcatacacagcatctacatatgagcgcaaagaagaccataagcccaaagccgcaaccgatacagaagacctttatatccttgccctaaaaacagacccaaaacaccaagcgcacatgtcacagctacgacgacaatattttcctgccaaactcctgaaagttgatgcccacatcacacttttccatgccctccctggttcactattggataccatcatggcggatcttgctcatctctcctcatcagcgggaaccttccctatcaatgctcagcggccctttcgcatggcgaaaggtgtgggtctgtcggtctccgggcttgcgaaagctgagtctatcttcacagagcttcagtccaagtggtgggacaagctgagtatacaagacaaaaggaaattcaaaggtcattacacgcttatgaacaaagtcaacgatgagaatgagataataagatgtctcgatgagctgaaaagagatttcaaaggtaatgagggtgtggtcacggggctaagtctttggcgttacgatcgcgggttttggcagcaccgtgaagacttcccatttcacaattcaccttcatga

SEQ ID NO: 10664 - protein, 206 aa, Muscodor strobelii
  misc_feature: SGI Peptide ID NO. 563393
  misc_feature (20)..(201): NCBI GI: 256728123 Blast Desc: NECHADRAFT_54332 [Nectria haematococca mpVI 77-13-4]
  misc_feature (28)..(201): NCBI GI: 46115476 Blast Desc: FG03580.1 [Gibberella zeae PH-1]
  misc_feature (20)..(201): NCBI GI: 169607226 Blast Desc: SNOG_06668 [Phaeosphaeria nodorum SN15] gi|111065379|gb|EAT86499.1| SNOG_06668 [Phaeosphaeria nodorum SN15]
  misc_feature (23)..(197): NCBI GI: 189190968 Blast Desc: conserved [Pyrenophora tritici-repentis Pt-1C-BFP] gi|187973429|gb|EDU40928.1| conserved [Pyrenophora tritici-repentis Pt-1C-BFP]
  misc_feature (38)..(191): NCBI GI: 154319379 Blast Desc: BC1G_02641 [Botryotinia fuckeliana B05.10] gi|150857072|gb|EDN32264.1| BC1G_02641 [Botryotinia fuckeliana B05.10]
  misc_feature (25)..(206): NCBI GI: 168017118 Blast Desc: [Physcomitrella patens subsp. patens] gi|162687781|gb|EDQ74162.1| [Physcomitrella patens subsp. patens]
  misc_feature (39)..(201): NCBI GI: 209963936 Blast Desc: RC1_0602 [Rhodospirillum centenum SW] gi|209957402|gb|ACI98038.1| RC1_0602 [Rhodospirillum centenum SW]
  misc_feature (39)..(205): NCBI GI: 284031887 Blast Desc: Kfla_3968 [Kribbella flavida DSM 17836] gi|283811180|gb|ADB33019.1| conserved [Kribbella flavida DSM 17836]
  misc_feature (39)..(206): NCBI GI: 114704847 Blast Desc: FP2506_07921 [Fulvimarina pelagi HTCC2506] gi|114539632|gb|EAU42752.1| FP2506_07921 [Fulvimarina pelagi HTCC2506]
  misc_feature (39)..(193): NCBI GI: 284989697 Blast Desc: Gobs_1121 [Geodermatophilus obscurus DSM 43160] gi|284062942|gb|ADB73880.1| conserved [Geodermatophilus obscurus DSM 43160]
MTRQYSRVASPSEAYTASTYERKEDHKPKAATDTEDLYILALKTDPKHQAHMSQLRRQYFPAKLLKVDAHITLFHALPGSLLDTIMADLAHLSSSAGTFPINAQRPFRMAKGVGLSVSGLAKAESIFTELQSKWWDKLSIQDKRKFKGHYTLMNKVNDENEIIRCLDELKRDFKGNEGVVTGLSLWRYDRGFWQHREDFPFHNSPS

SEQ ID NO: 10665 - DNA, 828 bp, Muscodor strobelii
  misc_feature: SGI EST ID NO. CUFF.25135.0
  misc_feature: Variant of the nucleotide sequence at SEQ ID NO 10663
cgaagtgttagttaaaggctttccaatgttttcaatgttttcaataccaagacttacctttttgtataattctcttgccaataccatgacgaggcagtatagccgtgtggcctctccttcagaggcatacacagcatctacatatgagcgcaaagaagaccataagcccaaagccgcaaccgatacagaagacctttatatccttgccctaaaaacagacccaaaacaccaagcgcacatgtcacagctacgacgacaatattttcctgccaaactcctgaaagttgatgcccacatcacacttttccatgccctccctggttcactattggataccatcatggcggatcttgctcatctctcctcatcagcgggaaccttccctatcaatgctcagcggccctttcgcatggcgaaaggtgtgggtctgtcggtctccgggcttgcgaaagctgagtctatcttcacagagcttcagtccaagtggtgggacaagctgagtatacaagacaaaaggaaattcaaaggtcattacacgcttatgaacaaagtcaacgatgagaatgagataataagatgtctcgatgagctgaaaagagatttcaaaggtaatgagggtgtggtcacggggctaagtctttggcgttacgatcgcgggttttggcagcaccgtgaagacttcccatttcacaattcaccttcatgaggatcatttgcaacactggttatcagtctgtagcgagcatgcttttgaatatagaacccatggcgatcatacagagcaaatcttggaaatcgctgtcaccctttgcactgagcatcaacaag

SEQ ID NO: 10666 - DNA, 1065 bp, Muscodor strobelii
  misc_feature: SGI cDNA ID NO. 563394
  misc_feature: Encodes the peptide sequence at SEQ ID NO 10667
atgtcgaagaaaactgacccaagtgaggtaatcgagctcttaaaagctcttatcaacatagatagcacgagtgaaaaggaacttgagatcgggctgtattttgagaagtatctacaaggccttgggtacacggtagaacgaatccctattgctccagattcaacgaggcacaatgtctatgcgtacctagggaaagagcgaaaggctcgtctgcttgttacttcacacatggacactgtgcctccacatattcccttcagtatcgaaggtgacttaatccgtggccgaggcgcttgcgacgaccttggtcctgctgtggcacaaatatttgctgttgaagagttgcgctctgagggaaagctcaaggatggcgatgtgagctttttatttgtcgttggcgaggagaaagggggccctggaatgcttgctgctaatgaaatggggttaacttgggatgccggccttttcggtgaaccaactgaaggcaaattggcgaaaggccacaaaggtaatctcgtattcgaggtcgttgcgactggcaaagcctgccactctggatatccacatcttggcaagagcgcaacattatctctcctcaacgcactcaacgatttgactgcagtagagtggcctgtatctgagcttctcggtccatcaacgctgaatatcggcaaacttgagggtggcgaaggatacaatatccttgccgcctctgctaaagcgctgtgcagcattcgtatcgctacagatattgaagtaatcaagaagacggtatctgaagttctcagcaagcatgcaaacgttaatcccgagtttaagtttcaatatgtatgcgctaacgttatcacacccgaaacattactagagtgggaatttgaaggctttgaggccgcacccatggcgtatggaacagatgtcccaaggttgcgcggtgaccacaaaaaggtactatatggccccggaacgattcgagtcgcgcatggtaaagacgagcagattcttgtaagcgaaattatggagtgcatcaaaggaaataagatactggcgatggagctgcttaagtag

SEQ ID NO: 10667 - protein, 354 aa, Muscodor strobelii
  misc_feature: SGI Peptide ID NO. 563394
  misc_feature (166)..(270): Pfam Id: PF07687 Pfam Desc: Peptidase dimerisation domain
  misc_feature (72)..(351): Pfam Id: PF01546 Pfam Desc: Peptidase family M20/M25/M40
  misc_feature (11)..(353): NCBI GI: 169614031 Blast Desc: SNOG_10150 [Phaeosphaeria nodorum SN15] gi|111061365|gb|EAT82485.1| SNOG_10150 [Phaeosphaeria nodorum SN15]
  misc_feature (7)..(353): NCBI GI: 115401204 Blast Desc: [Aspergillus terreus NIH2624] gi|114190131|gb|EAU31831.1| [Aspergillus terreus NIH2624]
  misc_feature (8)..(354): NCBI GI: 238507061 Blast Desc: peptidase, [Aspergillus flavus NRRL3357] gi|220689445|gb|EED45796.1| peptidase, [Aspergillus flavus NRRL3357]
  misc_feature (10)..(354): NCBI GI: 119479341 Blast Desc: peptidase, [Neosartorya fischeri NRRL 181] gi|119407853|gb|EAW17802.1| peptidase, [Neosartorya fischeri NRRL 181]
  misc_feature (10)..(354): NCBI GI: 70997832 Blast Desc: peptidase [Aspergillus fumigatus Af293] gi|66851284|gb|EAL91610.1| peptidase, [Aspergillus fumigatus Af293] gi|159126619|gb|EDP51735.1| peptidase, [Aspergillus A1163]
  misc_feature (8)..(354): NCBI GI: 169786117 Blast Desc: [Aspergillus oryzae RIB40] gi|83776267|dbj|BAE66386.1| protein product [Aspergillus oryzae]
  misc_feature (5)..(295): NCBI GI: 121713378 Blast Desc: peptidase, [Aspergillus clavatus NRRL 1] gi|119402453|gb|EAW12874.1| peptidase, [Aspergillus clavatus NRRL 1]
  misc_feature (10)..(294): NCBI GI: 169611370 Blast Desc: SNOG_08796 [Phaeosphaeria nodorum SN15] gi|160702273|gb|EAT83964.2| SNOG_08796 [Phaeosphaeria nodorum SN15]
  misc_feature (8)..(353): NCBI GI: 256725306 Blast Desc: NECHADRAFT_45632 [Nectria haematococca mpVI 77-13-4]
  misc_feature (3)..(344): NCBI GI: 146419570 Blast Desc: PGUG_01417 [Pichia guilliermondii ATCC 6260]
  misc_feature (1)..(266): SWISSPROT Homolog: EC 3.5.1.18 Succinyl-diaminopimelate desuccinylase
MSKKTDPSEVIELLKALINIDSTSEKELEIGLYFEKYLQGLGYTVERIPIAPDSTRHNVYAYLGKERKARLLVTSHMDTVPPHIPFSIEGDLIRGRGACDDLGPAVAQIFAVEELRSEGKLKDGDVSFLFVVGEEKGGPGMLAANEMGLTWDAGLFGEPTEGKLAKGHKGNLVFEVVATGKACHSGYPHLGKSATLSLLNALNDLTAVEWPVSELLGPSTLNIGKLEGGEGYNILAASAKALCSIRIATDIEVIKKTVSEVLSKHANVNPEFKFQYVCANVITPETLLEWEFEGFEAAPMAYGTDVPRLRGDHKKVLYGPGTIRVAHGKDEQILVSEIMECIKGNKILAMELLK

SEQ ID NO: 10668 - DNA, 1897 bp, Muscodor strobelii
  misc_feature: SGI EST ID NO. CUFF.25138.0
  misc_feature: Variant of the nucleotide sequence at SEQ ID NO 10666
caatgattctcaaaagtagacgttatagaatccctagcgcaggaaataaaccagacatctcttgaggcaaattgaaacgactagttgatctatattgtattgtatctccgcgaattgaggttgctcctttcgccctcgctacatgtatgttacaatgcgaggtacctcatgtgcctatctctgtcgtgaccaggtaactctactgtacttaaggaacgcccactttcttacccctgcgccagcgacacagcgcacatttatgtccatacacaaatatgtcagattccaacattacaatgtctacagataatctagattatttgttttcatggagattcaaattttcaccacgtggccggcctgtcattgtgatgccgaagtgcggaagcggaggcagccccacctcggctgatcggttctgttgcatgaaacctctttctactcgtcaactacaagaatgaaactatgagccgatctgaattgcattgagtacttcaagcacggtattcggaggcaaatgtgtcatgttcaatccgaatccgttcaaactataaccaactcgctccacaagcttcttcatcgggcctcgcgtttaacgccttacctcattcctctggacttcacgttagcaaagtcacaatgtcgaagaaaactgacccaagtgaggtaatcgagctcttaaaagctcttatcaacatagatagcacgagtgaaaaggaacttgagatcgggctgtattttgagaagtatctacaaggccttgggtacacggtagaacgaatccctattgctccagattcaacgaggcacaatgtctatgcgtacctagggaaagagcgaaaggctcgtctgcttgttacttcacacatggacactgtgcctccacatattcccttcagtatcgaaggtgacttaatccgtggccgaggcgcttgcgacgaccttggtcctgctgtggcacaaatatttgctgttgaagagttgcgctctgagggaaagctcaaggatggcgatgtgagctttttatttgtcgttggcgaggagaaagggggccctggaatgcttgctgctaatgaaatggggttaacttgggatgccggccttttcggtgaaccaactgaaggcaaattggcgaaaggccacaaaggtaatctcgtattcgaggtcgttgcgactggcaaagcctgccactctggatatccacatcttggcaagagcgcaacattatctctcctcaacgcactcaacgatttgactgcagtagagtggcctgtatctgagcttctcggtccatcaacgctgaatatcggcaaacttgagggtggcgaaggatacaatatccttgccgcctctgctaaagcgctgtgcagcattcgtatcgctacagatattgaagtaatcaagaagacggtatctgaagttctcagcaagcatgcaaacgttaatcccgagtttaagtttcaatatgcccgaaacattactagagtgggaatttgaaggctttgaggccgcacccatggcgtatggaacagatgtcccaaggttgcgcggtgaccacaaaaaggtactatatggccccggaacgattcgagtcgcgcatggtaaagacgagcagattcttgtaagcgaaattatggagtgcatcaaaggaaataagatactggcgatggagctgcttaagtagagcgatattcaattttgtgtgatctctgggaacgcgacgcaatgccggctgatagtttcggccccatacacctttcgtctaagatgcagccgttcgcttcagtctcatatactgacaaattgtaaagatgaattcgtcatgtgaggggcacactatcgtgtataaaacaatctagaatctgccatgtagctagcagcgtctatttgaaggtag

SEQ ID NO: 10669 - DNA, 1503 bp, Muscodor strobelii
  misc_feature: SGI cDNA ID NO. 563395
  misc_feature: Encodes the peptide sequence at SEQ ID NO 10670
atggcaccactcccacctcttgatctcaataacatccaaggtgatattctcgagggattagctaagaaaaatgagtgtttcttcttctttcgcattaaggcaaatcaggtctctgcttttcaacgagacttgaaatctttgctaccacttgtcacgtcggtgacagaagccaagagattccacgcgtcgattcacgaagcgaagagagaagctgctcgtgaagatcgaaaatgctctgtgttggagatgcatgccgtgaacattgcattctctcaaaaaggcttagatattctcggtattggaagcaacgggagcattggcgatcacgtcttccaaaatggaatgcgcgcagatgcggaagccctaggtgacgacctctctgattgggacgcagccttcagccaagatatacatggcgtgatcctcatagctgcgagctgtgatcaaatactacagcgaactgttgatcgtatcaaggcgactttccaggtcggccatcgagattccacggtggaagaagttcttcagctcaatggacatacaagaccaggcgctaagagtgggcacgagcattttggattcaacgatggtctttctcaacccgctatccaggggatcgacgccggcgttatttctgaaccgaaccaaactcccattgcacaaggtgtagttcttcttggtcgcaatggcgataatggcgacgtgacgccaggccagcccgctcctggtatcacgcgcccggcatgggcggtagacggaagcttccttgcgttccggtatctgaagcaacttgtacccgaatttgatgctttctgtgaagcaaacgcgctgaaagtgcctttccctccagcgcctggagatccaactggtgccgagctactaggcgcccgtttggttggcagatggaaaagtggtgctcctacagacctgactccaattcgtgacgatccctcattagcgaagagcgaagattttcgcttcgatcccagtagccaagaaagatgcccatttgctgcacatatccggaaaaccaaccctcgttccgatttagatgccttcggtggcacagaagtgcgccgcatccttcgtcgtggcattgcctttggtccagaggtaacagacggagagaagaaagcaaaaagaagctctgatagcgagaaactagagcgtggcctcttgttcgcctgctatcagagcaatctaagcaatggcttccacttcatgcagaagagctgggccaacactgcaaactttcccccgaaaaagagttcaactcctcccgttcctcagcctggcattgatccaattattggagtagctccggcaggggctacgcgacaaatggtgggcgcatctcctgatgttgccgatgctaatgtgccgctggattttggtgcgaagtgggtcatccctcggggtggcgagtacttcttctcaccttccatctccgcattgaagtcgacgtttgcagagcacgacagccatggccatcacgaactatag

SEQ ID NO: 10670 - protein, 500 aa, Muscodor strobelii
  misc_feature: SGI Peptide ID NO. 563395
  misc_feature (2)..(490): NCBI GI: 169867340 Blast Desc: CC1G_02714 [Coprinopsis cinerea okayama7#130] gi|116498803|gb|EAU81698.1| CC1G_02714 [Coprinopsis cinerea okayama7#130]
  misc_feature (7)..(490): NCBI GI: 170109348 Blast Desc: [Laccaria bicolor S238N-H82] gi|164639152|gb|EDR03425.1| [Laccaria bicolor S238N-H82]
  misc_feature (7)..(490): NCBI GI: 4760440 Blast Desc: DyP [Thanatephorus cucumeris]
  misc_feature (7)..(490): NCBI GI: 116666994 Blast Desc: DyP [Thanatephorus cucumeris]
  misc_feature (7)..(490): NCBI GI: 261266602 Blast Desc: MSP2_MARSO RecName: Full=Peroxidase 2; Short=MsP2; Flags: Precursor gi|165932185|emb|CAP53935.1| fungal peroxidase [Marasmius scorodonius]
  misc_feature (5)..(485): NCBI GI: 146324890 Blast Desc: Dyp-type peroxidase family protein [Aspergillus fumigatus Af293] gi|129556608|gb|EAL86784.2| Dyp-type peroxidase family protein [Aspergillus fumigatus Af293]
  misc_feature (7)..(487): NCBI GI: 119483222 Blast Desc: NFIA_028160 [Neosartorya fischeri NRRL 181] gi|119409794|gb|EAW19742.1| conserved [Neosartorya fischeri NRRL 181]
  misc_feature (7)..(490): NCBI GI: 261266601 Blast Desc: MSP1_MARSO RecName: Full=Peroxidase 1; Short=MsP1; Flags: Precursor gi|165932183|emb|CAP53934.1| fungal peroxidase [Marasmius scorodonius]
  misc_feature (6)..(490): NCBI GI: 169851080 Blast Desc: CC1G_02493 [Coprinopsis cinerea okayama7#130] gi|116506709|gb|EAU89604.1| CC1G_02493 [Coprinopsis cinerea okayama7#130]
  misc_feature (9)..(490): NCBI GI: 20386144 Blast Desc: AF468656_1 peroxidase TAP [Termitomyces albuminosus]
MAPLPPLDLNNIQGDILEGLAKKNECFFFFRIKANQVSAFQRDLKSLLPLVTSVTEAKRFHASIHEAKREAAREDRKCSVLEMHAVNIAFSQKGLDILGIGSNGSIGDHVFQNGMRADAEALGDDLSDWDAAFSQDIHGVILIAASCDQILQRTVDRIKATFQVGHRDSTVEEVLQLNGHTRPGAKSGHEHFGFNDGLSQPAIQGIDAGVISEPNQTPIAQGVVLLGRNGDNGDVTPGQPAPGITRPAWAVDGSFLAFRYLKQLVPEFDAFCEANALKVPFPPAPGDPTGAELLGARLVGRWKSGAPTDLTPIRDDPSLAKSEDFRFDPSSQERCPFAAHIRKTNPRSDLDAFGGTEVRRILRRGIAFGPEVTDGEKKAKRSSDSEKLERGLLFACYQSNLSNGFHFMQKSWANTANFPPKKSSTPPVPQPGIDPIIGVAPAGATRQMVGASPDVADANVPLDFGAKWVIPRGGEYFFSPSISALKSTFAEHDSHGHHEL

SEQ ID NO: 10671 - DNA, 819 bp, Muscodor strobelii
  misc_feature: SGI cDNA ID NO. 563396
  misc_feature: Encodes the peptide sequence at SEQ ID NO 10672
atgtctaaaccatcgtttgttttcgtcccaggttcgttcgctcctcctgagttctacgataacatcgtcacggatatcacggcaaagggttatgagatcaaggcccttcaacttcccaccgttggacctttattaggaggcaacttagacaagacaccaccgacattatatgacgatgctaaactcatcgctggagaagttgagaagctcgctgatgctggaaaggaggtgattctggtagcacattcatatggtggcatgccaacaacccagagtacgaaaggcctatcagtcgaggcgcggcatgcacaagggaaaaaaggaggacttgtgcggctagcgtacaaaacctgtgtcgtgggctcagccaagaaggaccaggaacaagctgcacaagacgtactggaggcgcgtgaggggaaaaactttatggcgcctgatgagaaaggctggctgcatttaattgacacagacaatatggccgtggactgctttaatgatatgccaagggatgatgctatccgatggcaaaagcttttcacgaatcactcagcagtgagcttctcgaacaaacttacgcaccctggatatttggatgtggcagtatctttcttgttctgtgaacaagacaacattgtatcaccagtagtggcgcaacgagcaattgaaatgatgaatcgggaacgtagatcggttaaacctgatgcctccgaagtcgatgttacgagagtacagtcagggcattgtcccacctcaagcgttcctgatcaggtcgtggactggctcctcaacctacctgaagtgcaggctgcccgctag

SEQ ID NO: 10672 - protein, 272 aa, Muscodor strobelii
  misc_feature: SGI Peptide ID NO. 563396
  misc_feature (1)..(267): NCBI GI: 256731604 Blast Desc: NECHADRAFT_105405 [Nectria haematococca mpVI 77-13-4]
  misc_feature (3)..(265): NCBI GI: 145235011 Blast Desc: An03g02580 [Aspergillus niger] gi|134057830|emb|CAK38225.1| protein product [Aspergillus niger]
  misc_feature (2)..(265): NCBI GI: 169785883 Blast Desc: [Aspergillus oryzae RIB40] gi|83776150|dbj|BAE66269.1| protein product [Aspergillus oryzae]
  misc_feature (2)..(265): NCBI GI: 238506793 Blast Desc: conserved [Aspergillus flavus NRRL3357] gi|220689311|gb|EED45662.1| conserved [Aspergillus flavus NRRL3357]
  misc_feature (1)..(198): NCBI GI: 115391807 Blast Desc: [Aspergillus terreus NIH2624] gi|114194332|gb|EAU36032.1| [Aspergillus terreus NIH2624]
  misc_feature (1)..(258): NCBI GI: 46114548 Blast Desc: FG03116.1 [Gibberella zeae PH-1]
  misc_feature (4)..(260): NCBI GI: 39963918 Blast Desc: MGG_09797 [Magnaporthe grisea 70-15] gi|145011096|gb|EDJ95752.1| MGG_09797 [Magnaporthe grisea 70-15]
  misc_feature (1)..(265): NCBI GI: 169603309 Blast Desc: SNOG_04663 [Phaeosphaeria nodorum SN15] gi|160706370|gb|EAT88423.2| SNOG_04663 [Phaeosphaeria nodorum SN15]
  misc_feature (1)..(262): NCBI GI: 225557199 Blast Desc: conserved [Ajellomyces capsulatus G186AR]
  misc_feature (2)..(265): NCBI GI: 145235585 Blast Desc: An03g05620 [Aspergillus niger] gi|134058128|emb|CAK38322.1| protein product [Aspergillus niger]
MSKPSFVFVPGSFAPPEFYDNIVTDITAKGYEIKALQLPTVGPLLGGNLDKTPPTLYDDAKLIAGEVEKLADAGKEVILVAHSYGGMPTTQSTKGLSVEARHAQGKKGGLVRLAYKTCVVGSAKKDQEQAAQDVLEAREGKNFMAPDEKGWLHLIDTDNMAVDCFNDMPRDDAIRWQKLFTNHSAVSFSNKLTHPGYLDVAVSFLFCEQDNIVSPVVAQRAIEMMNRERRSVKPDASEVDVTRVQSGHCPTSSVPDQVVDWLLNLPEVQAAR

SEQ ID NO: 10673 - DNA, 1578 bp, Muscodor strobelii
  misc_feature: SGI cDNA ID NO. 563397
  misc_feature: Encodes the peptide sequence at SEQ ID NO 10674
atgtcttcaaacgaatgccagaaagtcatcactatcaccagcgcagaagactttcaggatgattcgctctcggactgcacaggaacaaaggggttcaaccaagtagatgtcaaagcccctgaagccatcgggctcagcttcacgaactttactggcggtattaacattactgtcactgatagtccgcaactacaaatcctccaattcagtactctttctgcagtcgaaaatctagtactcgatcagttaccggctctcacgcagatctccttgccaaaactcgctgctgatgcggagacactcgtttatcctgtcacgtacacgtttacgccaagcatatccattacgaatgcgttaaaattcggcgggcttagtttgccgtcgctgaatgccctgggcaatctcgttatacggcatgttccaaggcgacaaacgacgataggagggttgagcaacattaccaccgctctttcgatactatcagacaactacctctcgtaccctggattacgatctgttgacaatctcacgctcattggctatgagggctgcgaattctctttaccaaatctcgactttgcaggagacttcagattttcaaacgccataaatagccagttgcaaactcccgcgttaactataaacggttccttctctttagacacgatacgatacgaccgagctgaaaacgaaaccacatttgaagttcagcctgatcctggagctagtaccgccgagaatctgatcgatgttcgcaatttgacatcagttggggtgaacgcgactatacagttgaactccaatgcgcgtctagatctatctgggcttacaaaagtcggcgggacatttttggtaacggacaacactaattgcacgttcgatctaaaaagcttatccgaagttgtcgatacattgtccatagtggacaatacccagaccaccattccccagcttttcagccttcaaaaagcttcagacatacatctccgtgggaacattgacacatcatcaggaccaaacatatttccgtcgttgagttttgtctctggcgttgtcacagtcgaggcttggaactccgatttcaattgttcgagactagtcacgcagcaacagcaaggcctaatcaatcaattgcgatgcaacggtacaaacaatggcacaatagacacttcatcaagtccaaacaccccacagccatcgcaagaatcgcagacgtccatcacagggttgtcaagcgggggctgggctgggatcggagtagcaatcggtgtcattgtcctgtcgttgataggcttattcttctactttagacgacgatttgcgaagctcgaggccaagcgcgcgggctctgaagacgtttctacgatccaacagccggttgcaccttcatactatgacccgtctgagggatactcggtgggcagttcaaccgcacagagcataacatacatctacgaggccgatggcgatgcgtctagattcgaaaagccgaatgactatgttcattatggagaactatacgtgccgccttccgaactcgacatacatagccaacagcatcatcacgtgaaagggtaa

SEQ ID NO: 10674 - protein, 525 aa, Muscodor strobelii
  misc_feature: SGI Peptide ID NO. 563397
MSSNECQKVITITSAEDFQDDSLSDCTGTKGFNQVDVKAPEAIGLSFTNFTGGINITVTDSPQLQILQFSTLSAVENLVLDQLPALTQISLPKLAADAETLVYPVTYTFTPSISITNALKFGGLSLPSLNALGNLVIRHVPRRQTTIGGLSNITTALSILSDNYLSYPGLRSVDNLTLIGYEGCEFSLPNLDFAGDFRFSNAINSQLQTPALTINGSFSLDTIRYDRAENETTFEVQPDPGASTAENLIDVRNLTSVGVNATIQLNSNARLDLSGLTKVGGTFLVTDNTNCTFDLKSLSEVVDTLSIVDNTQTTIPQLFSLQKASDIHLRGNIDTSSGPNIFPSLSFVSGVVTVEAWNSDFNCSRLVTQQQQGLINQLRCNGTNNGTIDTSSSPNTPQPSQESQTSITGLSSGGWAGIGVAIGVIVLSLIGLFFYFRRRFAKLEAKRAGSEDVSTIQQPVAPSYYDPSEGYSVGSSTAQSITYIYEADGDASRFEKPNDYVHYGELYVPPSELDIHSQQHHHVKG

SEQ ID NO: 10675 - DNA, 1068 bp, Muscodor strobelii
  misc_feature: SGI cDNA ID NO. 563398
  misc_feature: Encodes the peptide sequence at SEQ ID NO 10676
atgtcaaccgcaaacacccgcataacagcaactgaaacccggccaggtggcccacctgccgacttgaatgtccagcctatgaacgccaaagtccgatgggcaactaagaatccgccagcagaccccaaggtctcatttgccggcaagaatgttcttgttacaggtgcgaatacaggtctcggtttccaagcagctatcaagtatgcgtctttgggggctgatcgattgataattggcgttcgatcaaaggcgaaaggggaggaaaccaagcagcgtatcactaaagccaccggttacaccaagatcgatatcttgactgtggacttggtctcctttgattctgtccaatcctttgtcgaagagcttagaaaatgcacaaccgataagcttgacgttgcactcctcaatgccggtatagggaatcccaactttcaaaaatcgcctacgggctgggaaatggccgtccaagtcaacgtcttatctacagccctcatggcagtactcctcttgcctctgctacgcgctacggccgctcgagggggtgcggcgcctcacctgacatttgtcaacagtaacggccatgacatggtgaagcatgaatggcttggtcctgatgggagcctgctccaagcaacaaatacagaaaagggatgggtcagcgataatagctatgccatggtcaaattagcgggcatggctgtcatgaagcacatcgctcaggttgccgcaggaaacggcggtccgacgtcaccagacatcattgtcaatgctgtctgccctggtttgtgtagaacggagcttggtcgcaactacggtgccatccaaagaatcattggaaacatcgtcatttcctttattgctaggacggcagagcagggatcccgtactctcgtgtctggcacagcactcggtcctgaaagccacggtcgcttctggcacctcgacgtgctttatccgatcggcgagctggcgaaggacgaaacgttgatgaagaggacctggaatgagatctgggaagtcatctccaggaaccggccggaattggagaaggcacttaatggcgaatag

SEQ ID NO: 10676 - protein, 355 aa, Muscodor strobelii
  misc_feature: SGI Peptide ID NO. 563398
  misc_feature (49)..(186): Pfam Id: PF00106 Pfam Desc: short chain dehydrogenase
  misc_feature (49)..(175): Pfam Id: PF00106 Pfam Desc: short chain dehydrogenase
  misc_feature (31)..(349): NCBI GI: 116181234 Blast Desc: CHGG_01245 [Chaetomium globosum CBS 148.51] gi|88185542|gb|EAQ93010.1| CHGG_01245 [Chaetomium globosum CBS 148.51]
  misc_feature (8)..(348): NCBI GI: 145612853 Blast Desc: MGG_08389 [Magnaporthe grisea 70-15] gi|145019954|gb|EDK04182.1| MGG_08389 [Magnaporthe grisea 70-15]
  misc_feature (24)..(354): NCBI GI: 261188878 Blast Desc: short-chain dehydrogenase/reductase [Ajellomyces dermatitidis SLH14081] gi|239591994|gb|EEQ74575.1| short-chain dehydrogenase/reductase [Ajellomyces dermatitidis SLH14081]
  misc_feature (29)..(354): NCBI GI: 169595156 Blast Desc: SNOG_00312 [Phaeosphaeria nodorum SN15] gi|111070687|gb|EAT91807.1| SNOG_00312 [Phaeosphaeria nodorum SN15]
  misc_feature (24)..(354): NCBI GI: 239615318 Blast Desc: short-chain dehydrogenase/reductase [Ajellomyces dermatitidis ER-3]
  misc_feature (18)..(349): NCBI GI: 121712004 Blast Desc: ACLA_061530 [Aspergillus clavatus NRRL 1] gi|119401769|gb|EAW12191.1| ACLA_061530 [Aspergillus clavatus NRRL 1]
  misc_feature (39)..(353): NCBI GI: 119186485 Blast Desc: CIMG_03290 [Coccidioides immitis RS]
  misc_feature (38)..(350): NCBI GI: 258563218 Blast Desc: [Uncinocarpus reesii 1704] gi|237907861|gb|EEP82262.1| [Uncinocarpus reesii 1704]
  misc_feature (39)..(353): NCBI GI: 240108554 Blast Desc: oxidoreductase,short chain dehydrogenase, [Coccidioides posadasii C735 delta SOWgp]
  misc_feature (38)..(350): NCBI GI: 238844027 Blast Desc: WW domain-containing oxidoreductase [Microsporum canis CBS 113480]
MSTANTRITATETRPGGPPADLNVQPMNAKVRWATKNPPADPKVSFAGKNVLVTGANTGLGFQAAIKYASLGADRLIIGVRSKAKGEETKQRITKATGYTKIDILTVDLVSFDSVQSFVEELRKCTTDKLDVALLNAGIGNPNFQKSPTGWEMAVQVNVLSTALMAVLLLPLLRATAARGGAAPHLTFVNSNGHDMVKHEWLGPDGSLLQATNTEKGWVSDNSYAMVKLAGMAVMKHIAQVAAGNGGPTSPDIIVNAVCPGLCRTELGRNYGAIQRIIGNIVISFIARTAEQGSRTLVSGTALGPESHGRFWHLDVLYPIGELAKDETLMKRTWNEIWEVISRNRPELEKALNGE

SEQ ID NO: 10677 - DNA, 1206 bp, Muscodor strobelii
  misc_feature: SGI EST ID NO. CUFF.25178.0
  misc_feature: Variant of the nucleotide sequence at SEQ ID NO 10675
attttccactaagtctcctggaacgggataaatcaaagcgtagcatcatgtcaaccgcaaacacccgcataacagcaactgaaacccggccaggtggcccacctgccgacttgaatgtccagcctatgaacgccaaagtccgatgggcaactaagaatccgccagcagaccccaaggtctcatttgccggcaagaatgttcttgttacaggtgcgaatacaggtctcggtttccaagcagctatcaagtatgcgtctttgggggctgatcgattgataattggcgttcgatcaaaggcgaaaggggaggaaaccaagcagcgtatcactaaagccaccggttacaccaagatcgatatcttgactgtggacttggtctcctttgattctgtccaatcctttgtcgaagagcttagaaaatgcacaaccgataagcttgacgttgcactcctcaatgccggtatagggaatcccaactttcaaaaatcgcctacgggctgggaaatggccgtccaagtcaacgtcttatctacagccctcatggcagtactcctcttgcctctgctacgcgctacggccgctcgagggggtgcggcgcctcacctgacatttgtcaacagtaacggccatgacatggtgaagcatgaatggcttggtcctgatgggagcctgctccaagcaacaaatacagaaaagggatgggtcagcgataatagctatgccatggtcaaattagcgggcatggctgtcatgaagcacatcgctcaggttgccgcaggaaacggcggtccgacgtcaccagacatcattgtcaatgctgtctgccctggtttgtgtagaacggagcttggtcgcaactacggtgccatccaaagaatcattggaaacatcgtcatttcctttattgctaggacggcagagcagggatcccgtactctcgtgtctggcacagcactcggtcctgaaagccacggtcgcttctggcacctcgacgtgctttatccgatcggcgagctggcgaaggacgaaacgttgatgaagaggacctggaatgagatctgggaagtcatctccaggaaccggccggaattggagaaggcacttaatggcgaatagatgtgatttgaagacaacaaggtataaagaaattagatatgagcgtaacgggcattagtcaccaatacctatagtctattgatataaaaac

SEQ ID NO: 10678 - DNA, 732 bp, Muscodor strobelii
  misc_feature: SGI cDNA ID NO. 563399
  misc_feature: Encodes the peptide sequence at SEQ ID NO 10679
atgtcccaaaatatctatgaccaagatgagttcttcaagaactatattcaactcgacaggcagactgaggggttagacggggcaccggaatggccacaactacgggctatgctaccgaatttcacaggtaccaaggtactagaccttggatgtgggtttggctggttctcacggtttgcgcgctcgcaaggcgcggaaatggttcgcgcgatcgatatatccgcgaagatgctcacaaaagcgcgcgacatgacaacagacgacgcgatcctatacgaacaggcggatattgaggacctcgagcttgatgagcgtgaatacgatgtcgttttcagctcgctcacatttcactaccttactaaattgccgaagctgttgggagaaatatcgaagagcttgaagccgggtggcaagctgattttctctgtcgagcatccgctgtttacagcacctacgaagccgaagctcgaagtcgatgaaagtggcaataaggtgtggctggtagatgcatatcaacgcgagggtctgcgacttcggagttggttcgtagatggtgtgcggaagcagcatcgcaaaatggggacatacatcaatttgctcctaagtcttgggatgagactgacagactttgttgaatggtgcccgtctgaagaggacttggctcacaagcctcattgggatgtcgaactcgtgaggccaacattcttgttagtagcagcgacgaaagactga

SEQ ID NO: 10679 - protein, 243 aa, Muscodor strobelii
  misc_feature: SGI Peptide ID NO. 563399
  misc_feature (47)..(141): Pfam Id: PF08241 Pfam Desc: Methyltransferase domain
  misc_feature (47)..(139): Pfam Id: PF08242 Pfam Desc: Methyltransferase domain
  misc_feature (1)..(243): NCBI GI: 46138265 Blast Desc: FG10647.1 [Gibberella zeae PH-1]
  misc_feature (1)..(242): NCBI GI: 261407428 Blast Desc: Methyltransferase type 11 [Geobacillus sp. Y412MC10] gi|261283891|gb|ACX65862.1| Methyltransferase type 11 [Geobacillus sp. Y412MC10]
  misc_feature (1)..(242): NCBI GI: 76810305 Blast Desc: methyl transferase [Burkholderia pseudomallei 1710b] gi|76579758|gb|ABA49233.1| methyl transferase [Burkholderia pseudomallei 1710b]
  misc_feature (1)..(242): NCBI GI: 254191807 Blast Desc: conserved [Burkholderia pseudomallei Pasteur 52237] gi|157939478|gb|EDO95148.1| conserved [Burkholderia pseudomallei Pasteur 52237]
  misc_feature (1)..(242): NCBI GI: 254298916 Blast Desc: conserved [Burkholderia pseudomallei 406e] gi|157809225|gb|EDO86395.1| conserved [Burkholderia pseudomallei 406e]
  misc_feature (1)..(242): NCBI GI: 53725910 Blast Desc: BMA2164 [Burkholderia mallei ATCC 23344] gi|67643993|ref|ZP_00442736.1| methyl transferase [Burkholderia mallei GB8 horse 4] gi|121601633|ref|YP_992092.1| BMASAVP1_A0747
  misc_feature (1)..(242): NCBI GI: 254258187 Blast Desc: conserved [Burkholderia pseudomallei 1710a] gi|254216876|gb|EET06260.1| conserved [Burkholderia pseudomallei 1710a]
  misc_feature (1)..(242): NCBI GI: 53720250 Blast Desc: BPSL2640 [Burkholderia pseudomallei K96243] gi|167739801|ref|ZP_02412575.1| Bpse14_17192 [Burkholderia pseudomallei 14] gi|167817024|ref|ZP_02448704.1| Bpse9_17940 91]
  misc_feature (1)..(242): NCBI GI: 126451950 Blast Desc: BURPS1106A_3087 [Burkholderia pseudomallei 1106a] gi|242315023|ref|ZP_04814039.1| methyltransferase domain protein [Burkholderia pseudomallei 1106b] gi|126225592|gb|ABN89132.1|
  misc_feature (1)..(242): NCBI GI: 167825436 Blast Desc: Bpseu9_17333 [Burkholderia pseudomallei 9]
  misc_feature (22)..(142): SWISSPROT Homolog: EC 2.1.1.103 Phosphoethanolamine N-methyltransferase
MSQNIYDQDEFFKNYIQLDRQTEGLDGAPEWPQLRAMLPNFTGTKVLDLGCGFGWFSRFARSQGAEMVRAIDISAKMLTKARDMTTDDAILYEQADIEDLELDEREYDVVFSSLTFHYLTKLPKLLGEISKSLKPGGKLIFSVEHPLFTAPTKPKLEVDESGNKVWLVDAYQREGLRLRSWFVDGVRKQHRKMGTYINLLLSLGMRLTDFVEWCPSEEDLAHKPHWDVELVRPTFLLVAATKD

SEQ ID NO: 10680 - DNA, 995 bp, Muscodor strobelii
  misc_feature: SGI EST ID NO. CUFF.25201.0
  misc_feature: Variant of the nucleotide sequence at SEQ ID NO 10678
ttggctcatgtgagaataatctgaacatttttgcctgcatttgattgatgatctgaaagtatgaaactatttgaagactttttttcattgcgcgttttcgccactacggtccaagaagctaccaaatccccaatcaaaaccacattagcaaccagcaggagctcttaataacagaaaaggctcataagatcttaacaatgtcccaaaatatctatgaccaagatgagttcttcaagaactatattcaactcgacaggcagactgaggggttagacggggcaccggaatggccacaactacgggctatgctaccgaatttcacaggtaccaaggtactagaccttggatgtgggtttggctggttctcacggtttgcgcgctcgcaaggcgcggaaatggttcgcgcgatcgatatatccgcgaagatgctcacaaaagcgcgcgacatgacaacagacgacgcgatcctatacgaacaggcggatattgaggacctcgagcttgatgagcgtgaatacgatgtcgttttcagctcgctcacatttcactaccttactaaattgccgaagctgttgggagaaatatcgaagagcttgaagccgggtggcaagctgattttctctgtcgagcatccgctgtttacagcacctacgaagccgaagctcgaagtcgatgaaagtggcaataaggtgtggctggtagatgcatatcaacgcgagggtctgcgacttcggagttggttcgtagatggtgtgcggaagcagcatcgcaaaatggggacatacatcaatttgctcctaagtcttgggatgagactgacagactttgttgaatggtgcccgtctgaagaggacttggctcacaagcctcattgggatgtcgaactcgtgaggccaacattcttgttagtagcagcgacgaaagactgaaacgctcgaagcaggcaagagaaattgtagctacaaagaatattagtgaagaatcctcgatgatct

SEQ ID NO: 10681 - DNA, 1002 bp, Muscodor strobelii
  misc_feature: SGI cDNA ID NO. 563400
  misc_feature: Encodes the peptide sequence at SEQ ID NO 10682
atgcgaagcgccgcccgaatccacgccgttcgtagctaccttggccctctacgccgggagcgctctacatccattgcacttcgaggcttggcctcatcgtgctctttcgctcaaggccactctccagggtttccccatgcgcatcgacgactgcacactctcggctttgttcatcctagaccgcatcatgtgttgggagtggccacggataatatacgccagcttgaagcccctatgagccgcggcatccagcagcctgtgagcctttctcatcgcacgcctaacaccatctcgactgaattcaacgccgccgacaagcttgaaaggcatctgcgggctgacggccatcgtacttggggattcgtcgtgtatcgctgcacatattccagcgacccgctatgggactcatgtgtgcagcgcatcaatgcgtctgtccaaaaggccatggacctttacaatgggcgcgatctgctccaagagggctgcttcaagctcaccgtgattactgatgcgggcatgtttgatggggccagcacacagactgtgcgtcagcactttaggagctggtgtgcacgcatgtttcacgaagagcagggttcgcaagaggatatccaaagccgacatcagaaatcctcaccacaggattggggatcaccggtaaggtacggattctgtcttcaaattgacgagacctcaatgcagagtatcacctcggacgaaggcgagcgctgtgtcaaattgatcaaatgtgactgggaactacgagatgcggcagtgcaacagcacaaactcgacacaggaaagccaatggagagacagggtgagtcattcgatacggaggacgaccaagaattcccggctattgagagatgcaccgaaaaagacgtcgggtggatgaaggtgcagctagtcggcctcatgccggatttctacaccaatttgagagatccgaatctttggcatgttcaatatgttagaccaccggatattgcgacggcgtag

SEQ ID NO: 10682 - protein, 333 aa, Muscodor strobelii
  misc_feature: SGI Peptide ID NO. 563400
  misc_feature (90)..(330): NCBI GI: 119478744 Blast Desc: NFIA_074500 [Neosartorya fischeri NRRL 181] gi|119407581|gb|EAW17530.1| conserved [Neosartorya fischeri NRRL 181]
  misc_feature (88)..(331): NCBI GI: 255948322 Blast Desc: Pc22g09160 [Penicillium chrysogenum Wisconsin 54-1255] gi|211591945|emb|CAP98204.1| Pc22g09160 [Penicillium chrysogenum Wisconsin 54-1255]
  misc_feature (85)..(332): NCBI GI: 238483715 Blast Desc: muramidase, [Aspergillus flavus NRRL3357] gi|220701146|gb|EED57484.1| muramidase, [Aspergillus flavus NRRL3357]
  misc_feature (85)..(253): NCBI GI: 169766918 Blast Desc: [Aspergillus oryzae RIB40] gi|83765785|dbj|BAE55928.1| protein product [Aspergillus oryzae]
  misc_feature (90)..(300): NCBI GI: 115399684 Blast Desc: [Aspergillus terreus NIH2624] gi|114191112|gb|EAU32812.1| [Aspergillus terreus NIH2624]
  misc_feature (90)..(301): NCBI GI: 145242094 Blast Desc: An09g03770 [Aspergillus niger] gi|134078238|emb|CAK96819.1| [Aspergillus niger]
  misc_feature (111)..(330): NCBI GI: 238841571 Blast Desc: conserved [Microsporum canis CBS 113480]
  misc_feature (118)..(328): NCBI GI: 238844942 Blast Desc: conserved [Microsporum canis CBS 113480]
  misc_feature (107)..(331): NCBI GI: 255940032 Blast Desc: Pc16g04330 [Penicillium chrysogenum Wisconsin 54-1255] gi|211585408|emb|CAP93103.1| Pc16g04330 [Penicillium chrysogenum Wisconsin 54-1255]
  misc_feature (105)..(328): NCBI GI: 226277866 Blast Desc: conserved [Paracoccidioides brasiliensis Pb01]
MRSAARIHAVRSYLGPLRRERSTSIALRGLASSCSFAQGHSPGFPHAHRRLHTLGFVHPRPHHVLGVATDNIRQLEAPMSRGIQQPVSLSHRTPNTISTEFNAADKLERHLRADGHRTWGFVVYRCTYSSDPLWDSCVQRINASVQKAMDLYNGRDLLQEGCFKLTVITDAGMFDGASTQTVRQHFRSWCARMFHEEQGSQEDIQSRHQKSSPQDWGSPVRYGFCLQIDETSMQSITSDEGERCVKLIKCDWELRDAAVQQHKLDTGKPMERQGESFDTEDDQEFPAIERCTEKDVGWMKVQLVGLMPDFYTNLRDPNLWHVQYVRPPDIATA

SEQ ID NO: 10683 - DNA, 1252 bp, Muscodor strobelii
  misc_feature: SGI EST ID NO. CUFF.25204.0
  misc_feature: Variant of the nucleotide sequence at SEQ ID NO 10681
aaatacatgaattgggaatatgcacgagtgcaagattgtcggttccaaacattcttctgctttcaatacctgggcacaagcacataaggtagtggggatccgtaaggtacgttgccggttacgtgatgcgaagcgccgcccgaatccacgccgttcgtagctaccttggccctctacgccgggagcgctctacatccattgcacttcgaggcttggcctcatcgtgctctttcgctcaaggccactctccagggtttccccatgcgcatcgacgactgcacactctcggctttgttcatcctagaccgcatcatgtgttgggagtggccacggataatatacgccagcttgaagcccctatgagccgcggcatccagcagcctgtgagcctttctcatcgcacgcctaacaccatctcgactgaattcaacgccgccgacaagcttgaaaggcatctgcgggctgacggccatcgtacttggggattcgtcgtgtatcgctgcacatattccagcgacccgctatgggactcatgtgtgcagcgcatcaatgcgtctgtccaaaaggccatggacctttacaatgggcgcgatctgctccaagagggctgcttcaagctcaccgtgattactgatgcgggcatgtttgatggggccagcacacagactgtgcgtcagcactttaggagctggtgtgcacgcatgtttcacgaagagcagggttcgcaagaggatatccaaagccgacatcagaaatcctcaccacaggattggggatcaccggtaaggtacggattctgtcttcaaattgacgagacctcaatgcagagtatcacctcggacgaaggcgagcgctgtgtcaaattgatcaaatgtgactgggaactacgagatgcggcagtgcaacagcacaaactcgacacaggaaagccaatggagagacagggtgagtcattcgatacggaggacgaccaagaattcccggctattgagagatgcaccgaaaaagacgtcgggtggatgaaggtgcagctagtcggcctcatgccggatttctacaccaatttgagagatccgaatctttggcatgttcaatatgttagaccaccggatattgcgacggcgtagacgggtcacagcgaacggtatctgtaccttttaattcgagatttcttcaacaacgaccaacaacgacgagactggcttactctggaagaataatcagtctcgcatgttcgggcgtagaaacgtaa

SEQ ID NO: 10684 - DNA, 3942 bp, Muscodor strobelii
  misc_feature: SGI cDNA ID NO. 563401
  misc_feature: Encodes the peptide sequence at SEQ ID NO 10685
atgcaccccctgaatcccttcctagcagccttcttcaagccagggagctccgtcgccgcccagtgcacgcccatccaccaccacatcctgctcgtccccaccaccgagtccttcctgacctcccgcgagatcgagagcggcctgcctctgtcggacgtcgtcgccaccgacgagttcctggcgagtcatgtcctgcgcatccccgcgccgcccgccgcgggagggaaggacggcgtcggcaacctgcgcgagtggcgcggcaaggccaagcagtacaacaccctcaacggccgcaccgtcgtcatcaaggacgcctttgtcttcaccagcagcaagggcttcaagaacctcacgcagtcccagctgttgaccgacgccctctggcacgccgacaccaccgagccccgacaatggctgatctactacatatcccgtcctttgatcggcacctgggaggagatagaggtgcccagggccgtcttcgcagagggcatggccaagaagcaggcggccgaggcctctcgcaccgccgccatcgacagcggcgagcccagcttgccccggaagaaggagatcaagaacttccatgagctgctcaacaacttccctgccatcgcgaagcaaatgcacggcggcctggagaagctcttcaaagagttcaccaccatctttgagaagcctctcccgcctccaccctctgctatgaacatacccgatccgctcccagatggccctatagcagccgccatgaagaaggcccgctccaatagtgtgtcccacccaagggatggcgaggacggcgaacctgcagccaagccagatgccgagaattactatgccgaagacgacgaaaatgtcatgcgcgtgtctctcgagaccgctgtcacgaatgccattgaccttttccaaggcgtcgacaagcagcagctgtccatactcggcgccaccaccgagcttacagggcccttagtggagcgactgatcgagaggtatgtggccgagaatgttcaccatcttatatggccgcgtcttgccatgctacggcggcccgaagatcaggaattggaggccaagatccgacaaatggagtttatcgacatctcccagctaggcatcttcatagaaggcggtctcaagaagaagcgcgagctcgccgtgcgacttggttcggccgtcgaagagttccgaaaaatgttgaacgccgcgagcgcccaggagatgatggagattctgctcgccgcgatgcgggccgcaacccaagtcgcatcgcatccgggagcgggggctagcacgaggcctgcgtcggaaaagacggtcctgaccatcaacgctgatacactggtatccctacttctctttgttgtaatccgcgctggagtcaagaacttacaggcgcgattactctatatgaaacatttcatcttcgtcgatgatgtggagagcggtgagatgggatacgcgctcagcacctttgaagccgtgctgtcatatctgtatggcgattcaagcagcctgaggcgtgcgagtcgccgcaacaaatcattatgggacgcgacatcaaagggcgacgtgcctgagttaagaaggatcatggaagcggatgctagtgccattgatgatggagaatccaattcgtctcccatctctatacacgctccatctgtaagttggagcatgttgaacggttcctctcgaagatcgtcgactatctacacacccaccgagtcatactcgcagggatctggcttgagccatgtgtttcctttccaaaatcaatcatcagatacaatacacatacctatcaagcgtgtcaagagggtggctttggacactagaagtatgtctagcggatctgaattctcctatcactccaagtctggcagtatcgtgacactaggcagcggactcgagggcgacacttcggttgaacggctgtgtcagacgcagagttcttttggcgaatctatcccgatgatggctgttcaaaacgaacgccctgagtcactcaaatatctgctgtcactagaggagtttttctccatagacacaatattagaagacgccgataatgagggtacgacgctgctcagtgctgcggttcaattggggcatacggaactaattgatatcatcctcgactttgtcatggttaaaacaaccgaattgcgaattcgggattatttaatactgcaagatgtgcgcggtcgaagcgttgcgcattatctcttccacgccccaacgttgattgcaagaatcggtaggctcgttccctggtgccaaagggaccagaatggccagacgccactgtttgcactgtgcagatcttacgataatcctcattattacgagatggtgtacagtgggctggaggcggcgacgaatgcgcaaatcgacgggcagccgctacatgtcgacgatcacatcgacttgaaagggaacacgctactacatatcgtgaatgatccgcaattagcgttaaggatcctcatgcattgcgacgttgacgtaaatgcccaaaacgagaagaaattcactgccctcatggtagcaagtaaatacggtcgctttgacatggtgcgggcgctctactcggatactagagtggatatcgcagtgcgagaagcacgtggtctcactgccgtcgaacttgccaaagacgatgatgttcgtaatcgtatagatgacctggcattgtttactatgacgcccagcgatgacggacgggtcactggtgtcgtccggtcgttctttgttgaagatgccactatccgcctggttctgaagtcaggtgcacctgctgaccaaaatagctacaccgtaaccacatgcagacgctcgttcggggaattcgagcgtctcgccaacctactgtctgtagaaaatccagcttcctgggtacctaaagtagcaagccaacgatcgccttttcagattccttcgaaaccgtctagggctgttttgaaggagacacagatgcgtactgacgcttttcttaagattatgctgtcgcatcctacctttgcgacccacgagatgctatgggagttcttcttggttcccgatctccagaccgatatgatggaagagagaagccgcctcaagtcggagacgagagtggagaaagttcgagacgagttcgagcctctcgatgatgttcgtgaggtagagcaatttgtagatcatgcccgtgatatggttcgcagcgtcaattattccactaagagcgtggcgcgacgaatcaatgccacagccgtggtcgcacaagacctctacgatgcatctcgtttagtctctcgcggagtcgccaacttggctttcttacctgcaactcataaatccgcattcgatacttatgtacaaactctcgcaccgccggcatctaatccgccgcagactttccacgcctcatttttgtcgttgcagtcaacggtgcaagcgatgatctcagcactatctcgaccaccacagctcatctcacaaatcaaggatgctcgcaaagccatagaacgcaatcacaactctgtatcacgctccacgcgctggcctctcggtctgctcgacgaaactcgccagcgtctaaacgaggaaagagaggagaaagctagacgaacacagatcgaagtcgatgacttagggaaagaattacggtatacgcaacagacggtagctagtgagcttgccggatggcaggagatgcatgagcgcatggggagacgtgtgattaaggagttcgcgcgtaatatgctcattctagagcgcgaacgcatgcaagggatgaggagagcgctgcggaaacttcaggacaacaaccttggtcctgtgccaagcggaatcgtcgaagatgtgagatcaaatggggcagtcgtagtacgacagccgccgctgcctgatggggccgagtccagtgcaatgggcgaggcgtcagggagtcgtgtgagatag

SEQ ID NO: 10685 - protein, 1313 aa, Muscodor strobelii
  misc_feature: SGI Peptide ID NO. 563401
  misc_feature (388)..(503): Pfam Id: PF02204 Pfam Desc: Vacuolar sorting protein 9 (VPS9) domain
  misc_feature (1)..(1308): NCBI GI: 46111769 Blast Desc: FG02766.1 [Gibberella zeae PH-1]
  misc_feature (1)..(1274): NCBI GI: 171687435 Blast Desc: protein product [Podospora anserina] gi|170943679|emb|CAP69331.1| protein product [Podospora anserina]
  misc_feature (24)..(1267): NCBI GI: 156062032 Blast Desc: SS1G_01130 [Sclerotinia sclerotiorum 1980] gi|154696468|gb|EDN96206.1| SS1G_01130 [Sclerotinia sclerotiorum 1980]
  misc_feature (1)..(1264): NCBI GI: 116180784 Blast Desc: CHGG_01020 [Chaetomium globosum CBS 148.51] gi|88185317|gb|EAQ92785.1| CHGG_01020 [Chaetomium globosum CBS 148.51]
  misc_feature (74)..(1308): NCBI GI: 261357726 Blast Desc: VPS9 domain-containing protein [Verticillium albo-atrum VaMs.102]
  misc_feature (26)..(1275): NCBI GI: 145614728 Blast Desc: MGG_10958 [Magnaporthe grisea 70-15] gi|145021621|gb|EDK05750.1| MGG_10958 [Magnaporthe grisea 70-15]
  misc_feature (1)..(1267): NCBI GI: 85114273 Blast Desc: NCU02048 [Neurospora crassa OR74A] gi|28926460|gb|EAA35434.1| conserved [Neurospora crassa OR74A] gi|38566906|emb|CAE76210.1| conserved [Neurospora crassa]
  misc_feature (1)..(1274): NCBI GI: 70995179 Blast Desc: VPS9 domain protein [Aspergillus fumigatus Af293] gi|66849989|gb|EAL90316.1| VPS9 domain protein, [Aspergillus fumigatus Af293] gi|159131110|gb|EDP56223.1| VPS9 domain protein,
  misc_feature (4)..(1266): NCBI GI: 169607449 Blast Desc: SNOG_06781 [Phaeosphaeria nodorum SN15] gi|160701411|gb|EAT85432.2| SNOG_06781 [Phaeosphaeria nodorum SN15]
  misc_feature (1)..(1270): NCBI GI: 119496013 Blast Desc: VPS9 domain protein, [Neosartorya fischeri NRRL 181] gi|119412942|gb|EAW22883.1| VPS9 domain protein, [Neosartorya fischeri NRRL 181]
MHPLNPFLAAFFKPGSSVAAQCTPIHHHILLVPTTESFLTSREIESGLPLSDVVATDEFLASHVLRIPAPPAAGGKDGVGNLREWRGKAKQYNTLNGRTVVIKDAFVFTSSKGFKNLTQSQLLTDALWHADTTEPRQWLIYYISRPLIGTWEEIEVPRAVFAEGMAKKQAAEASRTAAIDSGEPSLPRKKEIKNFHELLNNFPAIAKQMHGGLEKLFKEFTTIFEKPLPPPPSAMNIPDPLPDGPIAAAMKKARSNSVSHPRDGEDGEPAAKPDAENYYAEDDENVMRVSLETAVTNAIDLFQGVDKQQLSILGATTELTGPLVERLIERYVAENVHHLIWPRLAMLRRPEDQELEAKIRQMEFIDISQLGIFIEGGLKKKRELAVRLGSAVEEFRKMLNAASAQEMMEILLAAMRAATQVASHPGAGASTRPASEKTVLTINADTLVSLLLFVVIRAGVKNLQARLLYMKHFIFVDDVESGEMGYALSTFEAVLSYLYGDSSSLRRASRRNKSLWDATSKGDVPELRRIMEADASAIDDGESNSSPISIHAPSVSWSMLNGSSRRSSTIYTPTESYSQGSGLSHVFPFQNQSSDTIHIPIKRVKRVALDTRSMSSGSEFSYHSKSGSIVTLGSGLEGDTSVERLCQTQSSFGESIPMMAVQNERPESLKYLLSLEEFFSIDTILEDADNEGTTLLSAAVQLGHTELIDIILDFVMVKTTELRIRDYLILQDVRGRSVAHYLFHAPTLIARIGRLVPWCQRDQNGQTPLFALCRSYDNPHYYEMVYSGLEAATNAQIDGQPLHVDDHIDLKGNTLLHIVNDPQLALRILMHCDVDVNAQNEKKFTALMVASKYGRFDMVRALYSDTRVDIAVREARGLTAVELAKDDDVRNRIDDLALFTMTPSDDGRVTGVVRSFFVEDATIRLVLKSGAPADQNSYTVTTCRRSFGEFERLANLLSVENPASWVPKVASQRSPFQIPSKPSRAVLKETQMRTDAFLKIMLSHPTFATHEMLWEFFLVPDLQTDMMEERSRLKSETRVEKVRDEFEPLDDVREVEQFVDHARDMVRSVNYSTKSVARRINATAVVAQDLYDASRLVSRGVANLAFLPATHKSAFDTYVQTLAPPASNPPQTFHASFLSLQSTVQAMISALSRPPQLISQIKDARKAIERNHNSVSRSTRWPLGLLDETRQRLNEEREEKARRTQIEVDDLGKELRYTQQTVASELAGWQEMHERMGRRVIKEFARNMLILERERMQGMRRALRKLQDNNLGPVPSGIVEDVRSNGAVVVRQPPLPDGAESSAMGEASGSRVR

SEQ ID NO: 10686 - DNA, 5133 bp, Muscodor strobelii
  misc_feature: SGI EST ID NO. CUFF.25268.1
  misc_feature: Variant of the nucleotide sequence at SEQ ID NO 10684
cagatctgccgtatcggtcactggcgtcattgtctagcttccagtccgcatgagacgccatactagttagtagatcctgggtgcgcagagccaagtgccgtgccgtagcgcatcgaggtcgatccaggcacccgaaagctgccgcctgtcgctggcattcgacttccgacatcccgacatctcgacatcacgacgtctcgacattgcgaccgccatcatcatctcggccaactaacctatcgctctccaacgttcgcatcgcttgcccacgtgcgcataactcgtgtcgtcttgcgatgtcatttgcgacgtccaaccggcctgcgcatcccttgtctcgatttccatttccatttccatccaatccacgattcaaccgcctctgcctcggccactctctgctttgcgccggctgcatgtagctctcggccgtcgtcgattgcacgcgcaacgcaccgagacatcgccccacgacgacgccttcgacgccctcgacgcccactccgccccggcagaccgcggcctgaatgcaccccctgaatcccttcctagcagccttcttcaagccagggagctccgtcgccgcccagtgcacgcccatccaccaccacatcctgctcgtccccaccaccgagtccttcctgacctcccgcgagatcgagagcggcctgcctctgtcggacgtcgtcgccaccgacgagttcctggcgagtcatgtcctgcgcatccccgcgccgcccgccgcgggagggaaggacggcgtcggcaacctgcgcgagtggcgcggcaaggccaagcagtacaacaccctcaacggccgcaccgtcgtcatcaaggacgcctttgtcttcaccagcagcaagggcttcaagaacctcacgcagtcccagctgttgaccgacgccctctggcacgccgacaccaccgagccccgacaatggctgatctactacatatcccgtcctttgatcggcacctgggaggagatagaggtgcccagggccgtcttcgcagagggcatggccaagaagcaggcggccgaggcctctcgcaccgccgccatcgacagcggcgagcccagcttgccccggaagaaggagatcaagaacttccatgagctgctcaacaacttccctgccatcgcgaagcaaatgcacggcggcctggagaagctcttcaaagagttcaccaccatctttgagaagcctctcccgcctccaccctctgctatgaacatacccgatccgctcccagatggccctatagcagccgccatgaagaaggcccgctccaatagtgtgtcccacccaagggatggcgaggacggcgaacctgcagccaagccagatgccgagaattactatgccgaagacgacgaaaatgtcatgcgcgtgtctctcgagaccgctgtcacgaatgccattgaccttttccaaggcgtcgacaagcagcagctgtccatactcggcgccaccaccgagcttacagggcccttagtggagcgactgatcgagaggtatgtggccgagaatgttcaccatcttatatggccgcgtcttgccatgctacggcggcccgaagatcaggaattggaggccaagatccgacaaatggagtttatcgacatctcccagctaggcatcttcatagaaggcggtctcaagaagaagcgcgagctcgccgtgcgacttggttcggccgtcgaagagttccgaaaaatgttgaacgccgcgagcgcccaggagatgatggagattctgctcgccgcgatgcgggccgcaacccaagtcgcatcgcatccgggagcgggggctagcacgaggcctgcgtcggaaaagacggtcctgaccatcaacgctgatacactggtatccctacttctctttgttgtaatccgcgctggagtcaagaacttacaggcgcgattactctatatgaaacatttcatcttcgtcgatgatgtggagagcggtgagatgggatacgcgctcagcacctttgaagccgtgctgtcatatctgtatggcgattcaagcagcctgaggcgtgcgagtcgccgcaacaaatcattatgggacgcgacatcaaagggcgacgtgcctgagttaagaaggatcatggaagcggatgctagtgccattgatgatggagaatccaattcgtctcccatctctatacacgctccatctgtaagttggagcatgttgaacggttcctctcgaagatcgtcgactatctacacacccaccgagtcatactcgcagggatctggcttgagccatgtgtttcctttccaaaatcaatcatcagatacaatacacatacctatcaagcgtgtcaagagggtggctttggacactagaagtatgtctagcggatctgaattctcctatcactccaagtctggcagtatcgtgacactaggcagcggactcgagggcgacacttcggttgaacggctgtgtcagacgcagagttcttttggcgaatctatcccgatgatggctgttcaaaacgaacgccctgagtcactcaaatatctgctgtcactagaggagtttttctccatagacacaatattagaagacgccgataatgagggtacgacgctgctcagtgctgcggttcaattggggcatacggaactaattgatatcatcctcgactttgtcatggttaaaacaaccgaattgcgaattcgggattatttaatactgcaagatgtgcgcggtcgaagcgttgcgcattatctcttccacgccccaacgttgattgcaagaatcggtaggctcgttccctggtgccaaagggaccagaatggccagacgccactgtttgcactgtgcagatcttacgataatcctcattattacgagatggtgtacagtgggctggaggcggcgacgaatgcgcaaatcgacgggcagccgctacatgtcgacgatcacatcgacttgaaagggaacacgctactacatatcgtgaatgatccgcaattagcgttaaggatcctcatgcattgcgacgttgacgtaaatgcccaaaacgagaagaaattcactgccctcatggtagcaagtaaatacggtcgctttgacatggtgcgggcgctctactcggatactagagtggatatcgcagtgcgagaagcacgtggtctcactgccgtcgaacttgccaaagacgatgatgttcgtaatcgtatagatgacctggcattgtttactatgacgcccagcgatgacggacgggtcactggtgtcgtccggtcgttctttgttgaagatgccactatccgcctggttctgaagtcaggtgcacctgctgaccaaaatagctacaccgtaaccacatgcagacgctcgttcggggaattcgagcgtctcgccaacctactgtctgtagaaaatccagcttcctgggtacctaaagtagcaagccaacgatcgccttttcagattccttcgaaaccgtctagggctgttttgaaggagacacagatgcgtactgacgcttttcttaagattatgctgtcgcatcctacctttgcgacccacgagatgctatgggagttcttcttggttcccgatctccagaccgatatgatggaagagagaagccgcctcaagtcggagacgagagtggagaaagttcgagacgagttcgagcctctcgatgatgttcgtgaggtagagcaatttgtagatcatgcccgtgatatggttcgcagcgtcaattattccactaagagcgtggcgcgacgaatcaatgccacagccgtggtcgcacaagacctctacgatgcatctcgtttagtctctcgcggagtcgccaacttggctttcttacctgcaactcataaatccgcattcgatacttatgtacaaactctcgcaccgccggcatctaatccgccgcagactttccacgcctcatttttgtcgttgcagtcaacggtgcaagcgatgatctcagcactatctcgaccaccacagctcatctcacaaatcaaggatgctcgcaaagccatagaacgcaatcacaactctgtatcacgctccacgcgctggcctctcggtctgctcgacgaaactcgccagcgtctaaacgaggaaagagaggagaaagctagacgaacacagatcgaagtcgatgacttagggaaagaattacggtatacgcaacagacggtagctagtgagcttgccggatggcaggagatgcatgagcgcatggggagacgtgtgattaaggagttcgcgcgtaatatgctcattctagagcgcgaacgcatgcaagggatgaggagagcgctgcggaaacttcaggacaacaaccttggtcctgtgccaagcggaatcgtcgaagatgtgagatcaaatggggcagtcgtagtacgacagccgccgctgcctgatggggccgagtccagtgcaatgggcgaggcgtcagggagtcgtgtgagatagggtaccgagggtaatagactggagtgttacgtataatagaccgcagtcatttgatcaggatgactagatatgagaggaatagacagagatcctcttgttgcactttcaagtttgagacccaggcttggatgtgattattccgtgtttgtcccgaggcttcgaagaggttcgtactctcacattcaatgaggcgcggagcaacagcttcgcggacgaggacctggaagtttaccggcacttacaaccgggaggcagcccatcgggctctaatacacgagatacatgtcggacagtcctcctctaagaggctcaaggcgatgatttgcaaacgggggcggcctgtttcaacgaccgccgccacgcgcgcggcttcttggcttacgtacttaccggccctcgtcacctacagaacggcattggcgaagagcctcaacgagttgcgtggcggtgtttgttccggaggtgtggaaatccgttatgaagacgaataggagtgggtccaagcgtgacctttgggtatgtaagatggcgttgggattgaggccactgggttggccgcatacggctgttatagagcaacaatgttcatttactactactagtaaatttgtaagtggtatagagattggatgaatcaggtgaaagactggctcgaggcttgaga

SEQ ID NO: 10687 - DNA, 561 bp, Muscodor strobelii
  misc_feature: SGI cDNA ID NO. 563402
  misc_feature: Encodes the peptide sequence at SEQ ID NO 10688
gatgataccgctgaggaagtggaagttgatgagaaagaagaagaagaaatagaggaagacgacgaggacgaggatgaggacgaggatgaggacgagacagatgagggcatgccggatgaggatgaggaagaggaggtagggaccgtgattgagctgcttgtgccgctatataagctcgagactgaggacccgggcgctgtgtggagtatattgctcgtgggtagaagcgagcttgaactcaacgtcaagctactgccgctggaagctggactggtgccgatcgtacggcttgaagtctgcaccaatgatggatctcgtgttgtgttcacgaagctcgatcccgtgctcaacgatgatgtctgcgacactattgctctacttcgtgtttcctgcgtaagcgtattcgacgaacttgagaccttcgaggcgctagttgaaacggtgctcgtgctctgccgttctggaacaataacgccgttttggcactgggtttctgcgaaattgtgtcagagacattttgcagacgcacagtcggctttccgctcacagcactcaatctga

SEQ ID NO: 10688 - protein, 186 aa, Muscodor strobelii
  misc_feature: SGI Peptide ID NO. 563402
DDTAEEVEVDEKEEEEIEEDDEDEDEDEDEDETDEGMPDEDEEEEVGTVIELLVPLYKLETEDPGAVWSILLVGRSELELNVKLLPLEAGLVPIVRLEVCTNDGSRVVFTKLDPVLNDDVCDTIALLRVSCVSVFDELETFEALVETVLVLCRSGTITPFWHWVSAKLCQRHFADAQSAFRSQHSI

SEQ ID NO: 10689 - DNA, 1623 bp, Muscodor strobelii
  misc_feature: SGI cDNA ID NO. 563403
  misc_feature: Encodes the peptide sequence at SEQ ID NO 10690
atggcaggtccgggcatgttgtacgtgactatgcagcctgagccaggcttgccattacagcagtttcatgaatggtacaataacgagcatggcccgacgcggttgaagataccacaaatattcactaacggtttccgataccaagctattgacggcgaggaaccgacttaccttgcggcttatgacgtcacgtctatgaaccttctcgagacagagacataccactgtctgcgtgcgaaccgatcatctcgtgaagcagaaaccatcggccaagtcgctgtgacgcgctatttttgggatcttgtttttactaaacagtcagcatcatttgttcctattgagcaattgacagacgaagagagtgagggactcgtgcgggtggccatccaactcaagcccaaggacgtggaaaacgccgaagcagagattcaaaagtggtatgaagaggagcacattgacatgttatctaaggttcccggctggttgcggacgcgtctcttcaagacctcggcattggagaaagacatccctgcagcatttcttgcggtaggcgatttttcaaagaccaatgggcttggcggcacagaataccaagctgctgtatcgacgccgcgcacgaaggagatgtatgagaaatacgccacgatgatatcgaggagaaaattcgaattgttctatacctttggacctggatctcgtgatctgcatcatttatcccaacttccgccagcttcgtcgacatttaagtccccagattctaagacatatgcatcaaacagcgacaagcctgttattcagtcttttgtgacgactctcgacggcctagtgatcacgtatagactagaaggaaacccggatccaaaggcgccgacaatcgcgttctgcaattctttgctcacttcattacacatgtgggatcccgttgtggacatcctcaagacgaaacagccgcgataccgaatcctccgatatgacttccgtggaaggcactcgataccatcaccgccaaagccgtccacacttgacagtctctcggatgatattagctatctgctagctgctttgcgtattcccaggcttcacgttctcatcggtgtctcaatgggcggtgctactacccagaaatttgccttgaaataccccgaaaagcttgagaagttcatcgcgtgcgacttcaatgcctcctccagccctgcaaacacgagtgcatggaaagaacgtatcagtgttgctgagacgccgctcgaagacggaactgcaggcatcaataagcttgcgggacagacagtcgagaggtggtttcacccttcttcgatgaagaagcaggatatggtcaagtggatacaagatatggtcgcgagtaatgatatagaaggttttcgatacggatgccaggcactttgggattacgacatgaagaccgtattgaaagagtgcaaagttcccggcctctacgttgtgggcgacggtgacgcgaaaggtgcgctggtcaaggcgatggaggggtttaagggaatggttggtgacaatggcgttgagctcgctgtcgtaccagacgcgggccatctcccgatgtgtgaacacccggagggattctggaacgctattgagaaattcttgtag

SEQ ID NO: 10690 - protein, 540 aa, Muscodor strobelii
  misc_feature: SGI Peptide ID NO. 563403
  misc_feature (319)..(538): Pfam Id: PF00561 Pfam Desc: alpha/beta hydrolase fold
  misc_feature (1)..(540): NCBI GI: 39975739 Blast Desc: MGG_06204 [Magnaporthe grisea 70-15] gi|145011479|gb|EDJ96135.1| MGG_06204 [Magnaporthe grisea 70-15]
  misc_feature (1)..(540): NCBI GI: 46109398 Blast Desc: FG01581.1 [Gibberella zeae PH-1]
  misc_feature (3)..(540): NCBI GI: 116200331 Blast Desc: CHGG_08321 [Chaetomium globosum CBS 148.51] gi|88179600|gb|EAQ87068.1| CHGG_08321 [Chaetomium globosum CBS 148.51]
  misc_feature (3)..(540): NCBI GI: 28881255 Blast Desc: related to 3-OXOADIPATE ENOL-LACTONASE I [Neurospora crassa]
  misc_feature (1)..(540): NCBI GI: 171683800 Blast Desc: protein product [Podospora anserina] gi|170941860|emb|CAP67513.1| protein product [Podospora anserina]
  misc_feature (3)..(525): NCBI GI: 164424019 Blast Desc: NCU08436 [Neurospora crassa OR74A] gi|157070334|gb|EAA34170.2| conserved [Neurospora crassa OR74A]
  misc_feature (1)..(540): NCBI GI: 115397185 Blast Desc: conserved [Aspergillus terreus NIH2624] gi|114192375|gb|EAU34075.1| conserved [Aspergillus terreus NIH2624]
  misc_feature (1)..(540): NCBI GI: 70992383 Blast Desc: alpha/beta hydrolase [Aspergillus fumigatus Af293] gi|66848673|gb|EAL89002.1| alpha/beta hydrolase, [Aspergillus fumigatus Af293]
  misc_feature (1)..(540): NCBI GI: 121699974 Blast Desc: alpha/beta hydrolase, [Aspergillus clavatus NRRL 1] gi|119396394|gb|EAW06826.1| alpha/beta hydrolase, [Aspergillus clavatus NRRL 1]
  misc_feature (5)..(540): NCBI GI: 242799981 Blast Desc: alpha/beta hydrolase, [Talaromyces stipitatus ATCC 10500] gi|218716837|gb|EED16258.1| alpha/beta hydrolase, [Talaromyces stipitatus ATCC 10500]
  misc_feature (271)..(540): SWISSPROT Homolog: EC 3.1.1.24 3-oxoadipate enol-lactonase
MAGPGMLYVTMQPEPGLPLQQFHEWYNNEHGPTRLKIPQIFTNGFRYQAIDGEEPTYLAAYDVTSMNLLETETYHCLRANRSSREAETIGQVAVTRYFWDLVFTKQSASFVPIEQLTDEESEGLVRVAIQLKPKDVENAEAEIQKWYEEEHIDMLSKVPGWLRTRLFKTSALEKDIPAAFLAVGDFSKTNGLGGTEYQAAVSTPRTKEMYEKYATMISRRKFELFYTFGPGSRDLHHLSQLPPASSTFKSPDSKTYASNSDKPVIQSFVTTLDGLVITYRLEGNPDPKAPTIAFCNSLLTSLHMWDPVVDILKTKQPRYRILRYDFRGRHSIPSPPKPSTLDSLSDDISYLLAALRIPRLHVLIGVSMGGATTQKFALKYPEKLEKFIACDFNASSSPANTSAWKERISVAETPLEDGTAGINKLAGQTVERWFHPSSMKKQDMVKWIQDMVASNDIEGFRYGCQALWDYDMKTVLKECKVPGLYVVGDGDAKGALVKAMEGFKGMVGDNGVELAVVPDAGHLPMCEHPEGFWNAIEKFL

SEQ ID NO: 10691 - DNA, 2404 bp, Muscodor strobelii
  misc_feature: SGI EST ID NO. CUFF.25217.1
  misc_feature: Variant of the nucleotide sequence at SEQ ID NO 10689
attatctagtatgcgtacctattgtaagagctcgttggttgcacgcaggtctggacgtgacgggtaacagagtgccaagagcgtaacgtagccacgcaaccaggttttttagaactcaagattgagtagtggggttgagttcgttcccccatcccgacatcgagcaatttagaacatctacttctggtaatggtgtatggacatcagttcgcttttcgatactttgaattgaagaatcccgagtcatgccaattcgacatcttcaagatgagaaacacggaggagggaaaagatttacccatcggcctgaatctaaatgggctcaggagcaatgtaaccccgcaacggcagtatgacttcacccctccatcgcttactcggtaatacataatcgtgctttctcgaaacgagtgcacataccatcctttcactcattcgtcattggatatatctaaatttgtccgagaagctatcgacgcgaattctgtacgagatggcaggtccgggcatgttgtacgtgactatgcagcctgagccaggcttgccattacagcagtttcatgaatggtacaataacgagcatggcccgacgcggttgaagataccacaaatattcactaacggtttccgataccaagctattgacggcgaggaaccgacttaccttgcggcttatgacgtcacgtctatgaaccttctcgagacagagacataccactgtctgcgtgcgaaccgatcatctcgtgaagcagaaaccatcggccaagtcgctgtgacgcgctatttttgggatcttgtttttactaaacagtcagcatcatttgttcctattgagcaattgacagacgaagagagtgagggactcgtgcgggtggccatccaactcaagcccaaggacgtggaaaacgccgaagcagagattcaaaagtggtatgaagaggagcacattgacatgttatctaaggttcccggctggttgcggacgcgtctcttcaagacctcggcattggagaaagacatccctgcagcatttcttgcggtaggcgatttttcaaagaccaatgggcttggcggcacagaataccaagctgctgtatcgacgccgcgcacgaaggagatgtatgagaaatacgccacgatgatatcgaggagaaaattcgaattgttctatacctttggacctggatctcgtgatctgcatcatttatcccaacttccgccagcttcgtcgacatttaagtccccagattctaagacatatgcatcaaacagcgacaagcctgttattcagtcttttgtgacgactctcgacggcctagtgatcacgtatagactagaaggaaacccggatccaaaggcgccgacaatcgcgttctgcaattctttgctcacttcattacacatgtgggatcccgttgtggacatcctcaagacgaaacagccgcgataccgaatcctccgatatgacttccgtggaaggcactcgataccatcaccgccaaagccgtccacacttgacagtctctcggatgatattagctatctgctagctgctttgcgtattcccaggcttcacgttctcatcggtgtctcaatgggcggtgctactacccagaaatttgccttgaaataccccgaaaagcttgagaagttcatcgcgtgcgacttcaatgcctcctccagccctgcaaacacgagtgcatggaaagaacgtatcagtgttgctgagacgccgctcgaagacggaactgcaggcatcaataagcttgcgggacagacagtcgagaggtggtttcacccttcttcgatgaagaagcaggatatggtcaagtggatacaagatatggtcgcgagtaatgatatagaaggttttcgatacggatgccaggcactttgggattacgacatgaagaccgtattgaaagagtgcaaagttcccggcctctacgttgtgggcgacggtgacgcgaaaggtgcgctggtcaaggcgatggaggggtttaagggaatggttggtgacaatggcgttgagctcgctgtcgtaccagacgcgggccatctcccgatgtgtgaacacccggagggattctggaacgctattgagaaattcttgtaggatattgagataccgcgtgatgtcagttgctcgtctagaagcgaaactatcgaagtatgtcttcgacaccgtaaaatgcttctgcaaccacagtctttccttccattgatgaacatgcaagcgaatacatcagtttaatatgaaccgctcatgtacttcattttgctagttgtcgtcgtgttgcttgcttgaggcaaaagcggactcactatgatacgtattagaatatggcattcctaaggcacggcaattcagcaagcaacaagacatcagtctagcatatccaag

SEQ ID NO: 10692 - DNA, 2526 bp, Muscodor strobelii
  misc_feature: SGI cDNA ID NO. 563404
  misc_feature: Encodes the peptide sequence at SEQ ID NO 10693
atggcgcccgcaaacttacctgtcgagattctggaaatgattcttaatcaaaatgtgcccgaaaagtggaacgagaagaaacgcggcaaggcctgcctccagctcaggcgcgtatgtcatctgtttgacggcctcgtatcacgcctagcactctgcaagctcgatatagattcctgttacaagcgcaagcccggtaaagaccgccagtgccgcgtcaagtcggactccgctatttggctcttgcgcaccaagcttgccatctgtcgaggcaccaaggcaaagctcgcattacatatccagagtatgatagacgccgtcgtcgcttggaaagaggtccgcaacttagattatgcgaatgagcagcaatatttcaatgttgcctgcaacttgctggttgcgcaccagggtgccggctgggcatgcgaccaagctcagaacccgtttaaggacccgatatctcaaggtctcaccaagccctactacagaatcccgggacctatcgacgaacggacaaatatcccggagacacaggatatatttgccctgcccggccttcttcaagtggcaagtggatgtggagatatccctaccgttatgacgttgctggcatacggcgccgacccggatgactgtgatgcacagttcggcactccattgatatctgcggtatatcataatcagtccaccattgcggatcttctccttagccgtggggctgatccgtccgccaggggaccatgcggctggccgatcgagctggccgcgcagcgaaaacaagacacagtcgaaacacatctgttgaaactatacatgcagtccgatgcgaagctggcaaactgggctcttgtacatgctgcaaaacgaggatttctatgggcagctcgaaccgctatgcaacgccatgacgttgacatcaatacccaaggccctcagcgtcagagtccccttgtgcttgccgtcaagttcaaacatttccatgtggcggcagaactcctgaatgaccctcgaatcaaaccaaacatgacggatcgtcacaacaccacagctttgtactgggcagcacactgggagtcggtagaaatggttcaacttcttctgaagcgaccagatgtaaagcccaacacccccaagcggcacggcgactcgccactgtcgattacagtcaagaggggtaatgtgcagatattgcgactatttctggctcggaaggacatcaaactgcattttaaagtgcccgggcgctgtccagtggagatagcagtacgaaagggccacttcgacatcgtcaagcttcttctacggcacttccgtgtcagacttcgtaattactgcaccctaacggacaagaagcgatcattgctttcccacgccgtacatctaaagaacatagatctagtgcgcctactcttgggacgaaaagacgtggaccccaacttctcgttggtagaaccacctctccttgctgcagcaaaggcaggcaaccaaggtatcacagatcttttgttgagggatccgagagtcgacccgaatatcatagaccatgatgggaacacggccttgcagatcgcagtggcccaggccgactatctattacttggaacacttctgcagatgcctgatatcgaccccaatttgggtggaaagagcagcactgcttggccaccactccatcgagccgtagcccaaggagatcgtaccatgattctccgcttgctcatgcggcaggacatcgatttgaacacaaaacacgctgattctacaccgcttgtccttgctgcgtcccatggccggattgacatcttggagctcctattagcaagacctgagacgaatccaaatattaaaacatgttactcacaaaaccgtgatcgtaaaaagtggaacgctagtttggcccggaacggagtcgcaaacatccctgccaaagcgaatgatcaactgcgaaggattcaaacagggaaagcttttgacatcacacgtggtctagaaaaacgtttttgggaaacgcctcttactgctgcctgtcgagcgggcgacgatgcggtggtccagactttacttcaagactcgcgcaccgaactcaacaatcaagacttccttgggcgaacagcgctttggtgggccgctgctcggggttatagcccgtgtgtgcagcatcttttggcccatccagacacgctccccaatgtcggcgataaccaaggctggacagccttacatgttgccgtgaatgagggacgggactttattgctggacaattgttagaccatcgaaatacggaccccaatgttcgcacgaatgacgacggctggacgccactgatgttggctgcgagcaacggcgataaatgcagcggaatagtggaatttctcttgggccatccagacatcaagccgaacttagcattaccagatggcacaacggcagtaatgatggctcaagcggatggcgaccacagcaaaaaggtgtttgacctgcttgaaggaggaatcatgcagattgatctcttgacggtgaacagctag

SEQ ID NO: 10693 - protein, 841 aa, Muscodor strobelii
  misc_feature: SGI Peptide ID NO. 563404
  misc_feature (734)..(767): Pfam Id: PF00023 Pfam Desc: Ankyrin repeat
  misc_feature (769)..(806): Pfam Id: PF00023 Pfam Desc: Ankyrin repeat
  misc_feature (769)..(794): Pfam Id: PF00023 Pfam Desc: Ankyrin repeat
  misc_feature (217)..(246): Pfam Id: PF00023 Pfam Desc: Ankyrin repeat
  misc_feature (186)..(817): NCBI GI: 238845653 Blast Desc: pfs [Microsporum canis CBS 113480]
  misc_feature (262)..(816): NCBI GI: 242761152 Blast Desc: ankyrin 2,3/unc44, [Talaromyces stipitatus ATCC 10500] gi|218723321|gb|EED22738.1| ankyrin 2,3/unc44, [Talaromyces stipitatus ATCC 10500]
  misc_feature (261)..(816): NCBI GI: 242761147 Blast Desc: ankyrin 2,3/unc44, [Talaromyces stipitatus ATCC 10500] gi|218723320|gb|EED22737.1| ankyrin 2,3/unc44, [Talaromyces stipitatus ATCC 10500]
  misc_feature (277)..(836): NCBI GI: 242816142 Blast Desc: ankyrin repeat-containing protein, [Talaromyces stipitatus ATCC 10500] gi|218715051|gb|EED14474.1| ankyrin repeat-containing protein, [Talaromyces stipitatus ATCC 10500]
  misc_feature (197)..(827): NCBI GI: 238845653 Blast Desc: pfs [Microsporum canis CBS 113480]
  misc_feature (327)..(827): NCBI GI: 242761152 Blast Desc: ankyrin 2,3/unc44, [Talaromyces stipitatus ATCC 10500] gi|218723321|gb|EED22738.1| ankyrin 2,3/unc44, [Talaromyces stipitatus ATCC 10500]
  misc_feature (269)..(836): NCBI GI: 242827419 Blast Desc: ankyrin repeat-containing protein, [Talaromyces stipitatus ATCC 10500] gi|218711987|gb|EED11416.1| ankyrin repeat-containing protein, [Talaromyces stipitatus ATCC 10500]
  misc_feature (277)..(836): NCBI GI: 242771684 Blast Desc: ankyrin repeat-containing protein, [Talaromyces stipitatus ATCC 10500] gi|218721511|gb|EED20929.1| ankyrin repeat-containing protein, [Talaromyces stipitatus ATCC 10500]
  misc_feature (277)..(836): NCBI GI: 242825043 Blast Desc: ankyrin, [Talaromyces stipitatus ATCC 10500] gi|218712176|gb|EED11602.1| ankyrin, [Talaromyces stipitatus ATCC 10500]
  misc_feature (327)..(827): NCBI GI: 242761147 Blast Desc: ankyrin 2,3/unc44, [Talaromyces stipitatus ATCC 10500] gi|218723320|gb|EED22737.1| ankyrin 2,3/unc44, [Talaromyces stipitatus ATCC 10500]
  misc_feature (193)..(616): SWISSPROT Homolog: EC 2.7.11.1 Non-specific serine/threonine protein kinase
MAPANLPVEILEMILNQNVPEKWNEKKRGKACLQLRRVCHLFDGLVSRLALCKLDIDSCYKRKPGKDRQCRVKSDSAIWLLRTKLAICRGTKAKLALHIQSMIDAVVAWKEVRNLDYANEQQYFNVACNLLVAHQGAGWACDQAQNPFKDPISQGLTKPYYRIPGPIDERTNIPETQDIFALPGLLQVASGCGDIPTVMTLLAYGADPDDCDAQFGTPLISAVYHNQSTIADLLLSRGADPSARGPCGWPIELAAQRKQDTVETHLLKLYMQSDAKLANWALVHAAKRGFLWAARTAMQRHDVDINTQGPQRQSPLVLAVKFKHFHVAAELLNDPRIKPNMTDRHNTTALYWAAHWESVEMVQLLLKRPDVKPNTPKRHGDSPLSITVKRGNVQILRLFLARKDIKLHFKVPGRCPVEIAVRKGHFDIVKLLLRHFRVRLRNYCTLTDKKRSLLSHAVHLKNIDLVRLLLGRKDVDPNFSLVEPPLLAAAKAGNQGITDLLLRDPRVDPNIIDHDGNTALQIAVAQADYLLLGTLLQMPDIDPNLGGKSSTAWPPLHRAVAQGDRTMILRLLMRQDIDLNTKHADSTPLVLAASHGRIDILELLLARPETNPNIKTCYSQNRDRKKWNASLARNGVANIPAKANDQLRRIQTGKAFDITRGLEKRFWETPLTAACRAGDDAVVQTLLQDSRTELNNQDFLGRTALWWAAARGYSPCVQHLLAHPDTLPNVGDNQGWTALHVAVNEGRDFIAGQLLDHRNTDPNVRTNDDGWTPLMLAASNGDKCSGIVEFLLGHPDIKPNLALPDGTTAVMMAQADGDHSKKVFDLLEGGIMQIDLLTVNS

SEQ ID NO: 10694 - DNA, 2109 bp, Muscodor strobelii
  misc_feature: SGI cDNA ID NO. 563405
  misc_feature: Encodes the peptide sequence at SEQ ID NO 10695
atggtcaaccaactcgcgatctatgcagccctgcttggcacagtggctgcggccgcgaagtatcaggaatatatcctcgcgccggcttcgaggactattcaccctgccagcgtgtacaaggtcaacagcactgatgatagcagtgtgaagggtgcggatagcatccttggtggagcgactggcagtgttgttatggatgggccatcgtcgatcacttatgattttggcaagaatatcggtggtctcctaactctacagattggcgacgtcgaccctgatcagaccatctatgtgacttatacggagagttcccaatggattagctcagaaggctgtgatgctaccgaggactcaggcattgacgaggccatagtatggcaaacatcaaactccgggaacctgaccgtctctcgtgagcacgatcgtggagcttttcgctacctaagcgtcgtccataacacaaccggtagcatcgaggtgcaatcggtctctgtccacttcactgctatgccacactgggaggatgaccagctgcaggcttacactggatattttcactgcaacgatgagttattaaataggatctggtatgctggagcttacaccaaccagctctgcacgatcgaccccaatacaggcaactctttggtacacccagagctcaccaagaatatctccacagatgttacgggggccgtgacatggcacaacaacttcaccatcgctaacgggagcagcgccctcacagacggagccaagcgtgatcgtctcatctggccaggcgatatggcgattgcggttccgtctattctcgtctcaactaatgatctcgatacaattgctacatccctgaacgcgctgtatatcctccagaactcatcaactggacagctaccatacgcgggtgtgccgttctctgagagaggtcttacatcagatacctaccacatgtacagtctgatcgggctcgttgactactatctctactccggcaaaaccgattacgtgcaggccaagtgggagcaatttgtcttcggcctcaactattcgctctctctcgtcgacgaaagcgcacttatgaacgtcagcacgcccaatgactggcttcgcttcggtatgggtgggcacaacattgaggcaaacgccatcttctactacactctcaatcatgccgtgaccctcggccaagagcttggtgctgagcagtctctccttgatacgtggtccaacatcgcagagaaggtcaagtcagcagctaaccaacttctttgggacgcggatcttggcctatatcgcgacaacgagaccacgacacttgcgccacaggacggcaacgcttgggctatcgtatctaatctgacagactctgacgccaaacgcacctccatctccgagggcctctccgcacgctggggtccctacggcgcccccgccgtcgaagcgcttgacgccgtctccccattcatatccggcttcgaactacaagcccacatgctcgccggtaacgccagcgcctcgctcgcgctcatgcgtctacaatggggcttcatgctggacgacccgcgcatgacgaattcgacttttatcgaaggctattctgccgacgggcggctacactacgcaccgtacgacaacgatccccgggtcagtcacgctcacggctgggcaacaggcccgacgagtaccctgtcgttctacgtagcgggtattcagctccgtagcaccggaggttcatcttggcgaatcgcgccgcagattggagatctgacgttcattgatgctgggtttcagaccccgttgggtgaatttgctagtcagattaatgcttcggctgatggggcgatcacggggatgatgttttctacgcctgagggcacgagcgggagtgtttatgtcccgggcgtttcgggtaacctggttgggcgtaacgggtcgtcgataccgctcgttgatggctcagcggctgacgtgcctggcggagcttacacgcttaatactacgggaaagggtcagggtagctcgccgcctgcgactggtgcttcagaaaaagtagcgtcctcaatgatttccgtggtgatgatggtggctgtttgtgccgctttgctgtag

SEQ ID NO: 10695 - protein, 702 aa, Muscodor strobelii
  misc_feature: SGI Peptide ID NO. 563405
  misc_feature (63)..(632): Pfam Id: PF05592 Pfam Desc: Bacterial alpha-L-rhamnosidase
  misc_feature (18)..(642): NCBI GI: 189199902 Blast Desc: bacterial alpha-L-rhamnosidase domain containing protein [Pyrenophora tritici-repentis Pt-1C-BFP] gi|187983387|gb|EDU48875.1| bacterial alpha-L-rhamnosidase domain
  misc_feature (11)..(633): NCBI GI: 169614455 Blast Desc: SNOG_10370 [Phaeosphaeria nodorum SN15] gi|111061585|gb|EAT82705.1| SNOG_10370 [Phaeosphaeria nodorum SN15]
  misc_feature (10)..(665): NCBI GI: 13241312 Blast Desc: AF284761_1 alpha-L-rhamnosidase A precursor [Aspergillus aculeatus]
  misc_feature (7)..(665): NCBI GI: 145229555 Blast Desc: An01g06620 [Aspergillus niger] gi|134055194|emb|CAK43781.1| protein product [Aspergillus niger]
  misc_feature (10)..(664): NCBI GI: 169771773 Blast Desc: [Aspergillus oryzae RIB40] gi|83768215|dbj|BAE58354.1| protein product [Aspergillus oryzae]
  misc_feature (10)..(665): NCBI GI: 164564724 Blast Desc: alpha-L-rhamnosidase [Aspergillus kawachii]
  misc_feature (11)..(664): NCBI GI: 238485634 Blast Desc: alpha-L-rhamnosidase A, [Aspergillus flavus NRRL3357] gi|220698934|gb|EED55273.1| alpha-L-rhamnosidase A, [Aspergillus flavus NRRL3357]
  misc_feature (21)..(666): NCBI GI: 255930793 Blast Desc: Pc12g00500 [Penicillium chrysogenum Wisconsin 54-1255] gi|211581572|emb|CAP79677.1| Pc12g00500 [Penicillium chrysogenum Wisconsin 54-1255]
  misc_feature (4)..(665): NCBI GI: 119497449 Blast Desc: bacterial alpha-L-rhamnosidase domain protein [Neosartorya fischeri NRRL 181] gi|119413645|gb|EAW23586.1| bacterial alpha-L-rhamnosidase domain protein [Neosartorya NRRL
  misc_feature (21)..(664): NCBI GI: 159130398 Blast Desc: alpha-L-rhamnosidase A, [Aspergillus fumigatus A1163]
MVNQLAIYAALLGTVAAAAKYQEYILAPASRTIHPASVYKVNSTDDSSVKGADSILGGATGSVVMDGPSSITYDFGKNIGGLLTLQIGDVDPDQTIYVTYTESSQWISSEGCDATEDSGIDEAIVWQTSNSGNLTVSREHDRGAFRYLSVVHNTTGSIEVQSVSVHFTAMPHWEDDQLQAYTGYFHCNDELLNRIWYAGAYTNQLCTIDPNTGNSLVHPELTKNISTDVTGAVTWHNNFTIANGSSALTDGAKRDRLIWPGDMAIAVPSILVSTNDLDTIATSLNALYILQNSSTGQLPYAGVPFSERGLTSDTYHMYSLIGLVDYYLYSGKTDYVQAKWEQFVFGLNYSLSLVDESALMNVSTPNDWLRFGMGGHNIEANAIFYYTLNHAVTLGQELGAEQSLLDTWSNIAEKVKSAANQLLWDADLGLYRDNETTTLAPQDGNAWAIVSNLTDSDAKRTSISEGLSARWGPYGAPAVEALDAVSPFISGFELQAHMLAGNASASLALMRLQWGFMLDDPRMTNSTFIEGYSADGRLHYAPYDNDPRVSHAHGWATGPTSTLSFYVAGIQLRSTGGSSWRIAPQIGDLTFIDAGFQTPLGEFASQINASADGAITGMMFSTPEGTSGSVYVPGVSGNLVGRNGSSIPLVDGSAADVPGGAYTLNTTGKGQGSSPPATGASEKVASSMISVVMMVAVCAALL

SEQ ID NO: 10696 - DNA, 2607 bp, Muscodor strobelii
  misc_feature: SGI EST ID NO. CUFF.25238.0
  misc_feature: Variant of the nucleotide sequence at SEQ ID NO 10694
atggaacgtcggcattgttgccgtctccgccctctccatcattttcttccccaccgtcttggcattgacggttcttggggatcgtgcattgcctgacaacaaaaaatacggcgcctccccatcgtctatgcgaactgattggtgagatttttgcccttgagatgttccccgcagaaagagatgccagcgccatgggcttcgacgtcgtgacttctatgctaggcatgttggggtaaggcggcgttgccacatggcccgacaaccttggaataccgggttcgtgtcagcccgagctcgaagaccatgttcaatgggaccgctgaggcggtctgaggatctgctattccatatcgtaattataaggtgcccttcctgcgtcttgtctggatgaatatgggaccattgttccatcaacgtctctcgtcaacatggtcaaccaactcgcgatctatgcagccctgcttggcacagtggctgcggccgcgaagtatcaggaatatatcctcgcgccggcttcgaggactattcaccctgccagcgtgtacaaggtcaacagcactgatgatagcagtgtgaagggtgcggatagcatccttggtggagcgactggcagtgttgttatggatgggccatcgtcgatcacttatgattttggcaagaatatcggtggtctcctaactctacagattggcgacgtcgaccctgatcagaccatctatgtgacttatacggagagttcccaatggattagctcagaaggctgtgatgctaccgaggactcaggcattgacgaggccatagtatggcaaacatcaaactccgggaacctgaccgtctctcgtgagcacgatcgtggagcttttcgctacctaagcgtcgtccataacacaaccggtagcatcgaggtgcaatcggtctctgtccacttcactgctatgccacactgggaggatgaccagctgcaggcttacactggatattttcactgcaacgatgagttattaaataggatctggtatgctggagcttacaccaaccagctctgcacgatcgaccccaatacaggcaactctttggtacacccagagctcaccaagaatatctccacagatgttacgggggccgtgacatggcacaacaacttcaccatcgctaacgggagcagcgccctcacagacggagccaagcgtgatcgtctcatctggccaggcgatatggcgattgcggttccgtctattctcgtctcaactaatgatctcgatacaattgctacatccctgaacgcgctgtatatcctccagaactcatcaactggacagctaccatacgcgggtgtgccgttctctgagagaggtcttacatcagatacctaccacatgtacagtctgatcgggctcgttgactactatctctactccggcaaaaccgattacgtgcaggccaagtgggagcaatttgtcttcggcctcaactattcgctctctctcgtcgacgaaagcgcacttatgaacgtcagcacgcccaatgactggcttcgcttcggtatgggtgggcacaacattgaggcaaacgccatcttctactacactctcaatcatgccgtgaccctcggccaagagcttggtgctgagcagtctctccttgatacgtggtccaacatcgcagagaaggtcaagtcagcagctaaccaacttctttgggacgcggatcttggcctatatcgcgacaacgagaccacgacacttgcgccacaggacggcaacgcttgggctatcgtatctaatctgacagactctgacgccaaacgcacctccatctccgagggcctctccgcacgctggggtccctacggcgcccccgccgtcgaagcgcttgacgccgtctccccattcatatccggcttcgaactacaagcccacatgctcgccggtaacgccagcgcctcgctcgcgctcatgcgtctacaatggggcttcatgctggacgacccgcgcatgacgaattcgacttttatcgaaggctattctgccgacgggcggctacactacgcaccgtacgacaacgatccccgggtcagtcacgctcacggctgggcaacaggcccgacgagtaccctgtcgttctacgtagcgggtattcagctccgtagcaccggaggttcatcttggcgaatcgcgccgcagattggagatctgacgttcattgatgctgggtttcagaccccgttgggtgaatttgctagtcagattaatgcttcggctgatggggcgatcacggggatgatgttttctacgcctgagggcacgagcgggagtgtttatgtcccgggcgtttcgggtaacctggttgggcgtaacgggtcgtcgataccgctcgttgatggctcagcggctgacgtgcctggcggagcttacacgcttaatactacgggaaagggtcagggtagctcgccgcctgcgactggtgcttcagaaaaagtagcgtcctcaatgatttccgtggtgatgatggtggctgtttgtgccgctttgctgtaggaataaagtgatcttgagatgctaggctagcaaaaataagaagtatcttcgtgcatatagtgaacactgg

SEQ ID NO: 10697 - DNA, 1647 bp, Muscodor strobelii
  misc_feature: SGI cDNA ID NO. 563406
  misc_feature: Elevated expression when VOC is produced
  misc_feature: Encodes the peptide sequence at SEQ ID NO 10698
atgtcggccagctttgggagtccggttcaagcgttcatcatctcgtcatttcttcttgcggtgttcttggcttatcaaaagctacacagtaaacggctattacgaaatgcccatattccacaactacccccatcgctcttctggggccacatgctcaccttcgactctttcactagaagaggtgctttggaccgtcatccagatctcattgtcgctgagatgcacgagtccctcggtcgcccgccgctcatgctactggataactggcccattgtaccacccatgatcatagtcgctagtcatgaggttgcagagcaagtctcccaatcatcaaatagattaaagtacagtgtgccaaaagcacccagtgtaaagcgcattgcggatttgtttggccacaactccctcatgctgaaacaaaacgaagagtggaaagcaattcgaactagattcaatcctggttttgcacctcatcatctggctagcttactgcctacgatcgttgcaacaaccaaacgttacatagatatactcgataccttcgccggaactgacgaagcattttcgctcgaccttcacactacgaatcttacatttgacgtgattggcgcagccgcaatggcagaagacctgcaaagccagcacatcgatcagtcgaaccaaggcgatatgatccgcgccttcaaggaaatgattgccacatacgccgatgataagctccaaaagcctttttggttgattccacggactttccttaaacgccgtcgactaggaaatcgcatttctcagcatctacgccggattgtacagcgtcagttcgagagcttgaaagagccacttgtttcagcgtcatcacggacgatcttagcccttgccctcaaggaaatagaagagctcacacccgcggctttggaggagtcttgtgatcagctgaaaactttccttttcgcaggtcacgataccacgagtacaacgattatttgggcgatatatgagctatcaagaaccccgcacgccttggatgcagtgagagatgaactcgaccgcctcttcgggtccgaatctatccacgatgagctcttagcagacggcgacgacacaagcattcgccaaatgagctacatcccggcggtcatcaaggaggttctcaggctgcaccctcctgctggatcggttcgtgcgcctacaatgaagggagggtttagtgtatcgacatcccagggcgattacaacctcaacgaagacacctgggtttatttaaatcattatttaattcaccgagatcaagctgtttacggcgatgatgcagatctcttcgtaccagagcgctggctgcaacctgcgaatggcgttccggcgagcgcatggcgaccattcgagaggggaccgagaaactgtattggccaagaattagctaacatggaggctcgcatcgtcattgctatactggcacgacgttatgactttttcaaagttggtttgggtgagatcgaaaaagacgacaatggtttacccatcctggacgaacgtacaaagcaattcaaggtcaaatccgaattgtatcccaccatacaaatcaccagtaagccagtggatgcaatgatgatgaaggtcaaattagctcgaagcaaagagtttgaccggtaa

SEQ ID NO: 10698 - protein, 548 aa, Muscodor strobelii
  misc_feature: SGI Peptide ID NO. 563406
  misc_feature (40)..(516): Pfam Id: PF00067 Pfam Desc: Cytochrome P450
  misc_feature (94)..(516): Pfam Id: PF00067 Pfam Desc: Cytochrome P450
  misc_feature (9)..(522): NCBI GI: 256724246 Blast Desc: NECHADRAFT_97703 [Nectria haematococca mpVI 77-13-4]
  misc_feature (18)..(540): NCBI GI: 115401374 Blast Desc: [Aspergillus terreus NIH2624] gi|114190216|gb|EAU31916.1| [Aspergillus terreus NIH2624]
  misc_feature (27)..(541): NCBI GI: 145239211 Blast Desc: An08g01340 [Aspergillus niger] gi|134076756|emb|CAK39815.1| protein product [Aspergillus niger]
  misc_feature (19)..(543): NCBI GI: 255941984 Blast Desc: Pc16g14640 [Penicillium chrysogenum Wisconsin 54-1255] gi|211586384|emb|CAP94134.1| Pc16g14640 [Penicillium chrysogenum Wisconsin 54-1255]
  misc_feature (21)..(537): NCBI GI: 116200542 Blast Desc: CHGG_10816 [Chaetomium globosum CBS 148.51] gi|88175530|gb|EAQ82998.1| CHGG_10816 [Chaetomium globosum CBS 148.51]
  misc_feature (9)..(541): NCBI GI: 39957517 Blast Desc: MGG_09179 [Magnaporthe grisea 70-15] gi|145013386|gb|EDJ98027.1| MGG_09179 [Magnaporthe grisea 70-15]
  misc_feature (13)..(521): NCBI GI: 159128346 Blast Desc: cytochrome P450 monooxygenase, [Aspergillus fumigatus A1163]
  misc_feature (13)..(521): NCBI GI: 146323181 Blast Desc: cytochrome P450 monooxygenase [Aspergillus fumigatus Af293] gi|129556505|gb|EAL86483.2| cytochrome P450 monooxygenase, [Aspergillus fumigatus Af293]
  misc_feature (31)..(521): NCBI GI: 145252778 Blast Desc: An16g05940 [Aspergillus niger] gi|134083456|emb|CAK46934.1| protein product [Aspergillus niger]
  misc_feature (14)..(540): NCBI GI: 261356973 Blast Desc: cytochrome P450 52A11 [Verticillium albo-atrum VaMs.102]
  misc_feature (135)..(533): SWISSPROT Homolog: EC 1.14.14.1 Unspecific monooxygenase
  misc_feature: Useful for introducing or modulating the production of volatile compounds
MSASFGSPVQAFIISSFLLAVFLAYQKLHSKRLLRNAHIPQLPPSLFWGHMLTFDSFTRRGALDRHPDLIVAEMHESLGRPPLMLLDNWPIVPPMIIVASHEVAEQVSQSSNRLKYSVPKAPSVKRIADLFGHNSLMLKQNEEWKAIRTRFNPGFAPHHLASLLPTIVATTKRYIDILDTFAGTDEAFSLDLHTTNLTFDVIGAAAMAEDLQSQHIDQSNQGDMIRAFKEMIATYADDKLQKPFWLIPRTFLKRRRLGNRISQHLRRIVQRQFESLKEPLVSASSRTILALALKEIEELTPAALEESCDQLKTFLFAGHDTTSTTIIWAIYELSRTPHALDAVRDELDRLFGSESIHDELLADGDDTSIRQMSYIPAVIKEVLRLHPPAGSVRAPTMKGGFSVSTSQGDYNLNEDTWVYLNHYLIHRDQAVYGDDADLFVPERWLQPANGVPASAWRPFERGPRNCIGQELANMEARIVIAILARRYDFFKVGLGEIEKDDNGLPILDERTKQFKVKSELYPTIQITSKPVDAMMMKVKLARSKEFDR

SEQ ID NO: 10699 - DNA, 1987 bp, Muscodor strobelii
  misc_feature: SGI EST ID NO. CUFF.25253.0
  misc_feature: Variant of the nucleotide sequence at SEQ ID NO 10697
ttctgatgtatccctgggcgggcaatacgtacatttaccaatcatgagcctcgagtggtaccaacggcctggtcgttacttgcactacagcgcagcctgctacgaatagttgccctctgggttctccatcttcatccttggagttcttcggccgtccatcatacctccttaccaccctccttcacctcagtacctctcgaccaacctaacacgcattactatgtcggccagctttgggagtccggttcaagcgttcatcatctcgtcatttcttcttgcggtgttcttggcttatcaaaagctacacagtaaacggctattacgaaatgcccatattccacaactacccccatcgctcttctggggccacatgctcaccttcgactctttcactagaagaggtgctttggaccgtcatccagatctcattgtcgctgagatgcacgagtccctcggtcgcccgccgctcatgctactggataactggcccattgtaccacccatgatcatagtcgctagtcatgaggttgcagagcaagtctcccaatcatcaaatagattaaagtacagtgtgccaaaagcacccagtgtaaagcgcattgcggatttgtttggccacaactccctcatgctgaaacaaaacgaagagtggaaagcaattcgaactagattcaatcctggttttgcacctcatcatctggctagcttactgcctacgatcgttgcaacaaccaaacgttacatagatatactcgataccttcgccggaactgacgaagcattttcgctcgaccttcacactacgaatcttacatttgacgtgattggcgcagccgcaatggcagaagacctgcaaagccagcacatcgatcagtcgaaccaaggcgatatgatccgcgccttcaaggaaatgattgccacatacgccgatgataagctccaaaagcctttttggttgattccacggactttccttaaacgccgtcgactaggaaatcgcatttctcagcatctacgccggattgtacagcgtcagttcgagagcttgaaagagccacttgtttcagcgtcatcacggacgatcttagcccttgccctcaaggaaatagaagagctcacacccgcggctttggaggagtcttgtgatcagctgaaaactttccttttcgcaggtcacgataccacgagtacaacgattatttgggcgatatatgagctatcaagaaccccgcacgccttggatgcagtgagagatgaactcgaccgcctcttcgggtccgaatctatccacgatgagctcttagcagacggcgacgacacaagcattcgccaaatgagctacatcccggcggtcatcaaggaggttctcaggctgcaccctcctgctggatcggttcgtgcgcctacaatgaagggagggtttagtgtatcgacatcccagggcgattacaacctcaacgaagacacctgggtttatttaaatcattatttaattcaccgagatcaagctgtttacggcgatgatgcagatctcttcgtaccagagcgctggctgcaacctgcgaatggcgttccggcgagcgcatggcgaccattcgagaggggaccgagaaactgtattggccaagaattagctaacatggaggctcgcatcgtcattgctatactggcacgacgttatgactttttcaaagttggtttgggtgagatcgaaaaagacgacaatggtttacccatcctggacgaacgtacaaagcaattcaaggtcaaatccgaattgtatcccaccatacaaatcaccagtaagccagtggatgcaatgatgatgaaggtcaaattagctcgaagcaaagagtttgaccggtaagcttataccagcaccttatttggtgcctctaaaatacacatcctattggcttgtcaatgccattgccttaatgtttatggtgctgtgcgctagtataataagagcctccggtcccccgtg

SEQ ID NO: 10700 - DNA, 3537 bp, Muscodor strobelii
  misc_feature: SGI cDNA ID NO. 563407
  misc_feature: Reduced expression when VOC is produced
  misc_feature: Encodes the peptide sequence at SEQ ID NO 10701
atgctcttcgacccgactatcggcgccatccacgagatctttcacaaaaatgctttgaagacgcccgacgcgccatgcgtcacggaaacggcttcttctactacgcctgaaaggcgattcacttacaagcagatctacgagtcgtccaacatcttggctaaccagctgcatgaggctggcatcaccaatggcgatgttgtcatgatctttgcctaccgttccgtcgagctcgtcattgctttcatgggagccctagctgccggtgctacgatcactgtcctagatcccgcgtaccctccagcaagacagcagatctaccttgaagtttcccgaccaaaagccttgatcaccattggcaaagccagggacgagaatggccccttcgcgccgcgtgttcagaagtatgtggatgaagagctatctctcaagatacgagtaccagaactacgaatgagcgatactggcgccattactggtggcgaagtagatgggaaggaagtcttcactgatacggagtcgaaagcatcatcacctccagatgttctagtggggccggactcatctagcatcctgagtttcacaagtggcacgacgtccacgcccaagggggtgttgagcaggcattacaacctagccaagttctacccgtggatggcaaaaaccttcaaatggacctcggaaaccaagttcgcttgtctaagtggtataagccatgaccctattcaacgagatattttcacccctctcttcttgggtggacagatcctcattcctgctcgcgagaatatcgcccacgaaaggttggcagaatggtttcgtgaccagcagcccaacgcgacccatttgacgccagcaatgggtcaaatcttgtgcggaggtgccaaggcagagttcccttctttgaagtgggttctctacgtaggagatatcctcaccaagaaggattgcgcctcgctccgtaagctagcccctaacgcggagatttgcgccgcctatggcaccacggagaccagccgcagtgtatcatactacagcatcaagagtcatgccgaagatccgaacgcactagatcactttggcgacattgtccctgccggaaagggcatcgagaacgtccagcttctcgtagttaatcgggaggatccaactaagctttgcggaatcggagaggttggtgagattatgttaagagcagcaggcttagccgagataagttgtgccttcattgagaaaactaatgaaaaattcctgaagaactggttcgtcgacaaccagaagtggattgacgcagataacaaagtggcatctaatgagccctggagaaagtattacaaaggcccacgagacagaatttataggactggcgatttgggatattatttggacgattctggtaattgcgcaatcacaggcagagctgatgatcaagtcaagatccgtggcttccgcatcgaactgaatgagattgatagcaacttgagaggacaccatctcgtccgtgagtgcaagacgctgcttcgaagagatcgaaatgaggagcaaacacttgttagctacattgtacctgaacatcaggagtggctcaactggttagcagagcgcaacctcgaagatattgaggatcaaggtaccgaaattggacccgtcctcatctatcccaaacgctaccggcccatgcaaaccgaggttcgagatcatctcaagtctcgacttcctgtacacgctgttccgacttatttcatttttctaaagaaaatgccgttaaatcctaatggcaaagtggacggcccagccttgccattcccggatgccgctttgatctcggaagaggcttcagaagaagatcaaaagagatgggaaacgctgagtagcaccgaaaaggaactggcacagcaatgggcgacccttatccctggtgtgaatgccaagactctgttacctgagtcagatttctttgagagtggtggacacagtctgctggcccagcagcttctactccacatccgcaagaccatgggagtcaatgtgtccatcagctcactgtattctaacgcatctctccgggctctgagcacgcagattgaccgccagcgtgagggtaaggacgatgctagtgcgacagaggacggcgaggcagcagtatatgctcagtcactcgaaaagctgcttagtagcctggactccaaatatcaaaccgcagacccgaatacgctctcaccggctagcaagacgaccgtcttcgtgacaggcgctacgggattcttaggctcgtacatcgtcaaggatttactcaggcgtgagaatgtgcatgtgatcgcccatgtccgtggaacaaagggggtgcctgccgctctcgagcgtctccagagatcaattcgcggatacggtgtgtggcaggattcctgggccaccaggctcagtgccgtcgtcggtgacctgacacagccacaccttggactagatgacgatacatggaagacggttggcgacgctgctgatgtgataattcataatggcgcccttgtccactgggtaaaacagtataaggatatggagcgtagcaacgttttatcaaccatcgaagccctgcgactttgcaaccagggaaaacctaagcttttctccttcgttagctcaacaagtgttcttgacacggatcattatattcagctgtcgcacgaacagactggtaccggacagggtgccatcatggaagcagataacatggaagggagtcgccagggcctaggcactggctacggccagaccaaatgggtatctgaacaactcgtccgcgaggccggcagacgcggtctcctcggatctgtgattcggccgggctatatccttggcgacgccgagacgggtgtctgtaatcacgacgacttccttgtccggatgctcaagggttgcattcagctgtctagtcgcccacgcatcgtcaacactgttaatgctgtgccggctggtcatgtctcaacagtcgttgtcgccgctagcttgaaccccgtcccagccgaagcggcaaatagcaacagcggcagcggcagcggcgatgtcggcgttcacgttatccatgtcactgcccacccgcgcctacgtatgagcgagtatctctctatcctgagttactatggctacgatgttcccgaggtggattatgatcactggaaaggccaacttgaggcatttgtctcagctggttctgtacagaaggacgaggaacagagtgctttgatgcctcttttccacatggcgacgaacaatcttcccactaatactcgcgcgccggaactggacgatcggaatgctgttattgttctgaaggctgatgcggacaggtggacaggagtcgatgacagtgctggagaaggcataagtagggaagccgttggccgcttcttgaggtacctcgccgagaccaaattcttggcgtggccaacttcgcggggcagggagctgccagctattaaggagggtgtggttgaggcccaggcgaaatggggtgttggagggcgtggtggtgttgtttcttga

SEQ ID NO: 10701 - protein, 1178 aa, Muscodor strobelii
  misc_feature: SGI Peptide ID NO. 563407
  misc_feature (747)..(1034): Pfam Id: PF01073 Pfam Desc: 3-beta hydroxysteroid dehydrogenase/isomerase family
  misc_feature (41)..(504): Pfam Id: PF00501 Pfam Desc: AMP-binding enzyme
  misc_feature (746)..(998): Pfam Id: PF01370 Pfam Desc: NAD dependent epimerase/dehydratase family
  misc_feature (748)..(996): Pfam Id: PF07993 Pfam Desc: Male sterility protein
  misc_feature (747)..(772): Pfam Id: PF01073 Pfam Desc: 3-beta hydroxysteroid dehydrogenase/isomerase family
  misc_feature (746)..(789): Pfam Id: PF01370 Pfam Desc: NAD dependent epimerase/dehydratase family
  misc_feature (627)..(694): Pfam Id: PF00550 Pfam Desc: Phosphopantetheine attachment site
  misc_feature (7)..(1175): NCBI GI: 116181324 Blast Desc: conserved [Chaetomium globosum CBS 148.51] gi|88185587|gb|EAQ93055.1| conserved [Chaetomium globosum CBS 148.51]
  misc_feature (2)..(1164): NCBI GI: 171695584 Blast Desc: protein product [Podospora anserina] gi|170948034|emb|CAP60198.1| protein product [Podospora anserina]
  misc_feature (1)..(1175): NCBI GI: 85118158 Blast Desc: L-aminoadipate-semialdehyde dehydrogenase large subunit [Neurospora crassa OR74A] gi|9367276|emb|CAB97293.1| alpha-aminoadipate reductase large subunit [Neurospora crassa]
  misc_feature (2)..(1176): NCBI GI: 226282039 Blast Desc: L-aminoadipate-semialdehyde dehydrogenase large subunit [Paracoccidioides brasiliensis Pb01]
  misc_feature (2)..(1176): NCBI GI: 226287759 Blast Desc: L-aminoadipate-semialdehyde dehydrogenase large subunit [Paracoccidioides brasiliensis Pb18]
  misc_feature (2)..(1176): NCBI GI: 225684865 Blast Desc: L-aminoadipate-semialdehyde dehydrogenase large subunit [Paracoccidioides brasiliensis Pb03]
  misc_feature (7)..(1176): NCBI GI: 225555523 Blast Desc: L-aminoadipate-semialdehyde dehydrogenase large subunit [Ajellomyces capsulatus G186AR]
  misc_feature (7)..(1176): NCBI GI: 240273735 Blast Desc: L-aminoadipate-semialdehyde dehydrogenase large subunit [Ajellomyces capsulatus H143]
  misc_feature (7)..(1176): NCBI GI: 154270220 Blast Desc: L-aminoadipate-semialdehyde dehydrogenase large subunit [Ajellomyces capsulatus NAm1] gi|150410100|gb|EDN05488.1| L-aminoadipate-semialdehyde dehydrogenase large subunit NAm1]
  misc_feature (2)..(1157): NCBI GI: 261192914 Blast Desc: L-aminoadipate-semialdehyde dehydrogenase [Ajellomyces dermatitidis SLH14081] gi|239588998|gb|EEQ71641.1| L-aminoadipate-semialdehyde dehydrogenase [Ajellomyces SLH14081]
  misc_feature (1)..(1175): SWISSPROT Homolog: EC 1.2.1.31 L-aminoadipate-semialdehyde dehydrogenase
  misc_feature: Useful for introducing or modulating the production of volatile compounds
MLFDPTIGAIHEIFHKNALKTPDAPCVTETASSTTPERRFTYKQIYESSNILANQLHEAGITNGDVVMIFAYRSVELVIAFMGALAAGATITVLDPAYPPARQQIYLEVSRPKALITIGKARDENGPFAPRVQKYVDEELSLKIRVPELRMSDTGAITGGEVDGKEVFTDTESKASSPPDVLVGPDSSSILSFTSGTTSTPKGVLSRHYNLAKFYPWMAKTFKWTSETKFACLSGISHDPIQRDIFTPLFLGGQILIPARENIAHERLAEWFRDQQPNATHLTPAMGQILCGGAKAEFPSLKWVLYVGDILTKKDCASLRKLAPNAEICAAYGTTETSRSVSYYSIKSHAEDPNALDHFGDIVPAGKGIENVQLLVVNREDPTKLCGIGEVGEIMLRAAGLAEISCAFIEKTNEKFLKNWFVDNQKWIDADNKVASNEPWRKYYKGPRDRIYRTGDLGYYLDDSGNCAITGRADDQVKIRGFRIELNEIDSNLRGHHLVRECKTLLRRDRNEEQTLVSYIVPEHQEWLNWLAERNLEDIEDQGTEIGPVLIYPKRYRPMQTEVRDHLKSRLPVHAVPTYFIFLKKMPLNPNGKVDGPALPFPDAALISEEASEEDQKRWETLSSTEKELAQQWATLIPGVNAKTLLPESDFFESGGHSLLAQQLLLHIRKTMGVNVSISSLYSNASLRALSTQIDRQREGKDDASATEDGEAAVYAQSLEKLLSSLDSKYQTADPNTLSPASKTTVFVTGATGFLGSYIVKDLLRRENVHVIAHVRGTKGVPAALERLQRSIRGYGVWQDSWATRLSAVVGDLTQPHLGLDDDTWKTVGDAADVIIHNGALVHWVKQYKDMERSNVLSTIEALRLCNQGKPKLFSFVSSTSVLDTDHYIQLSHEQTGTGQGAIMEADNMEGSRQGLGTGYGQTKWVSEQLVREAGRRGLLGSVIRPGYILGDAETGVCNHDDFLVRMLKGCIQLSSRPRIVNTVNAVPAGHVSTVVVAASLNPVPAEAANSNSGSGSGDVGVHVIHVTAHPRLRMSEYLSILSYYGYDVPEVDYDHWKGQLEAFVSAGSVQKDEEQSALMPLFHMATNNLPTNTRAPELDDRNAVIVLKADADRWTGVDDSAGEGISREAVGRFLRYLAETKFLAWPTSRGRELPAIKEGVVEAQAKWGVGGRGGVVS

SEQ ID NO: 10702 - DNA, 3965 bp, Muscodor strobelii
  misc_feature: SGI EST ID NO. CUFF.25459.1
  misc_feature: Variant of the nucleotide sequence at SEQ ID NO 10700
tcaatttcgaggtaacatataaacgagcgacgacctttttgagatgttgccgtggagctgtggactcaattgctgagaggagtatatatcttgacaaattactgtcgccataatgctcttcgacccgacgtccgacttggattggagtggatagtaagtgatctaaactgttaaagatcaaaaagcggtcattcatcttgaagctcgcgaccgtgtaaaaacaatagtgaaaataactaacgcaacacctttccggctaccagtatcggcgccatccacgagatctttcacaaaaatgctttgaagacgcccgacgcgccatgcgtcacggaaacggcttcttctactacgcctgaaaggcgattcacttacaagcagatctacgagtcgtccaacatcttggctaaccagctgcatgaggctggcatcaccaatggcgatgttgtcatgatctttgcctaccgttccgtcgagctcgtcattgctttcatgggagccctagctgccggtgctacgatcactgtcctagatcccgcgtaccctccagcaagacagcagatctaccttgaagtttcccgaccaaaagccttgatcaccattggcaaagccagggacgagaatggccccttcgcgccgcgtgttcagaagtatgtggatgaagagctatctctcaagatacgagtaccagaactacgaatgagcgatactggcgccattactggtggcgaagtagatgggaaggaagtcttcactgatacggagtcgaaagcatcatcacctccagatgttctagtggggccggactcatctagcatcctgagtttcacaagtggcacgacgtccacgcccaagggggtgttgagcaggcattacaacctagccaagttctacccgtggatggcaaaaaccttcaaatggacctcggaaaccaagttcgcttgtctaagtggtataagccatgaccctattcaacgagatattttcacccctctcttcttgggtggacagatcctcattcctgctcgcgagaatatcgcccacgaaaggttggcagaatggtttcgtgaccagcagcccaacgcgacccatttgacgccagcaatgggtcaaatcttgtgcggaggtgccaaggcagagttcccttctttgaagtgggttctctacgtaggagatatcctcaccaagaaggattgcgcctcgctccgtaagctagcccctaacgcggagatttgcgccgcctatggcaccacggagaccagccgcagtgtatcatactacagcatcaagagtcatgccgaagatccgaacgcactagatcactttggcgacattgtccctgccggaaagggcatcgagaacgtccagcttctcgtagttaatcgggaggatccaactaagctttgcggaatcggagaggttggtgagattatgttaagagcagcaggcttagccgagataagttgtgccttcattgtttctagttgagtcctgctgacgaacatctgaatttacggatatctaaatgacgaggagaaaactaatgaaaaattcctgaagaactggttcgtcgacaaccagaagtggattgacgcagataacaaagtggcatctaatgagccctggagaaagtattacaaaggcccacgagacagaatttataggactggcgatttgggatattatttggacgattctggtaattgcgcaatcacaggcagagctgatgatcaagtcaagatccgtggcttccgcatcgaactgaatgagattgatagcaacttgagaggacaccatctcgtccgtgagtgcaagacgctgcttcgaagagatcgaaatgaggagcaaacacttgttagctacattgtacctgaacatcaggagtggctcaactggttagcagagcgcaacctcgaagatattgaggatcaaggtaccgaaattggacccgtcctcatctatcccaaacgctaccggcccatgcaaaccgaggttcgagatcatctcaagtctcgacttcctgtacacgctgttccgacttatttcatttttctaaagaaaatgccgttaaatcctaatggcaaagtggacggcccagccttgccattcccggatgccgctttgatctcggaagaggcttcagaagaagatcaaaagagatgggaaacgctgagtagcaccgaaaaggaactggcacagcaatgggcgacccttatccctggtgtgaatgccaagactctgttacctgagtcagatttctttgagagtggtggacacagtctgctggcccagcagcttctactccacatccgcaagaccatgggagtcaatgtgtccatcagctcactgtattctaacgcatctctccgggctctgagcacgcagattgaccgccagcgtgagggtaaggacgatgctagtgcgacagaggacggcgaggcagcagtatatgctcagtcactcgaaaagctgcttagtagcctggactccaaatatcaaaccgcagacccgaatacgctctcaccggctagcaagacgaccgtcttcgtgacaggcgctacgggattcttaggctcgtacatcgtcaaggatttactcaggcgtgagaatgtgcatgtgatcgcccatgtccgtggaacaaagggggtgcctgccgctctcgagcgtctccagagatcaattcgcggatacggtgtgtggcaggattcctgggccaccaggctcagtgccgtcgtcggtgacctgacacagccacaccttggactagatgacgatacatggaagacggttggcgacgctgctgatgtgataattcataatggcgcccttgtccactgggtaaaacagtataaggatatggagcgtagcaacgttttatcaaccatcgaagccctgcgactttgcaaccagggaaaacctaagcttttctccttcgttagctcaacaagtgttcttgacacggatcattatattcagctgtcgcacgaacagactggtaccggacagggtgccatcatggaagcagataacatggaagggagtcgccagggcctaggcactggctacggccagaccaaatgggtatctgaacaactcgtccgcgaggccggcagacgcggtctcctcggatctgtgattcggccgggctatatccttggcgacgccgagacgggtgtctgtaatcacgacgacttccttgtccggatgctcaagggttgcattcagctgtctagtcgcccacgcatcgtcaacactgttaatgctgtgccggctggtcatgtctcaacagtcgttgtcgccgctagcttgaaccccgtcccagccgaagcggcaaatagcaacagcggcagcggcagcggcgatgtcggcgttcacgttatccatgtcactgcccacccgcgcctacgtatgagcgagtatctctctatcctgagttactatggctacgatgttcccgaggtggattatgatcactggaaaggccaacttgaggcatttgtctcagctggttctgtacagaaggacgaggaacagagtgctttgatgcctcttttccacatggcgacgaacaatcttcccactaatactcgcgcgccggaactggacgatcggaatgctgttattgttctgaaggctgatgcggacaggtggacaggagtcgatgacagtgctggagaaggcataagtagggaagccgttggccgcttcttgaggtacctcgccgagaccaaattcttggcgtggccaacttcgcggggcagggagctgccagctattaaggagggtgtggttgaggcccaggcgaaatggggtgttggagggcgtggtggtgttgtttcttgagagagcaaaaaggggcgtatcaaaaggaatatggtaaaagctttgatagatcggactgcctagataaaaatggcgggatgataaactaagaattttgaagaagatgaggcctacgtgccatgaga

SEQ ID NO: 10703 - DNA, 1332 bp, Muscodor strobelii
  misc_feature: SGI cDNA ID NO. 563408
  misc_feature: Reduced expression when VOC is produced
  misc_feature: Encodes the peptide sequence at SEQ ID NO 10704
atgtcgtggaaggcctcggccaagttgatggataccatcggccactatgcaaactttccggccaccggggtcagcttgaggcagatggtccaattcggcgagaggccctcggttgggaccctgttccgtgcttcccaattcctcgccgaagagctccccatccgccttgcacaccgcgtccaggaactcactcacttgcccgatggcctcagcgacatgccctcggtcaagaaggtccaagactggtatgcgcagtctttcgaggagatcaccgctttagaacggccggacctcgagagggaagtcaaacaaagactcttgcatcccggcaagtataacagcaatggacgaagcgcgatcctgtccgaagccatcccgaaccccagcatacgcgagggacaatatgcttcctcggccatgttggcacagtcgggaatgaccacgagcaacggcaagaagcagcaagccgctgctaggaggtacttcgccatggtcgacgatgccggggactggccacccgagctgcaagcctacaactccaagtttgctcagtgcctacatactatcaagcggaggcacgacggtgtggtcaccaccatggcacagggcatcttagagtacaagcgcaagcggcagcgaatgcagatcgatcacaacattcagtccttcctcgaccgtttctacatgtcgcgaattggcatccgtatgcttatcgggcaacacatagccttgacagaccaaagccaccaccgagaccctgcctacgtcggcatcatatgtaccaagacgaatgttcatgacctcgctcaggaggccatcgagaatgctcggttcgtctgcgaggatcattatggacttttcgaggcccccaagatacaattggtctgcaacccagacctcaacttcatgtatgtgcctgggcatttgtcgcacatgcttttcgagaccttgaagaattctctccgagccgtagtcgagacacacgggcaggacaagcaagagtttcccgtgacgaaagtcattgtggctgagggcagggaagacatcacgatcaagatttcggacgagggtggtggtattccccgaagtgctattccgcttgtgtggacgtacatgtacaccaccgtggatcgcacgcccaacttggaccctgacttcgataagagcgatttcaaggctccgatggcgggcttcgggtacggattaccgatttcgcgactctacgctcgatactttggaggcgatttgaagcttattagcatggaaggatatggcacagatgtgtatctgcatctgaacagactctccagctcctctgagcctctacagtag

SEQ ID NO: 10704 - protein, 443 aa, Muscodor strobelii
  misc_feature: SGI Peptide ID NO. 563408
  misc_feature (304)..(435): Pfam Id: PF02518 Pfam Desc: Histidine kinase-, DNA gyrase B-, and HSP90-like ATPase
  misc_feature (1)..(443): NCBI GI: 164424563 Blast Desc: NCU06760 [Neurospora crassa OR74A] gi|157070567|gb|EAA34296.2| NCU06760 [Neurospora crassa OR74A]
  misc_feature (1)..(443): NCBI GI: 39971691 Blast Desc: conserved [Magnaporthe grisea 70-15] gi|145019636|gb|EDK03864.1| conserved [Magnaporthe grisea 70-15]
  misc_feature (1)..(443): NCBI GI: 18376030 Blast Desc: related to pyruvate dehydrogenase kinase isoform 2, mitochondrial [Neurospora crassa]
  misc_feature (3)..(443): NCBI GI: 226280205 Blast Desc: pyruvate dehydrogenase kinase [Paracoccidioides brasiliensis Pb01]
  misc_feature (3)..(443): NCBI GI: 261195552 Blast Desc: pyruvate dehydrogenase kinase [Ajellomyces dermatitidis SLH14081] gi|239588052|gb|EEQ70695.1| pyruvate dehydrogenase kinase [Ajellomyces dermatitidis SLH14081] pyruvate
  misc_feature (3)..(443): NCBI GI: 255946265 Blast Desc: Pc20g14220 [Penicillium chrysogenum Wisconsin 54-1255] gi|211588635|emb|CAP86751.1| Pc20g14220 [Penicillium chrysogenum Wisconsin 54-1255]
  misc_feature (1)..(442): NCBI GI: 116205039 Blast Desc: conserved [Chaetomium globosum CBS 148.51] gi|88176531|gb|EAQ83999.1| conserved [Chaetomium globosum CBS 148.51]
  misc_feature (1)..(424): NCBI GI: 171689312 Blast Desc: protein product [Podospora anserina] gi|170944618|emb|CAP70729.1| protein product [Podospora anserina]
  misc_feature (3)..(443): NCBI GI: 119481249 Blast Desc: pyruvate dehydrogenase kinase [Neosartorya fischeri NRRL 181] gi|119408807|gb|EAW18756.1| pyruvate dehydrogenase kinase [Neosartorya fischeri NRRL 181]
  misc_feature (3)..(443): NCBI GI: 145232164 Blast Desc: An02g04000 [Aspergillus niger] gi|134056447|emb|CAL00614.1| protein product [Aspergillus niger]
  misc_feature (9)..(443): SWISSPROT Homolog: EC 2.7.11.2 [Pyruvate dehydrogenase (acetyl-transferring)] kinase
  misc_feature: Useful for introducing or modulating the production of volatile compounds
MSWKASAKLMDTIGHYANFPATGVSLRQMVQFGERPSVGTLFRASQFLAEELPIRLAHRVQELTHLPDGLSDMPSVKKVQDWYAQSFEEITALERPDLEREVKQRLLHPGKYNSNGRSAILSEAIPNPSIREGQYASSAMLAQSGMTTSNGKKQQAAARRYFAMVDDAGDWPPELQAYNSKFAQCLHTIKRRHDGVVTTMAQGILEYKRKRQRMQIDHNIQSFLDRFYMSRIGIRMLIGQHIALTDQSHHRDPAYVGIICTKTNVHDLAQEAIENARFVCEDHYGLFEAPKIQLVCNPDLNFMYVPGHLSHMLFETLKNSLRAVVETHGQDKQEFPVTKVIVAEGREDITIKISDEGGGIPRSAIPLVWTYMYTTVDRTPNLDPDFDKSDFKAPMAGFGYGLPISRLYARYFGGDLKLISMEGYGTDVYLHLNRLSSSSEPLQ

SEQ ID NO: 10705 - DNA, 2790 bp, Muscodor strobelii
  misc_feature: SGI EST ID NO. CUFF.25537.2
  misc_feature: Variant of the nucleotide sequence at SEQ ID NO 10703
cgaaagcatcgcgcccttgcgcgctctgttcacggttcggctacgcaggctgggcgaagggacttgtcgagcttgttcccgggtgtccagtggcgctaacctacccccacacctgtacctcgctcagtgctccacgcccgcttgccccgttcctcggctgtcatggcctgcattcggcaagaatcgtaatcctcgcccgcccaggttgctcattgctcatgctctcaaacacccatcagcagaagtacagaacatgactgatccaaaatctccagaaccaatttgttttcaaatgcccgtatgagaggaactcaactcaagctttcgatatctcctccagcttctcctctggcatgcttcaaggttcactgtctcgcccgtctcattaggtaccgtacccttattagcaccaagcccggccaagtccaggtcccgtccgtccgaccagaccctcgtcacacgatcacgagtcagcttatagactctcttctgcttctgacttacccttgacacagtccaaacaccagcttgaacacgaattgactgcattctttgttctttgtcgcctcgtttgtgatctgttgctatttgctgtcacattcccgcgccctcgtcaactccatatagcttctggtacctcccgtttagctgtgtcgactgcgtcaccgtccgtaccgcggggttccgcaaccgctcctacctcttgctacctctgttagcacgttcccgttgcgcgccttccattccacccccatggcctattaacgcgcataatctctcttccagtctttggggatttcttgtaggggccattcgcgcactgccggttgcacaccgtagcagtacatgatgtcgtggaaggcctcggccaagttgatggataccatcggccactatgcaaactttccggccaccggggtcagcttgaggcagatggtccaattcggcgagaggccctcggttgggaccctgttccgtgcttcccaattcctcgccgaagagctccccatccgccttgcacaccgcgtccaggaactcactcacttgcccgatggcctcagcgacatgccctcggtcaagaaggtccaagactggtatgcgcagtctttcgaggagatcaccgctttagaacggccggacctcgagagggaagtcaaacaaagactcttgcatcccggcaagtataacagcaatggacgaagcgcgatcctgtccgaagccatcccgaaccccagcatacgcgagggacaatatgcttcctcggccatgttggcacagtcgggaatgaccacgagcaacggcaagaagcagcaagccgctgctaggaggtacttcgccatggtcgacgatgccggggactggccacccgagctgcaagcctacaactccaagtttgctcagtgcctacatactatcaagcggaggcacgacggtgtggtcaccaccatggcacagggcatcttagagtacaagcgcaagcggcagcgaatgcagatcgatcacaacattcagtccttcctcgaccgtttctacatgtcgcgaattggcatccgtatgcttatcgggcaacacatagccttgacagaccaaagccaccaccgagaccctgcctacgtcggcatcatatgtaccaagacgaatgttcatgacctcgctcaggaggccatcgagaatgctcggttcgtctgcgaggatcattatggacttttcgaggcccccaagatacaattggtctgcaacccagacctcaacttcatgtatgtgcctgggcatttgtcgcacatgcttttcgagaccttgaagaattctctccgagccgtagtcgagacacacgggcaggacaagcaagagtttcccgtgacgaaagtcattgtggctgagggcagggaagacatcacgatcaagatttcggacgagggtggtggtattccccgaagtgctattccgcttgtgtggacgtacatgtacaccaccgtggatcgcacgcccaacttggaccctgacttcgataagagcgatttcaaggctccgatggcgggcttcgggtacggattaccgatttcgcgactctacgctcgatactttggaggcgatttgaagcttattagcatggaaggatatggcacagatgtgtatctgcatctgaacagactctccagctcctctgagcctctacagtagcaattagcagtcatgagggatggcgcgacggcggcgtcatcgttgtcaccccgaggattggcgatgccgttgagaatgatgcaaaagcgcttgaaatattttgaggtttctgagcgtaagcaggtcggtgacgctgagagtatgatgcaggagagcgcaagactcacgcacgatgaatatgggggcgaattgtgagattatagagtggaacgtcgaactgacgaagagatcggacgaactcagcaaggacacaaccggagatactataatgtactaagaactacccgacagcattggaagctgtgttgctccatcccgctgccttttttgctggagcttggggcggctatctgtttgtctaccgcgacgtaacgtcttggaagtgttggtctatcaaaattcaacgggagcatcactgcatcatcacatagcattttcgctccggaggagttgggatttgtttgggatggcgaatggcgtgaaaatggaaacatgactactgagggctgatttgtcattttagagcgcagatgagagaaattcgaaaagaaagaatcgagcgttgatgctattgcctacctgagaaatgttgtggttcggtgtgcaaaa

SEQ ID NO: 10706 - DNA, 1047 bp, Muscodor strobelii
  misc_feature: SGI cDNA ID NO. 563409
  misc_feature: Encodes the peptide sequence at SEQ ID NO 10707
atggctaatgcatcacccgacaatagcaatgggagtggcgacactcctggggagccgcaaacagccatcaagcgacccaacaccacgtcttatcatgactttgctggatatcagtcctcgccaccagtctcaccatctataaatacgttctctctgggcatgtccccactttcgccgtttcgtcaccatttctcacctgtttccgctcggtcctcaacttcacaccaacgctcagactcctatcaatcgcattcccccgacgactttggccaggatggcagagacgtccttgttcaaaggctaaatgacttagcctccaagctggctgagcgatcccacgtcgatgatgagaatatcagcgctatgcatgccagagtcgatgagatggaaaatgctctcgtcacgcctggctataggttaaaggtgaacattcatcaatctgatgtttcgattcaaagtccgagctatgatggggatgagagttcatccccttgggacacaccaggcgaggccaggcgacgattgggttctcctattaagtttaccgcgccggctggcaaggacgttgaggtgatcaccgactctacgaaaacaaggacaaagccgccaaaggcttcgaaaatgtccgtagccgaggccgagcgcatcgtcgcagaagcacaagatctacagaaaggcttagaggccgtcctcgtaaattttcgtactcgacaacaggaaacggagagaatccaggaactcttgatcgagcgagcagagcgcgcggaagagcactcttcggagctcgaaaatgagctgagattaagtgaattcgagcgcaaacaaggtgagatggatatgcgaaatctccagatccagctaaaggcaatcgaggtgcagtgcctagactacatgcctgagaatgttgagagcgagctccaagcgagtatcgacgtgtggcgggaagaatggtcggattacaagcgcaagaaggcaaggaaaagagaggagctcacgagagcattgtcagaaacccctacgagatcgcagaagacgccgagaggttga

SEQ ID NO: 10707 - protein, 348 aa, Muscodor strobelii
  misc_feature: SGI Peptide ID NO. 563409
  misc_feature (39)..(327): NCBI GI: 46117146 Blast Desc: FG04415.1 [Gibberella zeae PH-1]
  misc_feature (76)..(317): NCBI GI: 171689310 Blast Desc: protein product [Podospora anserina] gi|170944617|emb|CAP70728.1| protein product [Podospora anserina]
  misc_feature (39)..(327): NCBI GI: 256729477 Blast Desc: NECHADRAFT_71364 [Nectria haematococca mpVI 77-13-4]
  misc_feature (204)..(330): NCBI GI: 85110583 Blast Desc: NCU06759 [Neurospora crassa OR74A] gi|28881345|emb|CAD70387.1| [Neurospora crassa] gi|28925214|gb|EAA34295.1| [Neurospora crassa OR74A]
  misc_feature (189)..(333): NCBI GI: 39971689 Blast Desc: MGG_07160 [Magnaporthe grisea 70-15] gi|145019635|gb|EDK03863.1| MGG_07160 [Magnaporthe grisea 70-15]
  misc_feature (54)..(313): NCBI GI: 154305514 Blast Desc: [Botryotinia fuckeliana B05.10] gi|150853313|gb|EDN28505.1| [Botryotinia fuckeliana B05.10]
  misc_feature (54)..(173): NCBI GI: 154305512 Blast Desc: [Botryotinia fuckeliana B05.10] gi|150853312|gb|EDN28504.1| [Botryotinia fuckeliana B05.10]
  misc_feature (215)..(317): NCBI GI: 116205037 Blast Desc: CHGG_10402 [Chaetomium globosum CBS 148.51] gi|88176530|gb|EAQ83998.1| CHGG_10402 [Chaetomium globosum CBS 148.51]
  misc_feature (54)..(281): NCBI GI: 156065961 Blast Desc: [Sclerotinia sclerotiorum 1980] gi|154691850|gb|EDN91588.1| [Sclerotinia sclerotiorum 1980]
MANASPDNSNGSGDTPGEPQTAIKRPNTTSYHDFAGYQSSPPVSPSINTFSLGMSPLSPFRHHFSPVSARSSTSHQRSDSYQSHSPDDFGQDGRDVLVQRLNDLASKLAERSHVDDENISAMHARVDEMENALVTPGYRLKVNIHQSDVSIQSPSYDGDESSSPWDTPGEARRRLGSPIKFTAPAGKDVEVITDSTKTRTKPPKASKMSVAEAERIVAEAQDLQKGLEAVLVNFRTRQQETERIQELLIERAERAEEHSSELENELRLSEFERKQGEMDMRNLQIQLKAIEVQCLDYMPENVESELQASIDVWREEWSDYKRKKARKREELTRALSETPTRSQKTPRG

SEQ ID NO: 10708 - DNA, 1410 bp, Muscodor strobelii
  misc_feature: SGI EST ID NO. CUFF.25370.1
  misc_feature: Variant of the nucleotide sequence at SEQ ID NO 10706
cgtcaagaagctatcagtctgaatctgaaaacctatagcataatgaggcgatcattgaggttatttcatcattgaaactagagctaagaggataggatagaaggccagagtgcttttgccatgcagcctctaaaactcaactgttgtcccattggcacccaaatgttatgatggctaatgcatcacccgacaatagcaatgggagtggcgacactcctggggagccgcaaacagccatcaagcgacccaacaccacgtcttatcatgactttgctggatatcagtcctcgccaccagtctcaccatctataaatacgttctctctgggcatgtccccactttcgccgtttcgtcaccatttctcacctgtttccgctcggtcctcaacttcacaccaacgctcagactcctatcaatcgcattcccccgacgactttggccaggatggcagagacgtccttgttcaaaggctaaatgacttagcctccaagctggctgagcgatcccacgtcgatgatgagaatatcagcgctatgcatgccagagtcgatgagatggaaaatgctctcgtcacgcctggctataggttaaaggtgaacattcatcaatctgatgtttcgattcaaagtccgagctatgatggggatgagagttcatccccttgggacacaccaggcgaggccaggcgacgattgggttctcctattaagtttaccgcgccggctggcaaggacgttgaggtgatcaccgactctacgaaaacaaggacaaagccgccaaaggcttcgaaaatgtccgtagccgaggccgagcgcatcgtcgcagaagcacaagatctacagaaaggcttagaggccgtcctcgtaaattttcgtactcgacaacaggaaacggagagaatccaggaactcttgatcgagcgagcagagcgcgcggaagagcactcttcggagctcgaaaatgagctgagattaagtgaattcgagcgcaaacaaggtgagatggatatgcgaaatctccagatccagctaaaggcaatcgaggtgcagtgcctagactacatgcctgagaatgttgagagcgagctccaagcgagtatcgacgtgtggcgggaagaatggtcggattacaagcgcaagaaggcaaggaaaagagaggagctcacgagagcattgtcagaaacccctacgagatcgcagaagacgccgagaggttgagatactaggcgttggtgttcaagactgtgacacctaagagtcacctatacttgagcactgttagttcacgggtacatatctaagtatggtgttccaatgcacacctccagctgatcgtattgttatgattgcaattaggcagtcaacaccattgattgctgcaatacagatatcacatcaattacatccatcg

SEQ ID NO: 10709 - DNA, 336 bp, Muscodor strobelii
  misc_feature: SGI cDNA ID NO. 563410
  misc_feature: Encodes the peptide sequence at SEQ ID NO 10710
atgaaattcttccttctcgtcgctttggcttccgcagcagcagctattcccgttaggacgagcagcgaaaaacgagaaattgacccattcagaactgttgacgatgaaaacgcttcttacaagcgccagatcgatctttttagaactgtcgatgaggacgagaatgcttctgtatacaaacgccagatcgaccctttcagaaccgtggatgacgaagaggatacctctgcgtacaagcgccagattgaccccttccgcactgtagatgacgaagcggcttcctataagcgccagattgaccctttcagaaccgtcgacgatgaaatgtactcctaa

SEQ ID NO: 10710 - protein, 111 aa, Muscodor strobelii
  misc_feature: SGI Peptide ID NO. 563410
MKFFLLVALASAAAAIPVRTSSEKREIDPFRTVDDENASYKRQIDLFRTVDEDENASVYKRQIDPFRTVDDEEDTSAYKRQIDPFRTVDDEAASYKRQIDPFRTVDDEMYS

SEQ ID NO: 10711 - DNA, 201 bp, Muscodor strobelii
  misc_feature: SGI EST ID NO. CUFF.25284.0
  misc_feature: Variant of the nucleotide sequence at SEQ ID NO 10709
tctgtacctacattttcattcaatctagtcttgtatctagtgcatataacttcataatcatcttcatcatgaaattcttccttctcgtcgctttggcttccgcagcagcagctattcccgttaggacgagcagcgaaaaacgagaaattgacccattcagaactgttgacgatgaaaacgcttcttacaagcgccagatcg

SEQ ID NO: 10712 - DNA, 1620 bp, Muscodor strobelii
  misc_feature: SGI cDNA ID NO. 563411
  misc_feature: Encodes the peptide sequence at SEQ ID NO 10713
atggagaacacatcacagatccaagcccgagttcaggccgtacggtcagaagccgagcagttaatgcgcattggcggcacgccgggagcagccattgccatcgtacaccaaggcacgctgatccacagcgagtacattggctatcaggatgtagcccaaagaactctcattaatgacgagaccgtctttccttgcgcatcgttaacgaaggcagtcgttgcagctgctgttgcgctgaacgtcgaggagggcaagtttggctgggagacccccgtcaaggacattgtgcctgagttccatctgagaagcaagactctgcaccatcacatgacaccggtcgactgtctttcgcaccgagcaggcttacaaaacccactctattggctagggaatcagaaccgccggctcgtttccaggaaacacagcctcgacttcatcaacaacctacaccaagtcacgcccttccgcaatgaatatcattacaataacttgggctacgagatagtatctcatatcctggaatccgcctctggccacccttggagacacgttattcactcgtccatactggagccattgcaaatgacacgcactagcatgcaagcctcttgcgtccaggaaaatgttgctaaaacataccaggccttagaagacgcttctgtctttgaaatcccttcatcgctcgctgataacgatggggtaggggatcctggatcggcaatgcgcagctgtattcgcgatctcgttcgactctacactgccttcttgacgacacgtcagtctcaattagattccggcacgactgcaactccggaccaccccctcaagcaggttccctttctcttctcatctaaaatttcgatggatcgtcttatcgaccgcgaaactagctacgcgctaggttgggcgcgggtgcagactcctgggccgatgggcgccattggtttgaacccagatcttttaccaaaaatgcccgatgttgcgcgtggccatgagtcgacccttgttttctaccaccagggcagtatgcccggaaatctaggcgctgtaaacttgattccttcctctcaaggcgcgatcatcgtcttgaccaattcaatggctctgaatgatgtggcggattggatcggtcaattgtacttggaagcctacctcggcgtgaaaaatcggaacgattacatcgatctggctcacaagacggcccaatatgctgttgggtggcacgcacgtttactgagtgagctgcaggagaccaagataccaggaaccacaccacgaagactgttcgactatgcaggggtgtacttgaaccatgcgaaaactatgtcaatcgtagtgactgtccagggagaaggtgacgatggatcgctacacatggctttccagggtctcgactccgagacgtttcttctgcgccattaccaacacgagattttcacatggcttctgccttgggatgaaacagtgaagcgaggtcgattcacgataggttccacagctttcgcggactattacaaaatttgtttcggagtcgacactcagacagggctaatcagctttctcgcctggtggcacgataaggctctcccagaacctgagcgcttttccaaggttgtttga

SEQ ID NO: 10713 - protein, 539 aa, Muscodor strobelii
  misc_feature: SGI Peptide ID NO. 563411
  misc_feature (14)..(385): Pfam Id: PF00144 Pfam Desc: Beta-lactamase
  misc_feature (7)..(537): NCBI GI: 256723497 Blast Desc: NECHADRAFT_42336 [Nectria haematococca mpVI 77-13-4]
  misc_feature (6)..(529): NCBI GI: 242821692 Blast Desc: D-aminoacylase, [Talaromyces stipitatus ATCC 10500] gi|218712653|gb|EED12078.1| D-aminoacylase, [Talaromyces stipitatus ATCC 10500]
  misc_feature (1)..(536): NCBI GI: 46119888 Blast Desc: FG04813.1 [Gibberella zeae PH-1]
  misc_feature (5)..(530): NCBI GI: 256723834 Blast Desc: NECHADRAFT_37243 [Nectria haematococca mpVI 77-13-4]
  misc_feature (6)..(537): NCBI GI: 258570013 Blast Desc: [Uncinocarpus reesii 1704] gi|237904080|gb|EEP78481.1| [Uncinocarpus reesii 1704]
  misc_feature (10)..(535): NCBI GI: 255938135 Blast Desc: Pc13g14300 [Penicillium chrysogenum Wisconsin 54-1255] gi|211584458|emb|CAP92499.1| Pc13g14300 [Penicillium chrysogenum Wisconsin 54-1255]
  misc_feature (7)..(509): NCBI GI: 85090106 Blast Desc: NCU07766 [Neurospora crassa OR74A] gi|12718332|emb|CAC28567.1| conserved [Neurospora crassa] gi|28919602|gb|EAA29024.1| [Neurospora crassa OR74A]
  misc_feature (18)..(494): NCBI GI: 46102717 Blast Desc: FG00057.1 [Gibberella zeae PH-1]
  misc_feature (11)..(530): NCBI GI: 258572668 Blast Desc: [Uncinocarpus reesii 1704] gi|237905366|gb|EEP79767.1| [Uncinocarpus reesii 1704]
  misc_feature (238)..(537): NCBI GI: 116205982 Blast Desc: CHGG_02284 [Chaetomium globosum CBS 148.51] gi|88182881|gb|EAQ90349.1| CHGG_02284 [Chaetomium globosum CBS 148.51]
MENTSQIQARVQAVRSEAEQLMRIGGTPGAAIAIVHQGTLIHSEYIGYQDVAQRTLINDETVFPCASLTKAVVAAAVALNVEEGKFGWETPVKDIVPEFHLRSKTLHHHMTPVDCLSHRAGLQNPLYWLGNQNRRLVSRKHSLDFINNLHQVTPFRNEYHYNNLGYEIVSHILESASGHPWRHVIHSSILEPLQMTRTSMQASCVQENVAKTYQALEDASVFEIPSSLADNDGVGDPGSAMRSCIRDLVRLYTAFLTTRQSQLDSGTTATPDHPLKQVPFLFSSKISMDRLIDRETSYALGWARVQTPGPMGAIGLNPDLLPKMPDVARGHESTLVFYHQGSMPGNLGAVNLIPSSQGAIIVLTNSMALNDVADWIGQLYLEAYLGVKNRNDYIDLAHKTAQYAVGWHARLLSELQETKIPGTTPRRLFDYAGVYLNHAKTMSIVVTVQGEGDDGSLHMAFQGLDSETFLLRHYQHEIFTWLLPWDETVKRGRFTIGSTAFADYYKICFGVDTQTGLISFLAWWHDKALPEPERFSKVV

SEQ ID NO: 10714 - DNA, 1682 bp, Muscodor strobelii
  misc_feature: SGI EST ID NO. CUFF.25304.0
  misc_feature: Variant of the nucleotide sequence at SEQ ID NO 10712
ccaagtcacgcccttccgcaatgaatatcattacaataacttgggctacgagatagtatctcatatcctggaatccgcctctggccacccttggagacacgttattcactcgtccatactggagccattgcaaatgacacgcactagcatgcaagcctcttgcgtccaggaaaatgttgctaaaacataccaggccttagaagacgcttctgtctttgaaatcccttcatcgctcgctgataacgatggggtaggggatcctggatcggcaatgcgcagctgtattcgcgatctcgttcgactctacactgccttcttgacgacacgtcagtctcaattagattccggcacgactgcaactccggaccaccccctcaagcaggttccctttctcttctcatctaaaatttcgatggatcgtcttatcgaccgcgaaactagctacgcgctaggttgggcgcgggtgcagactcctgggccgatgggcgccattggtttgaacccagatcttttaccaaaaatgcccgatgttgcgcgtggccatgagtcgacccttgttttctaccaccagggcagtatgcccggaaatctaggcgctgtaaacttgattccttcctctcaaggcgcgatcatcgtcttgaccaattcaatggctctgaatgatgtggcggattggatcggtcaattgtacttggaagcctacctcggcgtgaaaaatcggaacgattacatcgatctggctcacaagacggcccaatatgctgttgggtggcacgcacgtttactgagtgagctgcaggagaccaagataccaggaaccacaccacgaagactgttcgactatgcaggggtgtacttgaaccatgcgaaaactatgtcaatcgtagtgactgtccagggagaaggtgacgatggatcgctacacatggctttccagggtctcgactccgagacgtttcttctgcgccattaccaacacgagattttcacatggcttctgccttgggatgaaacagtgaagcgaggtcgattcacgataggttccacagctttcgcggactattacaaaatttgtttcggagtcgacactcagacagggctaatcagctttctcgcctggtggcacgataaggctctcccagaacctgagcgcttttccaaggttgtttgaaaaggagatgtatatcgggcgagacaaaaacattctagtatcgcgaaccattctttagaagcaaagggagtacggagactccagtatctacttcgataggctctgatgccactcaaatgaaactgtttaccgcaacatgacgtgggcagtctgtcaggctaagtggagtcactgcgtgtgaccgcagggtcaaccagaggatcgtatttatcgatgcaatcaagaggcgcatactttttgcagaggtagcacatatcattgtaggcactatagatatccatgagcaggcgcaataatcaactgaaaacgacagatttgtcacttacatcttccgattgataatgccagggtcggtggcggaccaattcaggttgcatttgagactacacagcctattccgatcgacccattcctcggctggctcggctggaggaaagcgagctaagtagccatccttatactctgacttgcccaacgtcccgcagagacgacacgcaagataccaatttcc

SEQ ID NO: 10715 - DNA, 597 bp, Muscodor strobelii
  misc_feature: SGI cDNA ID NO. 563412
  misc_feature: Encodes the peptide sequence at SEQ ID NO 10716
atgtataccaaatacttagtcgacctcatgccccgcgccggcgtagtgtatgagttggatgtgcataagagtgatctgaataagcaaacatatcgcgtcctcaaacgcgacaaacaagaccaaacaatccgcgaagccctacaagacgctggcttcaccacccggccgcagatcgacaaggctctggctgacctctgcgttaaggctatgtactggaagtgggccttcattgaggtcttgcagcctctcgtcccttgggcctccgaactggatgccggtctcttcgtcgacttctttttcgccattgtgtgtgcccgtcagcgatggaacgtcatgccccgtcgtcctttcgacaaaagtcagcatagccttatggctaaggagctggatatacttatccaggtttggggagacgtgtatgccaagctcaacttcgatttctcatccctcctcttcgatgaggaaatcaagaagaaaaatgccgagatgaagaagaaagaggacgaagaagatgctcgggctgcagagatggctgctctgatggatacgctcggtcccgtcgacgacaaggctcttgttgagactgtcgacgactaa

SEQ ID NO: 10716 - protein, 198 aa, Muscodor strobelii
  misc_feature: SGI Peptide ID NO. 563412
MYTKYLVDLMPRAGVVYELDVHKSDLNKQTYRVLKRDKQDQTIREALQDAGFTTRPQIDKALADLCVKAMYWKWAFIEVLQPLVPWASELDAGLFVDFFFAIVCARQRWNVMPRRPFDKSQHSLMAKELDILIQVWGDVYAKLNFDFSSLLFDEEIKKKNAEMKKKEDEEDARAAEMAALMDTLGPVDDKALVETVDD

SEQ ID NO: 10717 - DNA, 783 bp, Muscodor strobelii
  misc_feature: SGI cDNA ID NO. 563413
  misc_feature: Encodes the peptide sequence at SEQ ID NO 10718
atggctaacccatcgtcgtcttttgatcaagtcaagaaagagtacgacacatatgccggtaggtacaatgagtacagcaactacccctacggacaaatggaagagcaacttgtgggtattgcactcgacaattgcactggcgccactgttctcgatctcggcggcggcacaggtcttcgcgtccgccaagccatagatctaggcgccacgtctgtcgacgttgtcgatatctcccccgagatgctccgagaaggcgaagcagccctgaagaacaagggggaaacagtgcgctggttcgaagccgatgtctcaaagcctctacatcatctcccgttgcgcgagaattacgacatcgttatggcaaactgggtcttcgaccatgcgcactctatcgaagagtacgagggcatgtggaaaaatgtggctgcgcggctccggcctggagggcgtttcatcggtgtgcgatctgatgatccctatgtgccgtgctttgagagctgggaggcaccgtacgggatcacgtaccacgaacacaaggaagtcccgggcggcatcttgttccggtatacgatacactcggagccgaagattagcttcgaggcatgcactatgcatattaactataatggcagcatggagattttcgacaagtacgggttggaagatgtgaggaagatacctcatactgaagcacaggttgttaggaatgatctggagtattggaagttgtttcttgagaaaccgggcatgtgggttgtgacagcgaagaagagagaaagttga

SEQ ID NO: 10718 - protein, 260 aa, Muscodor strobelii
  misc_feature: SGI Peptide ID NO. 563413
  misc_feature (51)..(153): Pfam Id: PF08241 Pfam Desc: Methyltransferase domain
  misc_feature (51)..(151): Pfam Id: PF08242 Pfam Desc: Methyltransferase domain
  misc_feature (46)..(93): Pfam Id: PF01209 Pfam Desc: ubiE/COQ5 methyltransferase family
  misc_feature (6)..(223): NCBI GI: 171695498 Blast Desc: protein product [Podospora anserina] gi|170947991|emb|CAP60155.1| protein product [Podospora anserina]
  misc_feature (12)..(257): NCBI GI: 171680552 Blast Desc: protein product [Podospora anserina] gi|170939903|emb|CAP65129.1| protein product [Podospora anserina]
  misc_feature (13)..(257): NCBI GI: 169784990 Blast Desc: [Aspergillus oryzae RIB40] gi|83775703|dbj|BAE65823.1| protein product [Aspergillus oryzae]
  misc_feature (11)..(201): NCBI GI: 258566569 Blast Desc: [Uncinocarpus reesii 1704] gi|237907730|gb|EEP82131.1| [Uncinocarpus reesii 1704]
  misc_feature (13)..(199): NCBI GI: 238482877 Blast Desc: conserved [Aspergillus flavus NRRL3357] gi|220700727|gb|EED57065.1| conserved [Aspergillus flavus NRRL3357]
  misc_feature (11)..(257): NCBI GI: 156055742 Blast Desc: SS1G_05223 [Sclerotinia sclerotiorum 1980] gi|154703007|gb|EDO02746.1| SS1G_05223 [Sclerotinia sclerotiorum 1980]
  misc_feature (14)..(157): NCBI GI: 238482521 Blast Desc: methyltransferase, [Aspergillus flavus NRRL3357] gi|220700549|gb|EED56887.1| methyltransferase, [Aspergillus flavus NRRL3357]
  misc_feature (14)..(154): NCBI GI: 169765910 Blast Desc: [Aspergillus oryzae RIB40] gi|83765281|dbj|BAE55424.1| protein product [Aspergillus oryzae]
  misc_feature (1)..(157): NCBI GI: 169595500 Blast Desc: SNOG_00489 [Phaeosphaeria nodorum SN15] gi|160701106|gb|EAT91984.2| SNOG_00489 [Phaeosphaeria nodorum SN15]
  misc_feature (11)..(245): NCBI GI: 149179371 Blast Desc: PM8797T_10439 [Planctomyces maris DSM 8797] gi|148841807|gb|EDL56212.1| PM8797T_10439 [Planctomyces maris DSM 8797]
MANPSSSFDQVKKEYDTYAGRYNEYSNYPYGQMEEQLVGIALDNCTGATVLDLGGGTGLRVRQAIDLGATSVDVVDISPEMLREGEAALKNKGETVRWFEADVSKPLHHLPLRENYDIVMANWVFDHAHSIEEYEGMWKNVAARLRPGGRFIGVRSDDPYVPCFESWEAPYGITYHEHKEVPGGILFRYTIHSEPKISFEACTMHINYNGSMEIFDKYGLEDVRKIPHTEAQVVRNDLEYWKLFLEKPGMWVVTAKKRES

SEQ ID NO: 10719 - DNA, 278 bp, Muscodor strobelii
  misc_feature: SGI EST ID NO. CUFF.25334.0
  misc_feature: Variant of the nucleotide sequence at SEQ ID NO 10717
gtacgggatcacgtaccacgaacacaaggaagtcccgggcggcatcttgttccggtatacgatacactcggagccgaagattagcttcgaggcatgcactatgcatattaactataatggcagcatggagattttcgacaagtacgggttggaagatgtgaggaagatacctcatactgaagcacaggttgttaggaatgatctggagtattggaagttgtttcttgagaaaccgggcatgtgggttgtgacagcgaagaagagagaaagttgatttt

SEQ ID NO: 10720 - DNA, 1596 bp, Muscodor strobelii
  misc_feature: SGI cDNA ID NO. 563414
  misc_feature: Encodes the peptide sequence at SEQ ID NO 10721
atgccacgttgtcatggcttcaagctagaagaaaccacgatcaacatgcttcaggatgcatacgcatcgaatcgggtgacaattactcaggttgtgcaatgctatcttgatcggatacagcagacaaatggatggctgaattctgtacaagaagtcaattcagatgctatggccatcgctgctcgcttggacgacgagcgaaaatcaggcaaagcacgaggaccccttcacggaattccattcgttgctaaggacaacatggcaacaaaggacaacatggaaacaacagcaggtagctggatgttgatgggagcccgtgttccgcgcgatgcgttcgtcattggcaaacttcgcgatgctggcgctgtcctgctcggcaaatccgccttgacagaatgggcgcatatgcgcagcagtgatttaagcgaaggttactcagcccgaggaggtcaagtcagaagcccgtacaatttcacagttagcccaggcgggagcagctcggggagtgcagctgcagtcgctgctaatcagtgcgtattcagcctaggaaccgagacggacggaagcgtagttataccggccgaaagaaatgcacttgtcggacttaaacccactgttgggttgacttctaggaatggagtgataccagagacaagacaccaggacacggtagggattctgggaaggactgtccaagacacagcattagtgctggatcagatttacgggatagataagagggacattttcacaaatgcgcagaaaggaaaaaccccacatgaagcatacgcccagtctataacaggcagaaaagctctacgaggtgctaaatttggtattccatgggatagtttctggaaacataactctccagatcagaacagcgccttgctgctgctgttggacctcctccgccgagaaggcgctacgatcgtaaataacaccgagcttgataatcaccgtgctcttgttaacccaccgggatgggattgggattggaggggtaaacttgggtttgcaaacgagagtacatataccgtggtgaaagttgacttctataacgatatcaaggcctatctctctgagctcgaagacagtccaatccgctcagttgaagatataattcaatacaacctcgattcgagtggagcagaaggtggctcgccaggcattcaacccgggtttcttggcggacaagaacgattccacgagtcagccgccacaaagggagtggaggatgaagtgtaccattctgccttgtctttcacacagtctactgcccgtgaaggaattgaccatgctctagcacgagcagaagcacccttagatgctcttctcgctcctaccgattttcagcaggcagcgagtgtagcagcccaggcaggctaccccttgattacagtcgctgcaggtattaacagttctcgcactggtatgccgtatggattgatgctaatgggaacggcatgggatgagaagggactgatcaaatgggcaagcgctatcgaagatgcaatcgcggctaccaatgggatgaggccactgccagagtggagagatcaccgacgcaggattctcccaatcgtctacgagtag

SEQ ID NO: 10721 - protein, 531 aa, Muscodor strobelii
  misc_feature: SGI Peptide ID NO. 563414
  misc_feature (30)..(496): Pfam Id: PF01425 Pfam Desc: Amidase
  misc_feature (30)..(312): Pfam Id: PF01425 Pfam Desc: Amidase
  misc_feature (1)..(530): NCBI GI: 255954539 Blast Desc: Pc21g09860 [Penicillium chrysogenum Wisconsin 54-1255] gi|211589733|emb|CAP95883.1| Pc21g09860 [Penicillium chrysogenum Wisconsin 54-1255]
  misc_feature (1)..(529): NCBI GI: 242789754 Blast Desc: amidase family protein [Talaromyces stipitatus ATCC 10500] gi|218718016|gb|EED17436.1| amidase family protein [Talaromyces stipitatus ATCC 10500]
  misc_feature (1)..(528): NCBI GI: 258577697 Blast Desc: conserved [Uncinocarpus reesii 1704] gi|237903296|gb|EEP77697.1| conserved [Uncinocarpus reesii 1704]
  misc_feature (1)..(528): NCBI GI: 121700416 Blast Desc: amidase family protein [Aspergillus clavatus NRRL 1] gi|119396615|gb|EAW07047.1| amidase family protein [Aspergillus clavatus NRRL 1]
  misc_feature (1)..(529): NCBI GI: 119473329 Blast Desc: amidase family protein [Neosartorya fischeri NRRL 181] gi|119406721|gb|EAW16672.1| amidase family protein [Neosartorya fischeri NRRL 181]
  misc_feature (1)..(528): NCBI GI: 189209027 Blast Desc: glutamyl-tRNA(Gln) amidotransferase subunit A [Pyrenophora tritici-repentis Pt-1C-BFP] gi|187976939|gb|EDU43565.1| glutamyl-tRNA(Gln) amidotransferase A
  misc_feature (1)..(529): NCBI GI: 70992933 Blast Desc: amidase family protein [Aspergillus fumigatus Af293] gi|66848948|gb|EAL89277.1| amidase family protein [Aspergillus fumigatus Af293]
  misc_feature (1)..(529): NCBI GI: 159130232 Blast Desc: amidase family protein [Aspergillus fumigatus A1163]
  misc_feature (1)..(529): NCBI GI: 169783086 Blast Desc: [Aspergillus oryzae RIB40] gi|83774749|dbj|BAE64872.1| protein product [Aspergillus oryzae]
  misc_feature (1)..(530): NCBI GI: 46116360 Blast Desc: FG04022.1 [Gibberella zeae PH-1]
  misc_feature (1)..(528): SWISSPROT Homolog: EC 3.5.1.4 Amidase
MPRCHGFKLEETTINMLQDAYASNRVTITQVVQCYLDRIQQTNGWLNSVQEVNSDAMAIAARLDDERKSGKARGPLHGIPFVAKDNMATKDNMETTAGSWMLMGARVPRDAFVIGKLRDAGAVLLGKSALTEWAHMRSSDLSEGYSARGGQVRSPYNFTVSPGGSSSGSAAAVAANQCVFSLGTETDGSVVIPAERNALVGLKPTVGLTSRNGVIPETRHQDTVGILGRTVQDTALVLDQIYGIDKRDIFTNAQKGKTPHEAYAQSITGRKALRGAKFGIPWDSFWKHNSPDQNSALLLLLDLLRREGATIVNNTELDNHRALVNPPGWDWDWRGKLGFANESTYTVVKVDFYNDIKAYLSELEDSPIRSVEDIIQYNLDSSGAEGGSPGIQPGFLGGQERFHESAATKGVEDEVYHSALSFTQSTAREGIDHALARAEAPLDALLAPTDFQQAASVAAQAGYPLITVAAGINSSRTGMPYGLMLMGTAWDEKGLIKWASAIEDAIAATNGMRPLPEWRDHRRRILPIVYE

SEQ ID NO: 10722 - DNA, 2243 bp, Muscodor strobelii
  misc_feature: SGI EST ID NO. CUFF.25341.0
  misc_feature: Variant of the nucleotide sequence at SEQ ID NO 10720
ccaggggttagtgtcggtacctctatggtgttacctagtttgccagtcttgctttactcacagcttactgactgtttagcgcaatcgatatcatgtgatctatgtttcataagcctcattctgtttttattcccccaaattccccatgctacttgtgctcgttatctcaagcattttccccacttaacatcccgccctccatataccttcccgcatttctcctggatcttctagcctcatctgtcatcggcgcgtcacgacaaggcacccaagcatctctaatctgagcaaggtcaatacaacatgctgctcctttggatgttccagtgcttattttcacttcttcctccatatcacgcccagcataagatcgctgtatcgcctgtccctcctttgtttgccatgccacgttgtcatggcttcaagctagaagaaaccacgatcaacatgcttcaggatgcatacgcatcgaatcgggtgacaattactcaggttgtgcaatgctatcttgatcggatacagcagacaaatggatggctgaagtgagtcggtggcccgaaaatggtatgcttttgattgatatgaatcgctgcgaccacagttctgtacaagaagtcaattcagatgctatggccatcgctgctcgcttggacgacgagcgaaaatcaggcaaagcacgaggaccccttcacggaattccattcgttgctaaggacaacatggcaacaaaggacaacatggaaacaacagcaggtagctggatgttgatgggagcccgtgttccgcgcgatgcgttcgtcattggcaaacttcgcgatgctggcgctgtcctgctcggcaaatccgccttgacagaatgggcgcatatgcgcagcagtgatttaagcgaaggttactcagcccgaggaggtcaagtcagaagcccgtacaatttcacagttagcccaggcgggagcagctcggggagtgcagctgcagtcgctgctaatcagtgcgtattcagcctaggaaccgagacggacggaagcgtagttataccggccgaaagaaatgcacttgtcggacttaaacccactgttgggttgacttctaggaatggagtgataccagagacaagacaccaggacacggtagggattctgggaaggactgtccaagacacagcattagtgctggatcagatttacgggatagataagagggacattttcacaaatgcgcagaaaggaaaaaccccacatgaagcatacgcccagtctataacaggcagaaaagctctacgaggtgctaaatttggtattccatgggatagtttctggaaacataactctccagatcagaacagcgccttgctgctgctgttggacctcctccgccgagaaggcgctacgatcgtaaataacaccgagcttgataatcaccgtgctcttgttaacccaccgggatgggattgggattggaggggtaaacttgggtttgcaaacgagagtacatataccgtggtgaaagttgacttctataacgatatcaaggcctatctctctgagctcgaagacagtccaatccgctcagttgaagatataattcaatacaacctcgattcgagtggagcagaaggtggctcgccaggcattcaacccgggtttcttggcggacaagaacgattccacgagtcagccgccacaaagggagtggaggatgaagtgtaccattctgccttgtctttcacacagtctactgcccgtgaaggaattgaccatgctctagcacgagcagaagcacccttagatgctcttctcgctcctaccgattttcagcaggcagcgagtgtagcagcccaggcaggctaccccttgattacagtcgctgcaggtattaacagttctcgcactggtatgccgtatggattgatgctaatgggaacggcatgggatgagaagggactgatcaaatgggcaagcgctatcgaagatgcaatcgcggctaccaatgggatgaggccactgccagagtggagagatcaccgacgcaggattctcccaatcgtctacgagtagcaacgtcgcatacagttttgatagagataaattgaaatggttaaaagattacatatgataaacctcttgtcttagttgtaagcattgattctcgatctctgctcgtcgcaccacgatacttcttcaagatgtagctcgcataaaacactaagtgcgatatgtcagtgtccaactgtgccattgtct

SEQ ID NO: 10723 - DNA, 1065 bp, Muscodor strobelii
  misc_feature: SGI cDNA ID NO. 563415
  misc_feature: Encodes the peptide sequence at SEQ ID NO 10724
atgaagtctgctgttgtcctatcttgcattgccactctggcaaatgctgctgctgtcgacttgagtaagcgggccacgccacttgctgtcaagatcgagcaggtcggcaacagcggagtgaaggccagcatcacgaacaccggcgatgcggctctgagagtgcttaagactggtagcattctcggttctcttcccgttgagaaggtgaaagtcacccagaatgggaagaaggcagcttttaccggcatacacgcctacgtccacaatgccgacttgaaagacgagtcattccagactatcggagctcaggagacggtcgaggtcttgtgggatgccgcgcaatggcacgacttgagtgccggcggtgactttgacataaccgccgagggcagcctccgatacacagaagaagggagcgataagatcaccggctctgttttgtacaagtccaaccttgtacaagccaaggtcgacggctcccaggcttctgaagtctacaaagcttcccaacagaatcaaaggaccaagcgggtaactattcagagcgactgctcaagctcgcagaagtcgacagtcgatgccgcgcttagcgtggctaagacgtacgcgcaacaggcgcaagcggcagcaagcgccggaacaaaactgcaagagtacttcaagtccacctcgagcagcacctcaagcacagtggctggcgtctttagcaagatcgcctccagcgtggtcaacagcgactcaagcggcgtcaaactccactgcagcgacgtcggaaattattgctatgatggtgtggttgcgtatacgcagcctggtgccacagcctccgagtatatcgtcctctgcgactactggtttcagtttccagctacgaccacgcaatgccatgctgccgaccggccgtacgttatcattcacgagtcgactcacttgagcgagatcaagggcaccgacgacgtctgctatggatacgatggctgcgtaaccgatatcagctctgcacaagagctgaacaatgcagacagctacgcgctgtatgcaaatgccatcgaggccgggtgctga

SEQ ID NO: 10724 - protein, 354 aa, Muscodor strobelii
  misc_feature: SGI Peptide ID NO. 563415
  misc_feature (1)..(354): Pfam Id: PF02102 Pfam Desc: Deuterolysin metalloprotease (M35) family
  misc_feature (10)..(354): NCBI GI: 261352695 Blast Desc: metalloproteinase [Verticillium albo-atrum VaMs.102]
  misc_feature (1)..(354): NCBI GI: 85077806 Blast Desc: NCU05071 [Neurospora crassa OR74A] gi|28917104|gb|EAA26824.1| conserved [Neurospora crassa OR74A]
  misc_feature (10)..(354): NCBI GI: 256733382 Blast Desc: NECHADRAFT_36693 [Nectria haematococca mpVI 77-13-4]
  misc_feature (1)..(354): NCBI GI: 39943414 Blast Desc: MGG_10927 [Magnaporthe grisea 70-15] gi|149209331|ref|XP_001522040.1| MGCH7_ch7g157 [Magnaporthe grisea 70-15] gi|86196112|gb|EAQ70750.1| MGCH7_ch7g157 grisea
  misc_feature (19)..(354): NCBI GI: 261353957 Blast Desc: neutral protease [Verticillium albo-atrum VaMs.102]
  misc_feature (23)..(354): NCBI GI: 145583577 Blast Desc: metallo-endopeptidase [Hypocrea lixii]
  misc_feature (23)..(354): NCBI GI: 157400017 Blast Desc: metalloendopeptidase [Trichoderma hamatum]
  misc_feature (10)..(354): NCBI GI: 46127823 Blast Desc: FG08289.1 [Gibberella zeae PH-1]
  misc_feature (18)..(354): NCBI GI: 169614750 Blast Desc: SNOG_10522 [Phaeosphaeria nodorum SN15] gi|111060796|gb|EAT81916.1| SNOG_10522 [Phaeosphaeria nodorum SN15]
  misc_feature (21)..(354): NCBI GI: 169598740 Blast Desc: SNOG_02177 [Phaeosphaeria nodorum SN15] gi|111069269|gb|EAT90389.1| SNOG_02177 [Phaeosphaeria nodorum SN15]
  misc_feature (30)..(354): SWISSPROT Homolog: EC 3.4.24.39 Deuterolysin
MKSAVVLSCIATLANAAAVDLSKRATPLAVKIEQVGNSGVKASITNTGDAALRVLKTGSILGSLPVEKVKVTQNGKKAAFTGIHAYVHNADLKDESFQTIGAQETVEVLWDAAQWHDLSAGGDFDITAEGSLRYTEEGSDKITGSVLYKSNLVQAKVDGSQASEVYKASQQNQRTKRVTIQSDCSSSQKSTVDAALSVAKTYAQQAQAAASAGTKLQEYFKSTSSSTSSTVAGVFSKIASSVVNSDSSGVKLHCSDVGNYCYDGVVAYTQPGATASEYIVLCDYWFQFPATTTQCHAADRPYVIIHESTHLSEIKGTDDVCYGYDGCVTDISSAQELNNADSYALYANAIEAGC

SEQ ID NO: 10725 - DNA, 1947 bp, Muscodor strobelii
  misc_feature: SGI cDNA ID NO. 563416
  misc_feature: Elevated expression when VOC is produced
  misc_feature: Encodes the peptide sequence at SEQ ID NO 10726
atgtccgacgagaagagcacgtcccccatggcgggtgatacgcaccatgccccaaggaaggactccaatttttccgacctttccagaacggaagttggtaacagtcgccttacccaagacacaaccctcgatgaaggacagagaaagcgacttgaagcttcagcaaagctcgaaaatccactcgcgggtctctcagctgcacaattgagccagcgaggcgaggagttctgccataaacatggcatcactggcgatgaggatctacgggcgtttcgcctaggcgctatgatcgctggcaacatgaacaagtatgacactgtcgaaggactcacagaccgtgaaaaggaagtactcgacaaggagttcacgcacaaatggtcgaatcctaacatgctttatgccgttatcgtcatctgctcactctgcgctgctgtgcaaggtatggatgagacggtcgtgaatggtgctcagatcttctacaaggagcaattcggaattggcgacccaaagtcgcagcgagattcatggctccttggtcttgtgaatgctgctccatatatttgctgcgcattagccggatgctggctcactgagcctttgaacaacaagttcggtcgacgcgggaccgtgttcatcgcctgtctggtttccgccctcgcctgtttctggcaagctttcaccaacacatggtggcacatgtttattgcgcgattcttccttggctttggcattggacctaagtccgcaacaaccccaatcttcgcggctgagtgctccccgccgaagcttcgtggtgctctggtcatgcaatggcagatgtggactgcattcggtatcttcattggttacgtcgccgacctcgcgtttttcggtgttcctgatctctcaggcatcgatggtctcaactggcgattgatgatgggttcagcattgatcccagctgttattgtgtgctgcctagtcatgttcactcctgagtcgccccgttggtatttgaccaaagatagacatctagatgcatacaagtcgattcagagacttcgatacgagaaggttcaagcagctcgcgatctattttatatggacgctcttctccaagttgaaaaagaagcaatggtcatcaagcaaagcaagctgaaggagatattcactatccgtcgaaaccgcaatgccgcgctcgcctctgagatcgttatgttcatgcagcaattctgtggtgtcaacgccattgcatactactcgactcaaatattcctcgacagtaactttggcgagcgagcggctcttgctgcttcactcggtttcggtgctgtcaacttcctcttcgctattcctgcattctacaccatcgatacctttggtcgtcgaaagttgcttctgacgacgttcccgctcatgtctatctttctattctacacgggttttagtttctacatcccggaaggaactgctcgggttgccaatatcgcactgggaatctatctgttcggagtggtatattcgccaggcgaaggtccggtcccgttcacgtacagtgccgaagcataccccctttacattcgacctttcggcatgtcgctagcaacagcaacaacctggttcttcaacgcagttgtcagtatcacatggccagctctggtccaagcgtggacaaatgcaggcgcattttcatggtatgcagcatggaacattgtaggctgggtcctcgtgttgcttttccttcctgagacaaaagagaagactctcgaggagctcgacgcagtcttcaacgtcccacttcacagcatcatggcctatggaatagcacaagctgggtacttctggggacacataatcatgagaaggaagatggatccgcccaaggttcctacctctgcaaacacaattgactacacgaaacatcagtttaagcaagagaaggaggctgacgccactaagcgcgtatga

SEQ ID NO: 10726 - protein, 648 aa, Muscodor strobelii
  misc_feature: SGI Peptide ID NO. 563416
  misc_feature (139)..(540): Pfam Id: PF07690 Pfam Desc: Major Facilitator Superfamily
  misc_feature (135)..(589): Pfam Id: PF00083 Pfam Desc: Sugar (and other) transporter
  misc_feature (178)..(283): Pfam Id: PF07690 Pfam Desc: Major Facilitator Superfamily
  misc_feature (10)..(623): NCBI GI: 116205035 Blast Desc: CHGG_10401 [Chaetomium globosum CBS 148.51] gi|88176529|gb|EAQ83997.1| CHGG_10401 [Chaetomium globosum CBS 148.51]
  misc_feature (47)..(621): NCBI GI: 171689306 Blast Desc: protein product [Podospora anserina] gi|170944615|emb|CAP70726.1| protein product [Podospora anserina]
  misc_feature (40)..(607): NCBI GI: 164427957 Blast Desc: NCU01494 [Neurospora crassa OR74A] gi|157071952|gb|EAA26691.2| NCU01494 [Neurospora crassa OR74A]
  misc_feature (40)..(608): NCBI GI: 9369315 Blast Desc: related to myo-inositol transport protein ITR1 [Neurospora crassa]
  misc_feature (8)..(616): NCBI GI: 238841654 Blast Desc: proton myo-inositol cotransporter [Microsporum canis CBS 113480]
  misc_feature (2)..(594): NCBI GI: 240107309 Blast Desc: Sugar transporter family protein [Coccidioides posadasii C735 delta SOWgp]
  misc_feature (2)..(646): NCBI GI: 258565131 Blast Desc: conserved [Uncinocarpus reesii 1704] gi|237907011|gb|EEP81412.1| conserved [Uncinocarpus reesii 1704]
  misc_feature (2)..(616): NCBI GI: 154282069 Blast Desc: HCAG_03945 [Ajellomyces capsulatus NAm1] gi|150412026|gb|EDN07414.1| HCAG_03945 [Ajellomyces capsulatus NAm1]
  misc_feature (9)..(622): NCBI GI: 242810130 Blast Desc: MFS sugar transporter, [Talaromyces stipitatus ATCC 10500] gi|218716142|gb|EED15564.1| MFS sugar transporter, [Talaromyces stipitatus ATCC 10500]
  misc_feature (2)..(616): NCBI GI: 240276014 Blast Desc: arabinose-proton symporter [Ajellomyces capsulatus H143]
  misc_feature: Useful for introducing or modulating the production of volatile compounds
MSDEKSTSPMAGDTHHAPRKDSNFSDLSRTEVGNSRLTQDTTLDEGQRKRLEASAKLENPLAGLSAAQLSQRGEEFCHKHGITGDEDLRAFRLGAMIAGNMNKYDTVEGLTDREKEVLDKEFTHKWSNPNMLYAVIVICSLCAAVQGMDETVVNGAQIFYKEQFGIGDPKSQRDSWLLGLVNAAPYICCALAGCWLTEPLNNKFGRRGTVFIACLVSALACFWQAFTNTWWHMFIARFFLGFGIGPKSATTPIFAAECSPPKLRGALVMQWQMWTAFGIFIGYVADLAFFGVPDLSGIDGLNWRLMMGSALIPAVIVCCLVMFTPESPRWYLTKDRHLDAYKSIQRLRYEKVQAARDLFYMDALLQVEKEAMVIKQSKLKEIFTIRRNRNAALASEIVMFMQQFCGVNAIAYYSTQIFLDSNFGERAALAASLGFGAVNFLFAIPAFYTIDTFGRRKLLLTTFPLMSIFLFYTGFSFYIPEGTARVANIALGIYLFGVVYSPGEGPVPFTYSAEAYPLYIRPFGMSLATATTWFFNAVVSITWPALVQAWTNAGAFSWYAAWNIVGWVLVLLFLPETKEKTLEELDAVFNVPLHSIMAYGIAQAGYFWGHIIMRRKMDPPKVPTSANTIDYTKHQFKQEKEADATKRV

SEQ ID NO: 10727 - DNA, 4709 bp, Muscodor strobelii
  misc_feature: SGI EST ID NO. CUFF.25448.0
  misc_feature: Variant of the nucleotide sequence at SEQ ID NO 10725
gtctttaaatacactccaattctctacattgctccattcctgtcttccttccgtttcttactagcgtgtagtcgactagtgcacgaagcccgcacaaccacgtgggagagtactgggagtctgggaccacctgcacgcctgtagttcaatccatcgtaccctctatcgtccaaacatcagcaaggacagaacccttcaatcagcagaaatacaatttgtaaactgctccagatattaaatctcagcaattaagactatttttgtcaatttcgcaaagtcgatacaccatttgcgacagaagccgagcctttagcgcagcaacaagtcatcaatcgcgcactacggactagagagttatccataacgaacccgctcttatacatacgaaggtactagacccaacggaggcacgacatatcgatcatgtccgacgagaagagcacgtcccccatggcgggtgatacgcaccatgccccaaggaaggactccaatttttccgacctttccagaacggaagttggtaacagtcgccttacccaagacacaaccctcgatgaaggacagagaaagcgacttgaagcttcagcaaagctcgaaaatccactcgcgggtctctcagctgcacaattgagccagcgaggcgaggagttctgccataaacatggcatcactggcgatgaggatctacgggcgtttcgcctaggcgctatgatcgctggcaacatgaacaagtatgacactgtcgaaggactcacagaccgtgaaaaggaagtactcgacaaggagttcacgcacaaatggtcgaatcctaacatgctttatgccgttatcgtcatctgctcactctgcgctgctgtgcaaggtatggatgagacggtcgtgaatggtgctcagatcttctacaaggagcaattcggaattggcgacccaaagtcgcagcgagattcatggctccttggtcttgtgaatgctgctccatatatttgctgcgcattagccggatgctggctcactgagcctttgaacaacaagttcggtcgacgcgggaccgtgttcatcgcctgtctggtttccgccctcgcctgtttctggcaagctttcaccaacacatggtggcacatgtttattgcgcgattcttccttggctttggcattggacctaagtccgcaacaaccccaatcttcgcggctgagtgctccccgccgaagcttcgtggtgctctggtcatgcaatggcagatgtggactgcattcggtatcttcattggttacgtcgccgacctcgcgtttttcggtgttcctgatctctcaggcatcgatggtctcaactggcgattgatgatgggttcagcattgatcccagctgttattgtgtgctgcctagtcatgttcactcctgagtcgccccgttggtatttgaccaaagatagacatctagatgcatacaagtcgattcagagacttcgatacgagaaggttcaagcagctcgcgatctattttatatggacgctcttctccaagttgaaaaagaagcaatggtcatcaagcaaagcaagctgaaggagatattcactatccgtcgaaaccgcaatgccgcgctcgcctctgagatcgttatgttcatgcagcaattctgtggtgtcaacgccattgcatactactcgactcaaatattcctcgacagtaactttggcgagcgagcggctcttgctgcttcactcggtttcggtgctgtcaacttcctcttcgctattcctgcattctacaccatcgatacctttggtcgtcgaaagttgcttctgacgacgttcccgctcatgtctatctttctattctacacgggttttagtttctacatcccggaaggaactgctcgggttgccaatatcgcactgggaatctatctgttcggagtggtatattcgccaggcgaaggtccggtcccgttcacgtacagtgccgaagcataccccctttacattcgacctttcggcatgtcgctagcaacagcaacaacctggttcttcaacgcagttgtcagtatcacatggccagctctggtccaagcgtggacaaatgcaggcgcattttcatggtatgcagcatggaacattgtaggctgggtcctcgtgttgcttttccttcctgagacaaaagagaagactctcgaggagctcgacgcagtcttcaacgtcccacttcacagcatcatggcctatggaatagcacaagctgggtacttctggggacacataatcatgagaaggaagatggatccgcccaaggttcctacctctgcaaacacaattgactacacgaaacatcagtttaagcaagagaaggaggctgacgccactaagcgcgtatgagcaaaggacgagggataatctgtacacttgttttcaatcttcacaagtggaagatgagggacatggggagatggcgtatggggtgttgccggtttttggcatatggcgttttcgtggataccgtctttcatcctcgcacgaaataaatgaacgagacttatgtatgaatgataataacgataaatttcatcgtaatagaagatgagaaagccctgagtccctagttgataattgtgtctcgtgtgtccattgtatcctgtcttggtccattagacccttctaatacgctgaatcgtaaccggctccggtcttcgtgcgagccatagtaagataataatgtaccacaacgtcaacgtccctcttccattcttgtaatgtgtcatcatactattatcacattagaacgttgaagatatccaccactgctaatccagaatctgcgaaaaacgtaatgcactggtactcatgcctcatcaacatcatatcatcgtaataatcaaaacatgacctaacgtatgtcatccatagtaaaatcccccaagaccacccgaattcccactcccgctaccacttccaccactcttcctattgttacccgtcttatgactcttctcactctccctttgctcagccatgataacctccgtccacgtagggccgcgatcatcagtctgcgtagtctgcggactaactaccatgctattcctctgactagaagacgacgtcggcggcaatgcgcttaatgatggagtccgtggtgtattagaggggtaggaagaggaaaatgtcgttagaggcagtggagctagactactgcgtcgtcgctcggggaacgaaggatggcgttcgtgctcgccttcgcggtgtcgggtattcgtattacggtcgcgatcccttctatcgctatgcgagtgtctgttactgctgctgcccccaactgcggtggcagatcctccagaagataaagagagatcaatatcttcttctacggcggcgttttcgaatcttgctcgtgggcgagggggacgggtggactggactacttcggcgggtacgtaacgacgggtttgtctgtgtcggtggccgtggcgatgattatgttcgcgaggtcgagaaacaagcggtgtgcttgttgtgactggttctggtcctgggtgtggtcccgttattagagcgggttggtaatgttgtaatgcggcaggtgatgtgaaaacacgctgtggctgtgttgaggaagagacaggtggaagagtcgaactctcgctgcccctttgcgtttcgacgacgatgatgttcccgctggtgctccgagcaggtagaggtacaggtggaggcgggaggtaggggccgagattggggatagtcgcattggcaaatatgcttggtggcggattggcgagagaccagcgtctgttttgaggatccgtctcttgtcttgtgggttctcttctctcgtggttcggctcttgccgtcttgttaactctcttccttgcctttgtatatgagtctggcttggcagttgaagagaaggggaagacacggcatgtgtccgcggctgctgaagattcgaagacggcaacgacgagactggtaatgaatgctgccgttgtctagacggcagccttagatcgcagagtaaatcttcgacagcttctgcaagtagcttacgagacttggcgtcgtgatgcacaggaaggaggctgcgtatgaagcggcgagggagtttctctttcatgcctacattgccactagcactttcaacccccgatatagagggtgatacaggacttatcggcgtcgtagggccgaatatatcacgaattttctcaactggatcgactgtaagttggatctcagtcgcaatgcggtccagtctcttcgcctcctgatctggatgtgccacaacgcacatcgtgtagaattgcacaaacccgtcagcagttagagccgggactatgggtttcgaagatcgagggcgagttcgcgagggtaaaaccactcctagatttagctcgggattattagcaatgtccgagtacgagccagaacgcgggaagagtgttgtcggagatggagagactggagacggtggtgtcaatagagagctcgaggattgtgacccttgcgccatcagtattgagagagacgaagcagaggatgtagatggttggaccaggtggtaatctagatcgagatctgcgaagaattgaccgatatagccgtaatattcactggtcgcattatcactactgtcgataccactcgagcttgtgtcgcgatgttgagggccgtggaagatatctagtcaaccgcaacacaagtcagaattatactctgg

SEQ ID NO: 10728 - DNA, 1992 bp, Muscodor strobelii
  misc_feature: SGI cDNA ID NO. 563417
  misc_feature: Reduced expression when VOC is produced
  misc_feature: Encodes the peptide sequence at SEQ ID NO 10729
atgactgatggaactcgtccgcatgattcgaactcgaggcatgatgaccagaatgaagaacggctgtctactggtcaggatcatgatgatattgaggcggtgaaaaacacactggatgcatcgcacactactgacctagtcggtggccccatgtctgatagcgctgcgtccggtgtgagtaatcatcgtgaacagcatgaggcgagcatcgacttaccgagccttttcacgcgacccggggggctcacaaggggtatgtctgatgaccttatggaccagatcaggggcttgattcgccaagaagtcagagaaacgtacacggccacggtagagcatggccgcccttcgtctatctcggctctggttaccacgtcagctgatcacgccggcagtcatggtggcgacgaaggtgatgtgcatgtgattccgacggcttcaagcaatcaggagaagcctgaggcgaagcgcgaaagaaggctttctcaatccagctctgcatcagaaccaacgtctatcgagagtgggagtcaaagcgatgacgggagcaacgacgaaactccaacgatccacgacgaaaggaggtctagtaaccatgtagcgacaattacgtcgccactttctccagaaacgacctctcccgctttgctacatcacacaactactagatcagagagaccagatgccgtaagacaggaagtccgcttcagtgaccgtgtcccgctacgaccgggatcctcaggaactaggggtgatggagatgggcgaagggcatcgttggcgtttcgtcggatttcgagctctggtcttgatactcccaactggggacagttgttcgatgctaatggtagcccgacaataagatgtgcggctgtttttaaagcgttagcagatttgctgatggaggaatcgatgccacgtggtagtcttgttacttccgagaaattgggattactattttctcgatttcgtgttgacgaagaggtgtacccctttcaagatatcttccacggccctcaacatcgcgacacaagctcgagtggtatcgacagtagtgataatgcgaccagtgaatattacggctatatcggtcaattcttcgcagatctcgatctagattaccacctggtccaaccatctacatcctctgcttcgtctctctcaatactgatggcgcaagggtcacaatcctcgagctctctattgacaccaccgtctccagtctctccatctccgacaacactcttcccgcgttctggctcgtactcggacattgctaataatcccgagctaaatctaggagtggttttaccctcgcgaactcgccctcgatcttcgaaacccatagtcccggctctaactgctgacgggtttgtgcaattctacacgatgtgcgttgtggcacatccagatcaggaggcgaagagactggaccgcattgcgactgagatccaacttacagtcgatccagttgagaaaattcgtgatatattcggccctacgacgccgataagtcctgtatcaccctctatatcgggggttgaaagtgctagtggcaatgtaggcatgaaagagaaactccctcgccgcttcatacgcagcctccttcctgtgcatcacgacgccaagtctcagccgaaccacgagagaagagaacccacaagacaagagacggatcctcaaaacagacgctggtctctcgccaatccgccaccaagcatatttgccaatgcgactatccccaatctcggcccctacctcccgcctccacctgtacctctacctgctcggagcaccagcgggaacatcatcgtcgtcgaaacgcaaaggggcagcgagagttcgactcttccacctgtctcttcctcaacacagccacagcgtgaccagaaccagtcacaacaagcacaccgcttgtttctcgacctcgcgaacataatcatcgccacggccaccgacacagacaaacccgtcgttacgtacccgccgaagtag

SEQ ID NO: 10729 - protein, 663 aa, Muscodor strobelii
  misc_feature: SGI Peptide ID NO. 563417
  misc_feature (211)..(335): NCBI GI: 256729286 Blast Desc: NECHADRAFT_63097 [Nectria haematococca mpVI 77-13-4]
  misc_feature (274)..(335): NCBI GI: 46117144 Blast Desc: FG04414.1 [Gibberella zeae PH-1]
  misc_feature (274)..(401): NCBI GI: 226279665 Blast Desc: conserved [Paracoccidioides brasiliensis Pb01]
  misc_feature (274)..(401): NCBI GI: 225684796 Blast Desc: conserved [Paracoccidioides brasiliensis Pb03]
  misc_feature (274)..(401): NCBI GI: 226286633 Blast Desc: conserved [Paracoccidioides brasiliensis Pb18]
  misc_feature (233)..(376): NCBI GI: 171689304 Blast Desc: protein product [Podospora anserina] gi|170944614|emb|CAP70725.1| protein product [Podospora anserina]
  misc_feature (274)..(368): NCBI GI: 145612475 Blast Desc: MGG_07158 [Magnaporthe grisea 70-15] gi|145019633|gb|EDK03861.1| MGG_07158 [Magnaporthe grisea 70-15]
  misc_feature (274)..(401): NCBI GI: 115384208 Blast Desc: [Aspergillus terreus NIH2624] gi|114196343|gb|EAU38043.1| [Aspergillus terreus NIH2624]
  misc_feature (274)..(401): NCBI GI: 119481493 Blast Desc: NFIA_088340 [Neosartorya fischeri NRRL 181] gi|119408929|gb|EAW18878.1| conserved [Neosartorya fischeri NRRL 181]
  misc_feature (274)..(377): NCBI GI: 212533869 Blast Desc: conserved [Penicillium marneffei ATCC 18224] gi|210072455|gb|EEA26544.1| conserved [Penicillium marneffei ATCC 18224]
  misc_feature: Useful for introducing or modulating the production of volatile compounds
MTDGTRPHDSNSRHDDQNEERLSTGQDHDDIEAVKNTLDASHTTDLVGGPMSDSAASGVSNHREQHEASIDLPSLFTRPGGLTRGMSDDLMDQIRGLIRQEVRETYTATVEHGRPSSISALVTTSADHAGSHGGDEGDVHVIPTASSNQEKPEAKRERRLSQSSSASEPTSIESGSQSDDGSNDETPTIHDERRSSNHVATITSPLSPETTSPALLHHTTTRSERPDAVRQEVRFSDRVPLRPGSSGTRGDGDGRRASLAFRRISSSGLDTPNWGQLFDANGSPTIRCAAVFKALADLLMEESMPRGSLVTSEKLGLLFSRFRVDEEVYPFQDIFHGPQHRDTSSSGIDSSDNATSEYYGYIGQFFADLDLDYHLVQPSTSSASSLSILMAQGSQSSSSLLTPPSPVSPSPTTLFPRSGSYSDIANNPELNLGVVLPSRTRPRSSKPIVPALTADGFVQFYTMCVVAHPDQEAKRLDRIATEIQLTVDPVEKIRDIFGPTTPISPVSPSISGVESASGNVGMKEKLPRRFIRSLLPVHHDAKSQPNHERREPTRQETDPQNRRWSLANPPPSIFANATIPNLGPYLPPPPVPLPARSTSGNIIVVETQRGSESSTLPPVSSSTQPQRDQNQSQQAHRLFLDLANIIIATATDTDKPVVTYPPK

SEQ ID NO: 10730 - DNA, 3841 bp, Muscodor strobelii
  misc_feature: SGI EST ID NO. CUFF.25449.1
  misc_feature: Variant of the nucleotide sequence at SEQ ID NO 10728
ctctgcttgtataagtgactacctatgcttgcgtgattggatcactgatctgaatccttcaccttcaatctgctgttgggaccgggcaatgctacctacgcttgtgtttcaatttgttgaaacgtatcaatatcacatacatggtcaatgctcaatgctcacttatctgcgaatgaacgcaccctgtgaagatgactgatggaactcgtccgcatgattcgaactcgaggcatgatgaccagaatgaagaacggctgtctactggtcaggatcatgatgatattgaggcggtgaaaaacacactggatgcatcgcacactactgacctagtcggtggccccatgtctgatagcgctgcgtccggtgtgagtaatcatcgtgaacagcatgaggcgagcatcgacttaccgagccttttcacgcgacccggggggctcacaaggggtatgtctgatgaccttatggaccagatcaggggcttgattcgccaagaagtcagagaaacgtacacggccacggtagagcatggccgcccttcgtctatctcggctctggttaccacgtcagctgatcacgccggcagtcatggtggcgacgaaggtgatgtgcatgtgattccgacggcttcaagcaatcaggagaagcctgaggcgaagcgcgaaagaaggctttctcaatccagctctgcatcagaaccaacgtctatcgagagtgggagtcaaagcgatgacgggagcaacgacgaaactccaacgatccacgacgaaaggaggtctagtaaccatgtagcgacaattacgtcgccactttctccagaaacgacctctcccgctttgctacatcacacaactactagatcagagagaccagatgccgtaagacaggaagtccgcttcagtgaccgtgtcccgctacgaccgggatcctcaggaactaggggtgatggagatgggcgaagggcatcgttggcgtttcgtcggatttcgagctctggtcttgatactcccaactggggacagttgttcgatgctaatggtagcccgacaataagatgtgcggctgtttttaaagcgttagcagatttgctgatggaggaatcgatgccacgtggtagtcttgttacttccgagaaattgggattactattttctcgatttcgtgttgacgaagaggtgtacccctttcaagatatcttccacggccctcaacatcgcgacacaagctcgagtggtatcgacagtagtgataatgcgaccagtgaatattacggctatatcggtcaattcttcgcagatctcgatctagattaccacctggtccaaccatctacatcctctgcttcgtctctctcaatactgatggcgcaagggtcacaatcctcgagctctctattgacaccaccgtctccagtctctccatctccgacaacactcttcccgcgttctggctcgtactcggacattgctaataatcccgagctaaatctaggagtggttttaccctcgcgaactcgccctcgatcttcgaaacccatagtcccggctctaactgctgacgggtttgtgcaattctacacgatgtgcgttgtggcacatccagatcaggaggcgaagagactggaccgcattgcgactgagatccaacttacagtcgatccagttgagaaaattcgtgatatattcggccctacgacgccgataagtcctgtatcaccctctatatcgggggttgaaagtgctagtggcaatgtaggcatgaaagagaaactccctcgccgcttcatacgcagcctccttcctgtgcatcacgacgccaagtctcgtaagctacttgcagaagctgtcgaagatttactctgcgatctaaggctgccgtctagacaacggcagcattcattaccagtctcgtcgttgccgtcttcgaatcttcagcagccgcggacacatgccgtgtcttccccttctcttcaactgccaagccagactcatatacaaaggcaaggaagagagttaacaagacggcaagagccgaaccacgagagaagagaacccacaagacaagagacggatcctcaaaacagacgctggtctctcgccaatccgccaccaagcatatttgccaatgcgactatccccaatctcggcccctacctcccgcctccacctgtacctctacctgctcggagcaccagcgggaacatcatcgtcgtcgaaacgcaaaggggcagcgagagttcgactcttccacctgtctcttcctcaacacagccacagcgtgttttcacatcacctgccgcattacaacattaccaacccgctctaataacgggaccacacccaggaccagaaccagtcacaacaagcacaccgcttgtttctcgacctcgcgaacataatcatcgccacggccaccgacacagacaaacccgtcgttacgtacccgccgaagtagtccagtccacccgtccccctcgcccacgagcaagattcgaaaacgccgccgtagaagaagatattgatctctctttatcttctggaggatctgccaccgcagttgggggcagcagcagtaacagacactcgcatagcgatagaagggatcgcgaccgtaatacgaatacccgacaccgcgaaggcgagcacgaacgccatccttcgttccccgagcgacgacgcagtagtctagctccactgcctctaacgacattttcctcttcctacccctctaatacaccacggactccatcattaagcgcattgccgccgacgtcgtcttctagtcagaggaatagcatggtagttagtccgcagactacgcagactgatgatcgcggccctacgtggacggaggttatcatggctgagcaaagggagagtgagaagagtcataagacgggtaacaataggaagagtggtggaagtggtagcgggagtgggaattcgggtggtcttgggggattttactatggatgacatacgttaggtcatgttttgattattacgatgatatgatgttgatgaggcatgagtaccagtgcattacgtttttcgcagattctggattagcagtggtggatatcttcaacgttctaatgtgataatagtatgatgacacattacaagaatggaagagggacgttgacgttgtggtacattattatcttactatggctcgcacgaagaccggagccggttacgattcagcgtattagaagggtctaatggaccaagacaggatacaatggacacacgagacacaattatcaactagggactcagggctttctcatcttctattacgatgaaatttatcgttattatcattcatacataagtctcgttcatttatttcgtgcgaggatgaaagacggtatccacgaaaacgccatatgccaaaaaccggcaacaccccatacgccatctccccatgtccctcatcttccacttgtgaagattgaaaacaagtgtacagattatccctcgtcctttgctcatacgcgcttagtggcgtcagcctccttctcttgcttaaactgatgtttcgtgtagtcaattgtgtttgcagaggtaggaaccttgggcggatccatcttccttctcatgattatgtgtccccagaagtacccagcttgtgctattccataggccatgatgctgtgaagtgggacgttgaagactgcgtcgagctcctcgagagtcttctcttttgtctcaggaaggaaaagcaacacgaggacccagcctacaatgttccatgctgcataccatgaaaatgcgcctgcatttgtccacgcttggaccagagctggccatgtgatactgacaactgcgttgaagaacct

SEQ ID NO: 10731 - DNA, 1053 bp, Muscodor strobelii
  misc_feature: SGI cDNA ID NO. 563418
  misc_feature: Encodes the peptide sequence at SEQ ID NO 10732
atggcttccaataacggtggcggttcccgcgccctgccgcgcaccctgcagtgcacccagtgcggcaagtacaagacaattgaccattactccaagaatcagatcgtcaagtggaagaaggccgacaacaagtcctgggtccagctcagctgcaaggcccaccagggtcaactgctcgtcgccgagcagaagtgtttcagctgtggctgcgtgaagcctgtgtctactcacttcagcaaggcccagcgcaacaatatcgagccctggtgcatcgcctgcaccgactggaagggctctgacgccgacaagccgctctccgcccgccccaacgagacggtcccttacttcgcttcgcaggagctttccactggtcttgccgtcggcgaggacgtcggtgaccacgtcggtgaacatgtcagtgaccaggaaagtgtcggagagttcagcgatggcgcttttgactctgatgatgctatcactggctttggcacggtcgctggcactggcacaggcgctgacactgccgccgcttcggtcgctggcacgggtgctggtgatagcagtgctgccgacggctttgccggagatgggtatgagcttgttggctcttctattgccccttccaccgctggcgatagcaacgacgacgatcgtgatggcgcctatcacaacaactatgccgttaagagttatggcgtgaagaacactgccacccgcgcttttgccacaaacaacaccggcgccatgcctggtcccggcgcccagcagtcatcccttctcaccaccgattctcgtgatggcatcgagagtttctcgagccgcatgtcgcctcctccttcggtccatcgctcactgcagacttctcttgtgccttcaccgactgcagtcaccacgaacaccagtagcactccgcgcactggcagagctcacggaacgggaaagtttcacaaaacgaacaaccgcaaggactatacagagcgtaaaaagtacgaggatctcacagagaatcgtttcgaggagcccgactccgacgacagcgtcgatgagttttga

SEQ ID NO: 10732 - protein, 350 aa, Muscodor strobelii
  misc_feature: SGI Peptide ID NO. 563418
MASNNGGGSRALPRTLQCTQCGKYKTIDHYSKNQIVKWKKADNKSWVQLSCKAHQGQLLVAEQKCFSCGCVKPVSTHFSKAQRNNIEPWCIACTDWKGSDADKPLSARPNETVPYFASQELSTGLAVGEDVGDHVGEHVSDQESVGEFSDGAFDSDDAITGFGTVAGTGTGADTAAASVAGTGAGDSSAADGFAGDGYELVGSSIAPSTAGDSNDDDRDGAYHNNYAVKSYGVKNTATRAFATNNTGAMPGPGAQQSSLLTTDSRDGIESFSSRMSPPPSVHRSLQTSLVPSPTAVTTNTSSTPRTGRAHGTGKFHKTNNRKDYTERKKYEDLTENRFEEPDSDDSVDEF

SEQ ID NO: 10733 - DNA, 387 bp, Muscodor strobelii
  misc_feature: SGI EST ID NO. CUFF.25380.0
  misc_feature: Variant of the nucleotide sequence at SEQ ID NO 10731
ccggagatgggtatgagcttgttggctcttctattgccccttccaccgctggcgatagcaacgacgacgatcgtgatggcgcctatcacaacaactatgccgttaagagttatggcgtgaagaacactgccacccgcgcttttgccacaaacaacaccggcgccatgcctggtcccggcgcccagcagtcatcccttctcaccaccgattctcgtgatggcatcgagagtttctcgagccgcatgtcgcctcctccttcggtccatcgctcactgcagacttctcttgtgccttcaccgactgcagtcaccacgaacaccagtagcactccgcgcactggcagagctcacggaacgggaaagtttcacaaaacgaacaaccgcaagg

SEQ ID NO: 10734 - DNA, 2385 bp, Muscodor strobelii
  misc_feature: SGI cDNA ID NO. 563419
  misc_feature: Encodes the peptide sequence at SEQ ID NO 10735
atgacggtatcgcacgacgtggcccataggcgatcatcgacgcctcagggatccaacatgatggctctggaagaccgttttgagatcctaaaggatattggtgacggaagctttggtagtgtcgccctagcgagagttcggacagctggtgctagcgtcgctcgacgaggaacagtgattgccattaagacgatgaaaaagacgttcgagtctttcacaccatgcatggagcttcgtgaggtcgtgttcttgagaacgctgcctccccattctcacttggttcccgcattggatattttcctcgacccatttacgaagaaacttcacatctgcatggaatacatggaggggaacctttatcagctgatgaaggcccgtgaccacaagtgccttgataattcaagcgtgaagagcatattattccagattatgcaaggcctagagcatattcatgcgcaccatttcttccaccgagacatcaaacccgagaacattctagtcacgacgtcaggccaccacgactcggccaactcattcagacgctactcggcccttgtcacgcccccctcgactccgccaacgtacacagtcaagattgccgattttggtctcgcccgtgagacacactcgaagctaccatacaccacgtacgtatcgactcgatggtatcgtgcaccagaagtcctcttgcgtgctggtgagtactcggctcctgtcgacatctgggctattggtgccatggccgtagaagtggcaactctgaagcctcttttccctggaggcaacgaagtggatcaagtctggcgtgtctgtgaaatcatgggaagcccaggcaactggtataataaagcaaatcaacgtgttggtggaggggattggaaagagggaacaaggcttgctgggaaactcggtttctcatttcccaagatggcaccccattccatggatacgatattgcagtcaccgcaatggccgagttctctcagccaatttgtgacgtggtgcttaatgtgggatcccaagaataggccgacatcaacgcaggccttggcacacgattattttgccgatgccgtcgaccctctccgcccaagatcttctgcttccaaaatactcggtcgcaagcagtcagatctagggcggtctaaagactcagccacacctaccgggtcatcgaaaccatcatggttcagaaagtctttaattgctcgatccgagagcacagaagcccagctgataccaaccgagcagaaggatctgcttcccaagaacccaagggcacctgctccggtcactgtagtgggtgaagcacaagccgccaaagctcggccagctccaagtaagcgtacaacttggagcaacgggccctcaaacgtggctcccatgcctattttgcccactattcgacctatctcgccattgtccgatgccgtgactgcgcaagcatcaaaccgtcagccagtatacaacgatgcatacgccaacggagttcaacactcaacgactgatgacaagtcaaccaagaaactcggtcgtcagttgtctgttgcatcgagtaccaataattacactgaactgcatcggcagcaagcagaacgagctctcaacggcactggtcttgcctcgccacccagtggtggccaaaaagagagtttcttttcgcacctgcgaaagcgtgcgagaagattctccgggcggcatcagactcccgtatcgccctcattcgatgatattgaagcacaagctggatgtgggccatgggcaagcaacagatcgtccattatcgctgatcaacagggttcgacgacgcgggttgacgcttatgattcactcggcaaaccggttagagaggctcctcaacctgtcgaatacaccagtgtccccgctcctcccatgcacagtgtatcttctagcggccacctgaagcgtcatcattcacttccacatcaacaacctagatctgtcgacaatttgattggcgcagctcgcactccaggaccaatttcaagtcggacgcgaagagcccagggagctcatggtgtgcagggcgaagcactggaagaagaagacgagctgcttgacgaagttttgaactcaactcaccgtgccatgcgacgactcgagaaagacagtaaatacaacaatctgaggcaatctgccagtaatcttgggctctcgaatccatatcccacgccttcgccttcggccaatggcaacgttgtcatgttcggagaaggacacgatgctgttacgccgaaaccactagatctccgaaagcatgctgcacgggactcgcagcaaaagtggccgacgccgccgtatgaggagagtgagtgggcttcgtctgcggcagccagtatatgggcagccggaaacaggttctga

SEQ ID NO: 10735 - protein, 794 aa, Muscodor strobelii
  misc_feature: SGI Peptide ID NO. 563419
  misc_feature (27)..(355): Pfam Id: PF00069 Pfam Desc: Protein kinase domain
  misc_feature (112)..(243): Pfam Id: PF07714 Pfam Desc: Protein tyrosine kinase
  misc_feature (1)..(794): NCBI GI: 171689172 Blast Desc: protein product [Podospora anserina] gi|170944548|emb|CAP70659.1| protein product [Podospora anserina]
  misc_feature (1)..(779): NCBI GI: 85082617 Blast Desc: NCU01498 [Neurospora crassa OR74A] gi|16944458|emb|CAB99241.2| related to ser/thr protein kinase IME2 [Neurospora crassa] gi|28918029|gb|EAA27711.1| NCU01498
  misc_feature (1)..(774): NCBI GI: 145613231 Blast Desc: MGG_11137 [Magnaporthe grisea 70-15] gi|145020353|gb|EDK04482.1| MGG_11137 [Magnaporthe grisea 70-15]
  misc_feature (1)..(794): NCBI GI: 256729480 Blast Desc: [Nectria haematococca mpVI 77-13-4]
  misc_feature (1)..(774): NCBI GI: 46117152 Blast Desc: FG04418.1 [Gibberella zeae PH-1]
  misc_feature (1)..(794): NCBI GI: 261356748 Blast Desc: serine/threonine-protein kinase MAK [Verticillium albo-atrum VaMs.102]
  misc_feature (1)..(794): NCBI GI: 156044546 Blast Desc: SS1G_10377 [Sclerotinia sclerotiorum 1980] gi|154694765|gb|EDN94503.1| SS1G_10377 [Sclerotinia sclerotiorum 1980]
  misc_feature (65)..(794): NCBI GI: 154300115 Blast Desc: BC1G_10433 [Botryotinia fuckeliana B05.10] gi|150856722|gb|EDN31914.1| BC1G_10433 [Botryotinia fuckeliana B05.10]
  misc_feature (22)..(793): NCBI GI: 189189518 Blast Desc: serine/threonine-protein kinase MAK [Pyrenophora tritici-repentis Pt-1C-BFP] gi|187972704|gb|EDU40203.1| serine/threonine-protein kinase MAK [Pyrenophora tritici-repentis
  misc_feature (1)..(794): NCBI GI: 240110978 Blast Desc: serine/threonine-protein kinase, [Coccidioides posadasii C735 delta SOWgp]
MTVSHDVAHRRSSTPQGSNMMALEDRFEILKDIGDGSFGSVALARVRTAGASVARRGTVIAIKTMKKTFESFTPCMELREVVFLRTLPPHSHLVPALDIFLDPFTKKLHICMEYMEGNLYQLMKARDHKCLDNSSVKSILFQIMQGLEHIHAHHFFHRDIKPENILVTTSGHHDSANSFRRYSALVTPPSTPPTYTVKIADFGLARETHSKLPYTTYVSTRWYRAPEVLLRAGEYSAPVDIWAIGAMAVEVATLKPLFPGGNEVDQVWRVCEIMGSPGNWYNKANQRVGGGDWKEGTRLAGKLGFSFPKMAPHSMDTILQSPQWPSSLSQFVTWCLMWDPKNRPTSTQALAHDYFADAVDPLRPRSSASKILGRKQSDLGRSKDSATPTGSSKPSWFRKSLIARSESTEAQLIPTEQKDLLPKNPRAPAPVTVVGEAQAAKARPAPSKRTTWSNGPSNVAPMPILPTIRPISPLSDAVTAQASNRQPVYNDAYANGVQHSTTDDKSTKKLGRQLSVASSTNNYTELHRQQAERALNGTGLASPPSGGQKESFFSHLRKRARRFSGRHQTPVSPSFDDIEAQAGCGPWASNRSSIIADQQGSTTRVDAYDSLGKPVREAPQPVEYTSVPAPPMHSVSSSGHLKRHHSLPHQQPRSVDNLIGAARTPGPISSRTRRAQGAHGVQGEALEEEDELLDEVLNSTHRAMRRLEKDSKYNNLRQSASNLGLSNPYPTPSPSANGNVVMFGEGHDAVTPKPLDLRKHAARDSQQKWPTPPYEESEWASSAAASIWAAGNRF

SEQ ID NO: 10736 - DNA, 4318 bp, Muscodor strobelii
  misc_feature: SGI EST ID NO. CUFF.25497.0
  misc_feature: Variant of the nucleotide sequence at SEQ ID NO 10734
ctcgttctatccctgtatccctctggctctgcccatctgtctgcaccggtactgcggccgtggtctggtttatctggtgtctctcgctctcctgttttattctgacgggattcccacacctttgctcttcagccagtacacgctctcgtctcgtccacgcaccgtacccacacgcgtctcccatcttcattatcctttcgttcgctcccttcttttctcccaggcttgactcttgcccgtctcgtctcacctaatctcatttcaccctcgctcatgctacccactcccgcagataccattcgcacgttctccccggagttcgaccaacggcatcgtagcatctctgtgcccgccgcccgctgactgtcagatctcagtggtgtgagtgtgcatttcgtttgcaaaatccatttgttgcttgttgatatcgagtcttcgatcttaacccctaaattcgagtactggccgttcgagtgagagagcgttcagccaacttgcgacaaggccctggcacttccatccgcacatccggcacagctcccgccttacgcatgagcgacagaaacggccataatttcccacgtaataaagtaaaagcaaagctaccagcaaccacactcgccgcacaaggcattactagccatccgctccttttcttacctcgtctcgtcccaccagcttaattaaaaatcaagtcattccctttttgaccagcatccaattgcgctagcaaggagtaccttatttccagaagctccaagcaaatccgctcagctcccctggacccgctccgacatactggttccatcacgtccctgaccctggcgacctactgtagtctccttcatcttgaacaagcactattccattcatttgcagtcttggattgtctcttcctctttctgtcatcttcactacctatcccacctgacttcatactcgaccaactcgacatttcatctctctcaaactcgcgagctttgttagagaagatcacacttcacactgtcaaacactggtactcgattcttgactctcagacctggccaacctccctgcatgaaacagtcaaatcccatggctcttgtatagagccgttcagacaaaccaggaaattttatcggtggaataggcggtgaacccattaaatcaacacatttggtggcttttcacaggattttgagccgagcacctgacctgcacacgtcaaaatgacggtatcgcacgacgtggcccataggcgatcatcgacgcctcagggatccaacatgatggctctggaagaccgttttgagatcctaaaggatattggtgacggaagctttggtagtgtcgccctagcgagagttcggacagctggtgctagcgtcgctcgacgaggaacagtgattgccattaagacgatgaaaaagacgttcgagtctttcacaccatgcatggagcttcgtgaggtcgtgttcttgagaacgctgcctccccattctcacttggttcccgcattggatattttcctcgacccatttacgaagaaacttcacatctgcatggaatacatggaggggaacctttatcagctgatgaaggcccgtgaccacaagtgccttgataattcaagcgtgaagagcatattattccagattatgcaaggcctagagcatattcatgcgcaccatttcttccaccgagacatcaaacccgagaacattctagtcacgacgtcaggccaccacgactcggccaactcattcagacgctactcggcccttgtcacgcccccctcgactccgccaacgtacacagtcaagattgccgattttggtctcgcccgtgagacacactcgaagctaccatacaccacgtacgtatcgactcgatggtatcgtgcaccagaagtcctcttgcgtgctggtgagtactcggctcctgtcgacatctgggctattggtgccatggccgtagaagtggcaactctgaagcctcttttccctggaggcaacgaagtggatcaagtctggcgtgtctgtgaaatcatgggaagcccaggcaactggtataataaagcaaatcaacgtgttggtggaggggattggaaagagggaacaaggcttgctgggaaactcggtttctcatttcccaagatggcaccccattccatggatacgatattgcagtcaccgcaatggccgagttctctcagccaatttgtgacgtggtgcttaatgtgggatcccaagaataggccgacatcaacgcaggccttggcacacgattattttgccgatgccgtcgaccctctccgcccaagatcttctgcttccaaaatactcggtcgcaagcagtcagatctagggcggtctaaagactcagccacacctaccgggtcatcgaaaccatcatggttcagaaagtctttaattgctcgatccgagagcacagaagcccagctgataccaaccgagcagaaggatctgcttcccaagaacccaagggcacctgctccggtcactgtagtgggtgaagcacaagccgccaaagctcggccagctccaagtaagcgtacaacttggagcaacgggccctcaaacgtggctcccatgcctattttgcccactattcgacctatctcgccattgtccgatgccgtgactgcgcaagcatcaaaccgtcagccagtatacaacgatgcatacgccaacggagttcaacactcaacgactgatgacaagtcaaccaagaaactcggtcgtcagttgtctgttgcatcgagtaccaataattacactgaactgcatcggcagcaagcagaacgagctctcaacggcactggtcttgcctcgccacccagtggtggccaaaaagagagtttcttttcgcacctgcgaaagcgtgcgagaagattctccgggcggcatcagactcccgtatcgccctcattcgatgatattgaagcacaagctggatgtgggccatgggcaagcaacagatcgtccattatcgctgatcaacagggttcgacgacgcgggttgacgcttatgattcactcggcaaaccggttagagaggctcctcaacctgtcgaatacaccagtgtccccgctcctcccatgcacagtgtatcttctagcggccacctgaagcgtcatcattcacttccacatcaacaacctagatctgtcgacaatttgattggcgcagctcgcactccaggaccaatttcaagtcggacgcgaagagcccagggagctcatggtgtgcagggcgaagcactggaagaagaagacgagctgcttgacgaagttttgaactcaactcaccgtgccatgcgacgactcgagaaagacagtaaatacaacaatctgaggcaatctgccagtaatcttgggctctcgaatccatatcccacgccttcgccttcggccaatggcaacgttgtcatgttcggagaaggacacgatgctgttacgccgaaaccactagatctccgaaagcatgctgcacgggactcgcagcaaaagtggccgacgccgccgtatgaggagagtgagtgggcttcgtctgcggcagccagtatatgggcagccggaaacaggttctgatggcgcgagattttgcagccggtgcgcgtacacaatcatgatttgtatcattttgacattgcatggtgtttggggcttgtgtgtcttttaggaaggctgagaggcgtctccggtggcgtcatgaattcactcgttcaacatgattgccattgagttgatatcaactacacatggtctcgaattttcatcgagataccttggtttatttcttcatcgcacaatctcaacctacaatacccccaaacctgatggattctcatcagtggcagccgagactgcgcttttttattcgattcgacaatacccagatatagatttgatttctgagactgcaaaaattatggtggatgccgacaacggtagtttcctttgtcaagacggtggagaggttcagtgtttttacgtatgacatctcactggcgaggggcaattcgagaaagcctgcgacgcatctcggtgcgttgtctctccatttacaacatttgtacaaaaaatcagagcatatcgagatatccagcgaccacccatatcgccagcatatttacatttacatcaagggtcaaggtcggacacactatatatatacatggcatcacttcctacgtcagacacatcattttcccaggctttataccagataccacatcacgaacatacactaccacctaccttattaagcatggcactgccatttagcaataatcaaatgaaccaataccgcc

SEQ ID NO: 10737 - DNA, 1905 bp, Muscodor strobelii
  misc_feature: SGI cDNA ID NO. 563420
  misc_feature: Encodes the peptide sequence at SEQ ID NO 10738
atgaatatcaatctacctgtgaggacatcgccgagtccgagaaatcaggcgagcagaaattatttcacgaattatacgccgccgtcatctactgaagctatcaatggtcccgtacgagagcccgcacgggagctgatgcccgtaaatgacaggctcattgttggtgttgattttggaacgacattctcaggggttgctgccgtatacacatcgacacctgacgatgttgaaattatcaagacttggccaggtggaaacggaatcacatccgataaggtaccgagtgagatcacatacgtgtaccctacagactcgaagccaggtgatgatccaaacgtaaaatggggtttccaattcaaaccggaggagacacgtatacggtgtataaaattgttcctcgatcgagcacagaagctgccgttctacgtcagtccgcaggagacggcgacacagctcaagaacttcaataagactgttgttgacggtgttagcgactacttgacggagatctacaagcacactatggatactctcacgcggagatacggagaatcattcatggcttcaactaaagtcgagtttgtcttgacctgtcctgcggtgtggtcagatgctgcgaagaacacaacgttgcaggctgcggagagagctggtatgggctcgaagtccgagattcagatgatcagcgagcctgaagctgctgcagtgtatacgctcaaggccatacagcctaatcatctaaatataggagacaattttgttgtttgcgatgctggtggtggcactgtcgatttgatcgcctataaaatcatctcattaaaacccttgagagtcgaggagtcggctgtcggaacaggtggcttgtgcggaagtgccttcttgaattacaggtttgaggaacatgtccgtggacgattaggccatgcccgattcgatgagatgaaaatgaagaaggctaagacgtggcaaatgggtctcaagtatttcgaggaatttgtcaagaggaatttcaacgaagatgaacactcagaggtgaacgtgccatttccaggacttccagatgacgaagatgcccgcttagattccgggtttctcatcctaacctcagcagaaataaaagagatcttcgagccagtcgtgaaagaagtctgtgacctcgtccaggggcaagtcgacgggcttcggaacaaaggcggtatcgtatccggcatcgtcctagtcggtggctttggacaatccgaatacttatacaaacggctcaaatcacatttcacatccggggcaccacctccatactcagagcgaccaacacacgcgatggcacgagctatcggcgagaatggaagcattgaggtcatgcagccgctgtacgcttggacggcagtcgtcaggggtgccgttttgcgaggtctggaaggcaatatggttatcagccgaaaggctagatatcattacggaaccagctatgcaacagtgtatgacgaggagaaacacagcgtcagtgagagatactggtccccgctgtgggagcgctggatggttagtgaccggatgcagtggcatattgcaaagggcgaagccatatcacctttatcgcccatagcattccactacacgcggaacttccgtccgggccaaagtctcgtcgtgacggacgatttgattgcctgtgatgcggacgaaccacctgcggcatattcaaaggagttgatacatacgtgtacgcttacgacagatcttagtgctgtgcctaggagcttgttcacgagactcacgacgacgaggggtgtggagtttgataatttggatttcacgttagagatgatcgtcgattctgcgggattaggctttgagcttaaggttgatggggttagatatggtcgtgtcgaggcggagtttcactaa

SEQ ID NO: 10738 - protein, 634 aa, Muscodor strobelii
  misc_feature: SGI Peptide ID NO. 563420
  misc_feature (1)..(590): NCBI GI: 46117154 Blast Desc: FG04419.1 [Gibberella zeae PH-1]
  misc_feature (1)..(634): NCBI GI: 16416067 Blast Desc: related to hsp70 protein [Neurospora crassa]
  misc_feature (1)..(634): NCBI GI: 116205025 Blast Desc: conserved [Chaetomium globosum CBS 148.51] gi|88176524|gb|EAQ83992.1| conserved [Chaetomium globosum CBS 148.51]
  misc_feature (1)..(634): NCBI GI: 145612471 Blast Desc: conserved [Magnaporthe grisea 70-15] gi|145019631|gb|EDK03859.1| conserved [Magnaporthe grisea 70-15]
  misc_feature (1)..(634): NCBI GI: 164427965 Blast Desc: NCU01499 [Neurospora crassa OR74A] gi|157071955|gb|EAA27712.2| conserved [Neurospora crassa OR74A]
  misc_feature (1)..(634): NCBI GI: 156044568 Blast Desc: SS1G_10388 [Sclerotinia sclerotiorum 1980] gi|154694776|gb|EDN94514.1| SS1G_10388 [Sclerotinia sclerotiorum 1980]
  misc_feature (1)..(634): NCBI GI: 171689174 Blast Desc: protein product [Podospora anserina] gi|170944549|emb|CAP70660.1| protein product [Podospora anserina]
  misc_feature (1)..(536): NCBI GI: 154290325 Blast Desc: BC1G_15793 [Botryotinia fuckeliana B05.10] gi|150847777|gb|EDN22970.1| BC1G_15793 [Botryotinia fuckeliana B05.10]
  misc_feature (1)..(623): NCBI GI: 189200364 Blast Desc: conserved [Pyrenophora tritici-repentis Pt-1C-BFP] gi|187983618|gb|EDU49106.1| conserved [Pyrenophora tritici-repentis Pt-1C-BFP]
  misc_feature (49)..(634): NCBI GI: 169609520 Blast Desc: SNOG_07852 [Phaeosphaeria nodorum SN15] gi|160701863|gb|EAT85318.2| SNOG_07852 [Phaeosphaeria nodorum SN15]
MNINLPVRTSPSPRNQASRNYFTNYTPPSSTEAINGPVREPARELMPVNDRLIVGVDFGTTFSGVAAVYTSTPDDVEIIKTWPGGNGITSDKVPSEITYVYPTDSKPGDDPNVKWGFQFKPEETRIRCIKLFLDRAQKLPFYVSPQETATQLKNFNKTVVDGVSDYLTEIYKHTMDTLTRRYGESFMASTKVEFVLTCPAVWSDAAKNTTLQAAERAGMGSKSEIQMISEPEAAAVYTLKAIQPNHLNIGDNFVVCDAGGGTVDLIAYKIISLKPLRVEESAVGTGGLCGSAFLNYRFEEHVRGRLGHARFDEMKMKKAKTWQMGLKYFEEFVKRNFNEDEHSEVNVPFPGLPDDEDARLDSGFLILTSAEIKEIFEPVVKEVCDLVQGQVDGLRNKGGIVSGIVLVGGFGQSEYLYKRLKSHFTSGAPPPYSERPTHAMARAIGENGSIEVMQPLYAWTAVVRGAVLRGLEGNMVISRKARYHYGTSYATVYDEEKHSVSERYWSPLWERWMVSDRMQWHIAKGEAISPLSPIAFHYTRNFRPGQSLVVTDDLIACDADEPPAAYSKELIHTCTLTTDLSAVPRSLFTRLTTTRGVEFDNLDFTLEMIVDSAGLGFELKVDGVRYGRVEAEFH

SEQ ID NO: 10739 - DNA, 2591 bp, Muscodor strobelii
  misc_feature: SGI EST ID NO. CUFF.25500.0
  misc_feature: Variant of the nucleotide sequence at SEQ ID NO 10737
ttaccagacaatggaattgaagaatttataaatacattgtgtctgtggcgaattatgaaagttaatctctttgctttcattcggttcaatttctgaagattgtcggtttgaaccacttggcgccagactgctcccccaccatctccaattcaattcaattcccctcagctcaggcagtcatagttagggctgtgcatggctgagtgagatatatcactgcgccgctataataccatacccgtcgcatatcgccgccaatctcaacgaattcataccagagagctttagtttattgattatcagacatactcagcagcgaagtgctcggcgtgaaagacagctcggcgagattagcgcaagacgcattcagaagtcgagtcgacgtaccccacatgcgaacgcggttaagacacatataggagactgacctcaggctggggatgagcggggccctgtacggcaggactcgacgagaggtagaaacgacatcatgaatatcaatctacctgtgaggacatcgccgagtccgagaaatcaggcgagcagaaattatttcacgaattatacgccgccgtcatctactgaagctatcaatggtcccgtacgagagcccgcacgggagctgatgcccgtaaatgacaggctcattgttggtgttgattttggaacgacattctcaggggttgctgccgtatacacatcgacacctgacgatgttgaaattatcaagacttggccaggtggaaacggaatcacatccgataaggtaccgagtgagatcacatacgtgtaccctacagactcgaagccaggtgatgatccaaacgtaaaatggggtttccaattcaaaccggaggagacacgtatacggtgtataaaattgttcctcgatcgagcacagaagctgccgttctacgtcagtccgcaggagacggcgacacagctcaagaacttcaataagactgttgttgacggtgttagcgactacttgacggagatctacaagcacactatggatactctcacgcggagatacggagaatcattcatggcttcaactaaagtcgagtttgtcttgacctgtcctgcggtgtggtcagatgctgcgaagaacacaacgttgcaggctgcggagagagctggtatgggctcgaagtccgagattcagatgatcagcgagcctgaagctgctgcagtgtatacgctcaaggccatacagcctaatcatctaaatataggagacaattttgttgtttgcgatgctggtggtggcactgtcgatttgatcgcctataaaatcatctcattaaaacccttgagagtcgaggagtcggctgtcggaacaggtggcttgtgcggaagtgccttcttgaattacaggtttgaggaacatgtccgtggacgattaggccatgcccgattcgatgagatgaaaatgaagaaggctaagacgtggcaaatgggtctcaagtatttcgaggaatttgtcaagaggaatttcaacgaagatgaacactcagaggtgaacgtgccatttccaggacttccagatgacgaagatgcccgcttagattccgggtttctcatcctaacctcagcagaaataaaagagatcttcgagccagtcgtgaaagaagtctgtgacctcgtccaggggcaagtcgacgggcttcggaacaaaggcggtatcgtatccggcatcgtcctagtcggtggctttggacaatccgaatacttatacaaacggctcaaatcacatttcacatccggggcaccacctccatactcagagcgaccaacacacgcgatggcacgagctatcggcgagaatggaagcattgaggtcatgcagccgctgtacgcttggacggcagtcgtcaggggtgccgttttgcgaggtctggaaggcaatatggttatcagccgaaaggctagatatcattacggaaccagctatgcaacagtgtatgacgaggagaaacacagcgtcagtgagagatactggtccccgctgtgggagcgctggatggttagtgaccggatgcagtggcatattgcaaagggcgaagccatatcacctttatcgcccatagcattccactacacgcggaacttccgtccgggccaaagtctcgtcgtgacggacgatttgattgcctgtgatgcggacgaaccacctgcggcatattcaaaggagttgatacatacgtgtacgcttacgacagatcttagtgctgtgcctaggagcttgttcacgagactcacgacgacgaggggtgtggagtttgataatttggatttcacgttagagatgatcgtcgattctgcgggattaggctttgagcttaaggttgatggggttagatatggtcgtgtcgaggcggagtttcactaagtgtgatgattgagggattggtgaggttttggataaaagggtgatatgaggaataatcgctttcggtgcgatcgatattatatataaggtatttggatgataaatgacatatacgaagggcatacatctcgctagcgacagttgtatgcaatacagagaaatctatagagtctatcaatcttatgcttgcgagaag

SEQ ID NO: 10740 - DNA, 423 bp, Muscodor strobelii
  misc_feature: SGI cDNA ID NO. 563421
  misc_feature: Encodes the peptide sequence at SEQ ID NO 10741
atgaagctcctcgccgctctcacttttcttgcagccggtgtacaggcatacaagtccatcgggttcacaaacgacatccccgtggatgggaactacaccgttggcgacgacttcgtacttaaatggatagcatatgatgctgagccaaccgacacctttcatctttacgtcgaagcttataacaagaccccctctggctacatgccgggtggcccgttcgggggtcagctccctatccttgatactaggaaggtcgatctcggcggtgagtttaacaagcccggtgataaacttctggataaggacttattactgacgagagggttcgatgggtggaccggttcccaattttactatttcttctatgcggaatacgttaatggagggacctctcctcgctctttccatgttgttgagccgtaa

SEQ ID NO: 10741 - protein, 140 aa, Muscodor strobelii
  misc_feature: SGI Peptide ID NO. 563421
MKLLAALTFLAAGVQAYKSIGFTNDIPVDGNYTVGDDFVLKWIAYDAEPTDTFHLYVEAYNKTPSGYMPGGPFGGQLPILDTRKVDLGGEFNKPGDKLLDKDLLLTRGFDGWTGSQFYYFFYAEYVNGGTSPRSFHVVEP

SEQ ID NO: 10742 - DNA, 372 bp, Muscodor strobelii
  misc_feature: SGI cDNA ID NO. 563422
  misc_feature: Encodes the peptide sequence at SEQ ID NO 10743
atgaagctcctcgccgctctcacttttcttgcagccggtgtacaggcatacaagtccatcgggttcacaaacgacatccccgtggatgggaactacaccgttggcgacgacttcgtacttaaatggatagcatatgatgctgagccaaccgacacctttcatctttacgtcgaagcttataacaagaccccctctggctacatgccgggtggcccgttcgggggtcagctccctatccttgatactaggaaggtcgatctcggcggtgagtttaacaagcccggtgataaacttctggataaggacttattactgacgagagggttcgaatcggtcatcgtgttacatggcagggctgggttcaactcttaa

SEQ ID NO: 10743 - protein, 123 aa, Muscodor strobelii
  misc_feature: SGI Peptide ID NO. 563422
MKLLAALTFLAAGVQAYKSIGFTNDIPVDGNYTVGDDFVLKWIAYDAEPTDTFHLYVEAYNKTPSGYMPGGPFGGQLPILDTRKVDLGGEFNKPGDKLLDKDLLLTRGFESVIVLHGRAGFNS

SEQ ID NO: 10744 - DNA, 1305 bp, Muscodor strobelii
  misc_feature: SGI cDNA ID NO. 563423
  misc_feature: Elevated expression when VOC is produced
  misc_feature: Encodes the peptide sequence at SEQ ID NO 10745
atgagcacatccgagaagcggaaagcctccagcatccgctcaacaaactcaacccgaagcaacaacccaataatcgcggcaccaccgcgcgcgcagttcatccgctccgcagcgtcagcctcaccacccaccgccgattccgagtcgatcaacgaagccccagtctccagctctacctccataaaggacagcataacatccgcatcctcatcaagggagaaaaaccttcaagaaaaaatcatagcgctgaaacacgaactcgcaacaaccgaagcagaatttacccgagccctcgacaaactctcccaatccgagagcgagacagccagtttctggcagaccaaacttctccgcgcagacacagagctccgcgtcttgcggacagaggtcgatgtcagagaagcggagaaattggagctcagagaagaatgggagatcttgaatcaagcattaagagaaaaagacgacgaaatacaagcgctgagaacccagatccaggggttgaagcagtgggtcagtacgagtacgaagaagagtgatcaagttagtgatgaggagtttggggagagctttgcgaagctcagaaatgggcttcaaaattgggccgtttcgcattttcggaagacgagctttgatctagagagcgcgggtcctgatgttatcgaggacctcggacagcttgtgcctatgtacgaggagcttgccgtcagtgagacgaaggccgcttttctgcaatccatcgtctcgagtattctagtagagatggttttccgggagtactttgttggccttccgaaacaacaagctacgcagctggacgaaattgaaaaatatctggcgcaacttagctctacagaagcagttaacgagtggcgcgcaatgacgttaagcatgctccgaaaagaggacgtcacaaaacttcaatccgagacggacgctctggtaaaaagagttgttgatcgggtaaacacaatcatgaacagcatcactagcgtacataacacagaggttcgagaccaaggacttcatgtccttgtcaataacgctataagtttggcgcggctattagtagcgcaaaaggcagtatttaaagtcacaatgccaaagatacagccctatcaacgggtgttgtttgaagccgagacaatggatcatattggagaggaagacgaggatagcctcatggaacgagagatccgctgcgtcacatttcccggtatcattaaaacaggcgatgaaaatgggcgtcagatgcagttccggaacgtcattgcaaaagcaacagttttgtgcaaccctgactga

SEQ ID NO: 10745 - protein, 434 aa, Muscodor strobelii
  misc_feature: SGI Peptide ID NO. 563423
  misc_feature (1)..(434): NCBI GI: 256729445 Blast Desc: NECHADRAFT_63053 [Nectria haematococca mpVI 77-13-4]
  misc_feature (74)..(434): NCBI GI: 46117046 Blast Desc: FG04365.1 [Gibberella zeae PH-1]
  misc_feature (69)..(434): NCBI GI: 116205015 Blast Desc: CHGG_10391 [Chaetomium globosum CBS 148.51] gi|88176519|gb|EAQ83987.1| CHGG_10391 [Chaetomium globosum CBS 148.51]
  misc_feature (87)..(434): NCBI GI: 85076428 Blast Desc: NCU01491 [Neurospora crassa OR74A] gi|9369312|emb|CAB99233.1| [Neurospora crassa] gi|28916956|gb|EAA26688.1| [Neurospora crassa OR74A]
  misc_feature (39)..(434): NCBI GI: 154298164 Blast Desc: BC1G_12047 [Botryotinia fuckeliana B05.10] gi|150858233|gb|EDN33425.1| BC1G_12047 [Botryotinia fuckeliana B05.10]
  misc_feature (113)..(434): NCBI GI: 156044576 Blast Desc: SS1G_10392 [Sclerotinia sclerotiorum 1980] gi|154694780|gb|EDN94518.1| SS1G_10392 [Sclerotinia sclerotiorum 1980]
  misc_feature (126)..(434): NCBI GI: 171689160 Blast Desc: protein product [Podospora anserina] gi|170944542|emb|CAP70653.1| protein product [Podospora anserina]
  misc_feature (280)..(434): NCBI GI: 261356727 Blast Desc: conserved [Verticillium albo-atrum VaMs.102]
  misc_feature (24)..(211): NCBI GI: 145612501 Blast Desc: MGG_12363 [Magnaporthe grisea 70-15] gi|145019651|gb|EDK03879.1| MGG_12363 [Magnaporthe grisea 70-15]
  misc_feature (78)..(216): NCBI GI: 261356727 Blast Desc: conserved [Verticillium albo-atrum VaMs.102]
  misc_feature: Useful for introducing or modulating the production of volatile compounds
MSTSEKRKASSIRSTNSTRSNNPIIAAPPRAQFIRSAASASPPTADSESINEAPVSSSTSIKDSITSASSSREKNLQEKIIALKHELATTEAEFTRALDKLSQSESETASFWQTKLLRADTELRVLRTEVDVREAEKLELREEWEILNQALREKDDEIQALRTQIQGLKQWVSTSTKKSDQVSDEEFGESFAKLRNGLQNWAVSHFRKTSFDLESAGPDVIEDLGQLVPMYEELAVSETKAAFLQSIVSSILVEMVFREYFVGLPKQQATQLDEIEKYLAQLSSTEAVNEWRAMTLSMLRKEDVTKLQSETDALVKRVVDRVNTIMNSITSVHNTEVRDQGLHVLVNNAISLARLLVAQKAVFKVTMPKIQPYQRVLFEAETMDHIGEEDEDSLMEREIRCVTFPGIIKTGDENGRQMQFRNVIAKATVLCNPD

SEQ ID NO: 10746 - DNA, 6720 bp, Muscodor strobelii
  misc_feature: SGI EST ID NO. CUFF.25789.2
  misc_feature: Variant of the nucleotide sequence at SEQ ID NO 10744
tagccatccttcagccgtattggaatacctcaacgacttcgtgtttactctctatttgtgactcattctatagattaggaggaatacgaggaaatggtatatctaacggtcgattagtagacggaaacccgaccaggcgacacggttattcatcgcacaacaggcaacatcagcatgctgcagtacatcctcaatcatctttatctccgtcccgaatacctcttcaaatcgcttcttccctcttcctagcaccatgagcacatccgagaagcggaaagcctccagcatccgctcaacaaactcaacccgaagcaacaacccaataatcgcggcaccaccgcgcgcgcagttcatccgctccgcagcgtcagcctcaccacccaccgccgattccgagtcgatcaacgaagccccagtctccagctctacctccataaaggacagcataacatccgcatcctcatcaagggagaaaaaccttcaagaaaaaatcatagcgctgaaacacgaactcgcaacaaccgaagcagaatttacccgagccctcgacaaactctcccaatccgagagcgagacagccagtttctggcagaccaaacttctccgcgcagacacagagctccgcgtcttgcggacagaggtcgatgtcagagaagcggagaaattggagctcagagaagaatgggagatcttgaatcaagcattaagagaaaaagacgacgaaatacaagcgctgagaacccagatccaggggttgaagcagtgggtcagtacgagtacgaagaagagtgatcaagttagtgatgaggagtttggggagagctttgcgaagctcagaaatgggcttcaaaattgggccgtttcgcattttcggaagacgagctttgatctagagagcgcgggtcctgatgttatcgaggacctcggacagcttgtgcctatgtacgaggagcttgccgtcagtgagacgaaggccgcttttctgcaatccatcgtctcgagtattctagtagagatggttttccgggagtactttgttggccttccgaaacaacaagctacgcagctggacgaaattgaaaaatatctggcgcaacttagctctacagaagcagttaacgagtggcgcgcaatgacgttaagcatgctccgaaaagaggacgtcacaaaacttcaatccgagacggacgctctggtaaaaagagttgttgatcgggtaaacacaatcatgaacagcatcactagcgtacataacacagaggttcgagaccaaggacttcatgtccttgtcaataacgctataagtttggcgcggctattagtagcgcaaaaggcagtatttaaagtcacaatgccaaagatacagccctatcaacgggtgttgtttgaagccgagacaatggatcatattggagaggaagacgaggatagcctcatggaacgagagatccgctgcgtcacatttcccggtatcattaaaacaggcgatgaaaatgggcgtcagatgcagttccggaacgtcattgcaaaagcaacagttttgtgcaaccctgactgaagcacaacattggcatgtagatgcaatgaacttcgtgccactaacgtcagcgctgctgtttccatggcctgcagtaagagttctttcatggcttgcatgtggtcataagcagattgacaacaagtgagtcactctgaagacaatcaatcaccgttggtgttgcgattcaccgcacttcgaactctgaactggtcataataatagactctattgggggccaaaaagcggtgtgccaaacaaatgtctttgaactgagccaggcagagccaaggagagtaagattccataccttgatctgagctgagttcatatccgggaatcacatgcattcatagtgaccagtgtccggaaaaatgattttaccaaatgagagctggcattgttagctattgctgcataattcgcaaggtcgcggtttaggatcggaaaaaagcagactaatatcataggctacgagcatcggaaatctcttctcagagacagcacttccaacaaatatgtaggcagcagatcagatctcgttacagaaagccaggtcacagtaccggatcggtgtgacctcgtatttccgttttcggctcaatgggttatctgatccaaatgacaaaccccggtcagctgggaaccactcagaagcaagcagtattctctacctccaggcagtgcagagagtgagagtgaggggctcgaggggagcccagaactattggggaaattgaggctctgctcgcgatctggctctgagaaggccctcaacttgctacaccctcagattccgggtcggaggcccacactagcagacgtatccatccaatggaaccacctggttccgcatgcacatccatcctgttcatgaagtatgagccaatggcgttggctttgactgaaacccgtccaatgatgtgggctctacaatcgtggtcttccttgtcgatacatgccagctcagcatgggcgaacattacggctcgcatcatatgtagaaacgtatgcattcgtccatgcatgaggacaaattgtcatcagtgtcattgaaatggctcggaaacctagaaccctgttgactttgttaaacagtgctcgactgacgcgagtggtgatcgccgccgtggcgaggagacattgtggtattgtatcgttggtggacaagcagagcactatggcgccctgcatataactagaagctacggtcggttaatatcggtgtatgttaataaatatgatcttgcgaaacgtcatacttcatatcatctctggcagaggatggcgagggatccgcatcattagcaggcaaaactactcaagaacacattataagaagtaatcaagcgagccaactcagcaaatggatggggatgatggtacccatgcaacagggatgaatatggagaagagtcagagacatgcaggaaacatcaaaagacgaacactatattcactcacaagtcttgccactgggttgccataccattgagggagaaacgtggaggcacccaatattggactctgaaacagacgagttaagcatgttgttcatcgtggcaccactccaacgggtcagctgtggagtcccggttgaccgtgatagaggatgtaaagatgccgaacgctagcgagcagcaacttgaaagctagcacccgtgacattccgtggggttaactaccgatggcaaggagagcttcaaggtaccagggagtaatacgaggatacgactaagaaatcccacccatcgcaaactctttctcaggcgcggcagcggcccggagagcagggtctcatcgccgggaaaagatatcgctgacgggtgtgcactcggtctaggaactaatataaagtccgcgtttgtggtacgtgggacgaagctctgactgcattatcggtatagcgagctgagcaagatgttcgagatggaaggttgcaagtcgagctgaccgttgtacatagccatatcgttgcgctggtcgagatcaccggcttggactcttatgtcaaagtggcacattttctccccttccatactccacatgcatctaagattagccggatatcgaacaaaccgacagcgattggatctgttgctttttgctttagcgtcacctaaaattgagagaatcaaaacgagaccagcacagacgcgggctcgtttgctctccgcatgcgccaagaccagaagtcgatggatggtggtagcgcctcgaatgcatgattgcgtgttccgttctatatcaaagctcggataccatgtgcaatgcatgttttggcgtagcataagggttgtggatcgcggtccgaacctacctatcgacgccattctccaccggggtttgcggaagtgaaagagggtgtgatgactagcgatgactagcttgtggaggtttttgccgctggacccttggaacctctggaacctttgatcattggcatcaaatgattatcactcaatgttcgtctgtagaaccatagctcatgagaactgaggaacactgtattagggatcccgatgtgccaatacattgtcgttctgattgctttttgttccgaacgtcgctggatttgtgtacctaggcccctccttcgtccgtacgattactgcttgatctcagctcgaatataaagtcgagagaacccatttcaatcccaggtcgccaacataagcctctctcatttcttcggcatcgtttcgtcacgcaatctgtcgcgaggcgctgctggctcggcagatttggtacactgagacacttggtatcattggattgataggtgggctgctccatggtggtgataggcagcctctctttttcccattctcgaaactgtgaataaagtcccggggactgcagcatcaaattcacagctccagtgaagcctgaaacaaccgtaacaataacaccgggcatatcgacccttgcagtttagctcttaggcatctctcggttggcatcctagattcactgggtttgtaacggtggagggacgtcgttacctaaatcgggacccaccattgttcccttgcgtattttcggcccccaaactcgagaagtcgacgtcaagacaattgcccgtatttaaatcttaaaaacagaatatcggtaagttttgtttgatgcttttcgtttcggcatcttatgacgctcttttctgtcgaaaattgtgattctgagctgaacatcagtgacagggcaattggcgtcgcacaattgctcctctacaccgttaggccgactcgtcagctgtcccgcatcatggggtctggccaaaaacgcggcagctattcatcaacagactcgcaaagtgacataagttcggtttattcctcggaaacaacaatgtcttcctatgcgccctcaacttcgtattccatgtcatcctacgcctcaacgtcagtgcatgggcatggattgccccttaatggccgatcccttccttgcgaattcattggttacggccactgtgatctgtccttcaacctcgatgacgttgatagttggattgagcacattgtaaccatgcatcttgaggacaaactacccaggaaagcactttgttggtattgcgacgattatgtcttcgattataaagacaaagtcgcaagaggagaccgtcgcaagaacttcgacaatcggatgtggcacattcgtgatcatattctgaacgaagggaaaacaattgaccaaatgagaccggatcatcatctaaacgttcatcttaatgattccgagttgatctcgaagagtgcgtataactatgtgcatcgaaggtccgaggtaccgggaggaccatggctctatgcacatgacgccataccatttgaattgcaaaagagagcagaacgccgtcaatacgaacctcacggcagttctcacgacgaacggagacactatcggaaacacggaaaaaccaagtgaacgttggactaggtccatcatcggggtcaagtcggtcacccgttctgtggtcgttgggatatcgagggcgtgatacaccaacagtaccgtcaatcgagtcgaataggaagtcgacagcatcatatacgttgaggagacaggtctccttttgattgtttttgattgttttagcgcgacatgccatagtttgttgcgtcgtttggacgttcttcgccgttgttcaaggcttccttatatttgccttgtggaccgggagtcgtgggaaaatatcgacgtcgggtatcgtcaagctatatatgctcagacaccaatgacgatctatggatcgacacgaggcaaattcagcctcatctaagtgccgccatgcgggccgcatgcatcatgccggggcgattgccttggaagcaaagtgcacttctgcatctttccttggtgtgcataggagtaagtggacagggagggccagcacctatacgcaagggccactccccactcagacccgtggacgtaagcaggctcggtcatgggacgttgctgtcttcaagactgttaccttggggatatagcctgcgtttcgaccatatgggacaaaggctattggttcgttgaatgcgcatctcattggttggcatgaagagacacatatctcgggcgtagctggccttgggctcaatcaagttgcttgcttgatgtcctgacaacctggtcgatggggtttgcttgacgtctcatatctgagacacgattatggtgtgatgattcacgattcatgattacgctggggtttctttttgcgtgctccggaatattgcgttattgtctggttcaaactgtgagcatccagtggaggggtgataccgcagatgagcaaatcgaatggggagatggcaagattgcatgatacggttgatacccgcgccatttcaatgatcaaggctgtatgctatgaacaactaggtaggaatctatactccatgttagctttctcattccttcaccgcaagttgtcctttctgcctaggtggcgagcgagagcccgtgcttgcctacttgcgtgtaagttgggccgcctagttccgcctcgttttctaattggagcaatattgcacctatcacgggtcgcaaatattcttgattaatgtaatcgtggtaagagtgtcacggatcgatttttgtgaagtcggaataggtcagtcgactaagggaaacgtggatggctatataagggcgcagcggtgtttggtactaaaaacggc

SEQ ID NO: 10747 - DNA, 408 bp, Muscodor strobelii
  misc_feature: SGI cDNA ID NO. 563424
  misc_feature: Encodes the peptide sequence at SEQ ID NO 10748
atgaggaaattagtccgtttcacgattcatgaccaccccgccaagatctcgacattcaccaagctttttgtcgtgagcgactatatcctgctgggcgacctcagcgctatcgtcttctctgatatgcgcaaagccggcatccaggtgattgaagagttactctcggtcgagcaggatacggatgagtttcataccataaaggagacctttgggtactccaacaagcaaatagcacaacctacttctcttgaagaacttggcgcaaagcggtgtatgaggtttgatttggacactcgtaaagttcctcgatttattcttaagatgtctaagagtcgagacgatctcgaagcgaattggcacggtgttgccaacgccaggcgggaactaatagctgacatttcgacatag

SEQ ID NO: 10748 - protein, 135 aa, Muscodor strobelii
  misc_feature: SGI Peptide ID NO. 563424
MRKLVRFTIHDHPAKISTFTKLFVVSDYILLGDLSAIVFSDMRKAGIQVIEELLSVEQDTDEFHTIKETFGYSNKQIAQPTSLEELGAKRCMRFDLDTRKVPRFILKMSKSRDDLEANWHGVANARRELIADIST

SEQ ID NO: 10749 - DNA, 330 bp, Muscodor strobelii
  misc_feature: SGI EST ID NO. CUFF.25424.0
  misc_feature: Variant of the nucleotide sequence at SEQ ID NO 10747
ctttatgttgccatttaacggaccccatgaggtccgaacttctggtgcttgcgaggtgtaatcacttacaagcggaatcttgttttagctaccacgctcttcgacagatgcatattaacatgaggaaattagtccgtttcacgattcatgaccaccccgccaagatctcgacattcaccaagctttttgtcgtgagcgactatatcctgctgggcgacctcagcgctatcgtcttctctgatatgcgcaaagccggcatccaggtgattgaagagttactctcggtcgagcaggatacggatgagtttcataccataaaggagacctttg

SEQ ID NO: 10750 - DNA, 723 bp, Muscodor strobelii
  misc_feature: SGI cDNA ID NO. 563425
  misc_feature: Encodes the peptide sequence at SEQ ID NO 10751
atgccacccaaaccacctctaacacacttcctatgcatccccctcgtaactgccaaatcccgagcacagctcagcacgagcctagcagctttcaaagcagatgtcacaagcacagacagttttgccgtacccgagggtgcaatacggccgctaggtacgctgcatttgacgctcggcgttatgagtttcccgccaaatgacgaagggagacggggattaggggaggccgttgggctgttgaggagtttaagaaaaccagaagcgcagggagaagcgacagaaggaacagaagcgaaaggagagaatgagagtataagcgtaacgctaaaaggcttgcaatccatgcagcaaccctccagaaccagcattctctacgcaccgccctcagatccagaccggaagttatacgacttttgcactggcatacttacgaaattcaaagatgccgggttagtggttgaggattctaggccattattgttacatgctacgatcctaaataccatatatgtgaaggacagggacagaggtgggggtagaggtgggagaggtagagggagggataaactgacgattgatgcgaggggtatcctggaacgatatgaggattgtgtttgggctgaagatatcagcgtggataaggtggctatttgtaggatgggtgcgaagatgggtcaggatggtgaggaggcttatgaggttgaggcagaggttgacgtttag

SEQ ID NO: 10751 - protein, 240 aa, Muscodor strobelii
  misc_feature: SGI Peptide ID NO. 563425
  misc_feature (1)..(240): NCBI GI: 46117044 Blast Desc: FG04364.1 [Gibberella zeae PH-1]
  misc_feature (1)..(223): NCBI GI: 256729446 Blast Desc: NECHADRAFT_84021 [Nectria haematococca mpVI 77-13-4]
  misc_feature (1)..(237): NCBI GI: 261356727 Blast Desc: conserved [Verticillium albo-atrum VaMs.102]
  misc_feature (8)..(223): NCBI GI: 171689162 Blast Desc: protein product [Podospora anserina] gi|170944543|emb|CAP70654.1| protein product [Podospora anserina]
  misc_feature (4)..(240): NCBI GI: 39943124 Blast Desc: MGG_03642 [Magnaporthe grisea 70-15] gi|145009770|gb|EDJ94426.1| MGG_03642 [Magnaporthe grisea 70-15]
  misc_feature (4)..(234): NCBI GI: 169608854 Blast Desc: SNOG_07512 [Phaeosphaeria nodorum SN15] gi|111063858|gb|EAT84978.1| SNOG_07512 [Phaeosphaeria nodorum SN15]
  misc_feature (4)..(209): NCBI GI: 189200154 Blast Desc: conserved [Pyrenophora tritici-repentis Pt-1C-BFP] gi|187983513|gb|EDU49001.1| conserved [Pyrenophora tritici-repentis Pt-1C-BFP]
  misc_feature (101)..(223): NCBI GI: 85076424 Blast Desc: NCU01490 [Neurospora crassa OR74A] gi|9369311|emb|CAB99232.1| conserved [Neurospora crassa] gi|28916955|gb|EAA26687.1| [Neurospora crassa OR74A]
  misc_feature (9)..(225): NCBI GI: 116205015 Blast Desc: CHGG_10391 [Chaetomium globosum CBS 148.51] gi|88176519|gb|EAQ83987.1| CHGG_10391 [Chaetomium globosum CBS 148.51]
  misc_feature (4)..(203): NCBI GI: 242769798 Blast Desc: conserved [Talaromyces stipitatus ATCC 10500] gi|218725043|gb|EED24460.1| conserved [Talaromyces stipitatus ATCC 10500]
MPPKPPLTHFLCIPLVTAKSRAQLSTSLAAFKADVTSTDSFAVPEGAIRPLGTLHLTLGVMSFPPNDEGRRGLGEAVGLLRSLRKPEAQGEATEGTEAKGENESISVTLKGLQSMQQPSRTSILYAPPSDPDRKLYDFCTGILTKFKDAGLVVEDSRPLLLHATILNTIYVKDRDRGGGRGGRGRGRDKLTIDARGILERYEDCVWAEDISVDKVAICRMGAKMGQDGEEAYEVEAEVDV

SEQ ID NO: 10752 - DNA, 1546 bp, Muscodor strobelii
  misc_feature: SGI EST ID NO. CUFF.25430.0
  misc_feature: Variant of the nucleotide sequence at SEQ ID NO 10750
tcggaagcaatcaggaccaaaccgatcccaaaatcggcggacagtgcaataatgatgctggccccaaggaccaagatttacttgagataatcttcttttcttggtcagattgagttctgcgggacatgccacgagcttacccggctgatgttctgagccaggcgccgaaagagacctggtccctgctgtgttttggcagctatcgggtggcctgcatggaccacgtacgactgcgaaatgccaaggagagtaatactgacatgactcgattgtcctctgcagtactgtgggcttctgcattgtcgtgatattcgggacaactgagtcattgtctggcgctgcgactaaatatacaccatgtatttcgaggaatcggtatgaaagagaacggagtcgaagattgaatctgtctacgatattgacgatttggagcttacctggtaacacccggtaatcgatctatgtcttaatggtctcatccacttgctttcaaactcactaagacatctcgaccgatacgaatcatcagagaagttgacaacgctcatccaaagagtttcgatactctcaacaatcctttcaactccgtcttggccaatcaaaaacgacagaaaccacagccactaggcaacgcaacaatgccacccaaaccacctctaacacacttcctatgcatccccctcgtaactgccaaatcccgagcacagctcagcacgagcctagcagctttcaaagcagatgtcacaagcacagacagttttgccgtacccgagggtgcaatacggccgctaggtacgctgcatttgacgctcggcgttatgagtttcccgccaaatgacgaagggagacggggattaggggaggccgttgggctgttgaggagtttaagaaaaccagaagcgcagggagaagcgacagaaggaacagaagcgaaaggagagaatgagagtataagcgtaacgctaaaaggcttgcaatccatgcagcaaccctccagaaccagcattctctacgcaccgccctcagatccagaccggaagttatacgacttttgcactggcatacttacgaaattcaaagatgccgggttagtggttgaggattctaggccattattgttacatgctacgatcctaaataccatatatgtgaaggacagggacagaggtgggggtagaggtgggagaggtagagggagggataaactgacgattgatgcgaggggtatcctggaacgatatgaggattgtgtttgggctgaagatatcagcgtggataaggtggctatttgtaggatgggtgcgaagatgggtcaggatggtgaggaggcttatgaggttgaggcagaggttgacgtttaggttgagtcgcgaattgcggatttgagattatggagtttgattatgagcatacagaggcgcatcggtgtatatatatcgcgcgcgaggaattatatacccagatctgtgaatcatgccagatcccccagtctaacgacgtggtgtttctattcttatcaattcacctcaattcttgaagctctacg

SEQ ID NO: 10753 - DNA, 444 bp, Muscodor strobelii
  misc_feature: SGI cDNA ID NO. 563426
  misc_feature: Encodes the peptide sequence at SEQ ID NO 10754
atggcttccagcggccaaaacgaggatggtcatgacgcgaacatgcccgaccttggggatgccatcgatattttgactttcagccagattctcgaaatggacgatagcgaggaggatcgcgaattcagccagtctattgtctttggctttttcgagcaggcggaagagacgtttgagaagatggaccaagcccttgaagctagagatttggatgagctgtaccgtcttggacatttcttgaaagggtcctctgctaccattgggatgaccaaagtaaaagacagctgcgagaagatacagcgctatggcaaaaaggagaatgtcgacggtacccctgagaccgacgaagagctctgcctttcccgcatcaaggacaccctcaagaccgtaaagaccgagtatgccgaagcagaaacgacattgaagaaattctttggagtttaa

SEQ ID NO: 10754 - protein, 147 aa, Muscodor strobelii
  misc_feature: SGI Peptide ID NO. 563426
  misc_feature (45)..(133): Pfam Id: PF01627 Pfam Desc: Hpt domain
  misc_feature (50)..(133): Pfam Id: PF01627 Pfam Desc: Hpt domain
  misc_feature (17)..(145): NCBI GI: 256729447 Blast Desc: NECHADRAFT_84022 [Nectria haematococca mpVI 77-13-4]
  misc_feature (13)..(147): NCBI GI: 171689164 Blast Desc: protein product [Podospora anserina] gi|170944544|emb|CAP70655.1| protein product [Podospora anserina]
  misc_feature (17)..(145): NCBI GI: 39726351 Blast Desc: histidine phosphotransferase HPT1p [Gibberella moniliformis]
  misc_feature (6)..(146): NCBI GI: 156044580 Blast Desc: SS1G_10394 [Sclerotinia sclerotiorum 1980] gi|154694782|gb|EDN94520.1| SS1G_10394 [Sclerotinia sclerotiorum 1980]
  misc_feature (17)..(145): NCBI GI: 46117042 Blast Desc: FG04363.1 [Gibberella zeae PH-1]
  misc_feature (2)..(147): NCBI GI: 145612509 Blast Desc: MGG_07173 [Magnaporthe grisea 70-15] gi|145019657|gb|EDK03885.1| MGG_07173 [Magnaporthe grisea 70-15]
  misc_feature (6)..(147): NCBI GI: 154298160 Blast Desc: BC1G_12045 [Botryotinia fuckeliana B05.10] gi|150858231|gb|EDN33423.1| BC1G_12045 [Botryotinia fuckeliana B05.10]
  misc_feature (14)..(145): NCBI GI: 67523097 Blast Desc: AN2005.2 [Aspergillus nidulans FGSC A4] gi|40744750|gb|EAA63906.1| AN2005.2 [Aspergillus nidulans FGSC A4] gi|259487372|tpe|CBF85997.1| TPA: histidine-containing FGSC
  misc_feature (13)..(146): NCBI GI: 225558936 Blast Desc: conserved [Ajellomyces capsulatus G186AR]
  misc_feature (17)..(145): NCBI GI: 115492315 Blast Desc: conserved [Aspergillus terreus NIH2624] gi|114197645|gb|EAU39345.1| conserved [Aspergillus terreus NIH2624]
MASSGQNEDGHDANMPDLGDAIDILTFSQILEMDDSEEDREFSQSIVFGFFEQAEETFEKMDQALEARDLDELYRLGHFLKGSSATIGMTKVKDSCEKIQRYGKKENVDGTPETDEELCLSRIKDTLKTVKTEYAEAETTLKKFFGV

SEQ ID NO: 10755 - DNA, 2107 bp, Muscodor strobelii
  misc_feature: SGI EST ID NO. CUFF.25663.0
  misc_feature: Variant of the nucleotide sequence at SEQ ID NO 10753
tcttactcctcccccctctgtcagagaaatatccattagatctgataaactctcgtgagatcgctgtggttgcttcacgcgactcggtcctctagtggcgggcaaaaaagaatcgctgcgaatgtgaagtgcaacttgtgcagcgagttaactagcaacaactgatctacaaagagccccaactcctgaacctgtgacgtagtggttccgagctagctgagcatgcggaaatatcaactgtacctgcctccccgcgttgaactctcctgcctctcctcctcaccacgttcccgtctgtcctccatgtgtgtctcgatgcagacggttatgaggttcttaaatccacgaattgacttacatgctttgctttatctttgttctagaagaggcatcagggaagcggaaaggaacattagaatctgagctccggaccacttgctagttccaagggcagtcatgatattttcagcttgagagactccagcctccagcattacctagtattattattgacagtacccttacctctcgcaaagttgctgccgacgcgaccaacaccagccgaaccaactccccgacacttctcctcagcttccttctcctgtctcccacgcctcttcccacaccctttgctgctacctaccttgaaaagggtctcctcccctagaccagatagaccccacctaatcagtaattgagcgcattgcttgccatcataggttgctattaacagcagtcccgactggtaaaagccgccaatatttgaacccacccacacacgacctctgttccctgttatactatcccctaaattcatctccgtctcttttcgctgccattctcagctgtccctgcgaccttgtcattcgcgctactcgtcgcccctcataccgaacataaccatggcttccagcggccaaaacgaggatggtcatgacgcgaacatgcccgaccttggggatgccatcgatattttgactttcagccagattctcgaaatggacgatagcgaggaggatcgcgaattcagccagtctattgtctttggctttttcgagcaggcggaagagacgtttgagaagatggaccaagccctgtaagactgcagcgtacctacttctatattctgacacagaggatctctgtcatggccggctcgaagcgtcttctacatgcgcttgtcttcctgtgccttctcgcatcttcagactggaaccaggctgaccattcgttgtagtgaagctagagatttggatgagctgtaccgtcttggacatttcttgaaagggtcctctgctaccattgggatgaccaaagtaaaagacagctgcgagaagatacagcgctatggcaaaaaggagaatgtcgacggtacccctgagaccgacgaagagctctgcctttcccgcatcaaggacaccctcaagaccgtaaagaccgagtatgccgaagcagaaacgacattgaagaaattctttggagtttaatgccgcctcgcctctcgaacgaagtgagtaacatcgaaagagaaagagcaacagacaaacgaaaagaaaccgcgtgcttttaggcgtaggcgtgcaacacttatacccaaccgagctctgctactgcgctgtaatcggtttgccaggctggatctgaacatcatgagaaacgaaggctgttcggattgctaggcagacgggtttggtcagggggctgcattactttgtatggttttttcacttctcaaacatatgctcttcgactacccacccctacctttactgctatcatcagtcatcatccttccgatagaacttgttctattttctagaagaccgatcgtggtttgtaatgataggcgtggcatttgactgcgttgtgaggacaagccttcttgcggcactaccttcgatatagacgtgtggattattgcgacatcgggctgtcctatttggagatataggcagcggtatgaactgaagtacaaccaccaaaaaaagactactatgctggggatgacgaacgatgtgaaatgaaaatggcgaacttgcactgcttttattacattgaattacctcacgtcttcgatatatactatttgcctaggcgctgttcacgt

SEQ ID NO: 10756 - DNA, 1113 bp, Muscodor strobelii
  misc_feature: SGI cDNA ID NO. 563427
  misc_feature: Reduced expression when VOC is produced
  misc_feature: Encodes the peptide sequence at SEQ ID NO 10757
atggatgtagccaccaactacaagcagcactcgagccaagcccggcgcaagaaccgctcagcaaccaacctcaaccatctctccctcgcgcccctcaccaccaagctgcccatcaacgacttcgacgccgtccccgacttcataaccaccccgctatcccacaacccctcatatctcgtcggcaaatccgcacccacaacgccacgcctcctccaatccccctccaacacacgatccaactctccccaccgacgacgagcgtccatccccgagctcccaggcggatccgcctccctcggaaagtccaagtccacaacccacctacaagtccatcgcgcctctcgcaatggtcttggtctctcccccatcacacaccgccgtcgcccagaagacgacgaccgacgtgacagcgactgggtactccgcaccggtgtcctaatctcggctgaagcccgggaatccaagggccaagcctggctcgtatcgcggacctccgccacctctctcacgggtatgcgagatgccgacgaagaagctctcgagcgagaactagcacgtgagcgagagctcgcctcccgacgaagcagccgccatggaagcatcgcaggccacgacgaagatctaatctcgcctacgtcccgctacgggtcccgttcccactcccgcgtcggaagccgttcccagctacgcacacctctacgaactcccggcgagcggttcagcggagatgggtacttcacatcgcccactatcgatgaatctatccccggtccggacttcgtctctctagacgagaagctagaatctctggagctcgacacgagcgccgcagacgaacagaccgttcgcaaactagtcagtaggcggtctgatggcgtcggggcctggatgtggtcacttttcgctgtcgatgaggaaaatgacgaggaggaaaattctgaacccgaggatgatgaaccgggcagtggaatcccgaggagtgcaagtacggttgacttccagggtttctcgactttgcctgagctacaggtcagtcccccgcccaagggcgaacaagggacgtggcaggatgccgcatggttgctcagcgtggcgtcgaaggttttgctttag

SEQ ID NO: 10757 - protein, 370 aa, Muscodor strobelii
  misc_feature: SGI Peptide ID NO. 563427
  misc_feature (1)..(370): NCBI GI: 46117040 Blast Desc: FG04362.1 [Gibberella zeae PH-1]
  misc_feature (1)..(370): NCBI GI: 39971711 Blast Desc: MGG_07171 [Magnaporthe grisea 70-15] gi|145019653|gb|EDK03881.1| MGG_07171 [Magnaporthe grisea 70-15]
  misc_feature (1)..(370): NCBI GI: 256729448 Blast Desc: NECHADRAFT_101391 [Nectria haematococca mpVI 77-13-4]
  misc_feature (1)..(370): NCBI GI: 261356729 Blast Desc: conserved [Verticillium albo-atrum VaMs.102]
  misc_feature (1)..(370): NCBI GI: 85081651 Blast Desc: NCU01487 [Neurospora crassa OR74A] gi|28917840|gb|EAA27528.1| [Neurospora crassa OR74A]
  misc_feature (1)..(370): NCBI GI: 154315836 Blast Desc: BC1G_04490 [Botryotinia fuckeliana B05.10] gi|150846886|gb|EDN22079.1| BC1G_04490 [Botryotinia fuckeliana B05.10]
  misc_feature (1)..(370): NCBI GI: 171689166 Blast Desc: protein product [Podospora anserina] gi|170944545|emb|CAP70656.1| protein product [Podospora anserina]
  misc_feature (29)..(370): NCBI GI: 156059702 Blast Desc: SS1G_03864 [Sclerotinia sclerotiorum 1980] gi|154701650|gb|EDO01389.1| SS1G_03864 [Sclerotinia sclerotiorum 1980]
  misc_feature (23)..(370): NCBI GI: 189196234 Blast Desc: conserved [Pyrenophora tritici-repentis Pt-1C-BFP] gi|187980334|gb|EDU46960.1| conserved [Pyrenophora tritici-repentis Pt-1C-BFP]
  misc_feature (16)..(370): NCBI GI: 169773781 Blast Desc: [Aspergillus oryzae RIB40] gi|83769220|dbj|BAE59357.1| protein product [Aspergillus oryzae]
  misc_feature: Useful for introducing or modulating the production of volatile compounds
MDVATNYKQHSSQARRKNRSATNLNHLSLAPLTTKLPINDFDAVPDFITTPLSHNPSYLVGKSAPTTPRLLQSPSNTRSNSPHRRRASIPELPGGSASLGKSKSTTHLQVHRASRNGLGLSPITHRRRPEDDDRRDSDWVLRTGVLISAEARESKGQAWLVSRTSATSLTGMRDADEEALERELARERELASRRSSRHGSIAGHDEDLISPTSRYGSRSHSRVGSRSQLRTPLRTPGERFSGDGYFTSPTIDESIPGPDFVSLDEKLESLELDTSAADEQTVRKLVSRRSDGVGAWMWSLFAVDEENDEEENSEPEDDEPGSGIPRSASTVDFQGFSTLPELQVSPPPKGEQGTWQDAAWLLSVASKVLL

SEQ ID NO: 10758 - DNA, 2023 bp, Muscodor strobelii
  misc_feature: SGI EST ID NO. CUFF.25445.0
  misc_feature: Variant of the nucleotide sequence at SEQ ID NO 10756
gtactgcagtggttgcaagtgtgcatttgcctcggtttcggctacttggaaaggatggatgagaggcaaaagtcacattatgactggtcgaagcttacgtgaagtatgcaccaacgttgaagatctcgaaggtctcgaattgtcttctctgttaagtctgtcccctgccatgcgccctgaaaagcttcagggcgtgccgaccagatctgcatatccgcataccaccactacactattcccaatcccatccagggccaccttctgccccagactcgggcgtctcgacttctcgatcacttattagcactgctgcactactacatacttcgtgtgtcattagaccacaccaccgcacatccaaacatacgatcccgttccatccaatcccaccgtcattgggcaccttaccgccgccctccttctatctcgtacgacctcaattcatcgccttgaataatcactattaactcaaaacacagctttcaaccaccaccagtcaatcaagcaagctcttattagacaggaacgaatactgattgggattcattggaattcaacatcaactccatcaccatggatgtagccaccaactacaagcagcactcgagccaagcccggcgcaagaaccgctcagcaaccaacctcaaccatctctccctcgcgcccctcaccaccaagctgcccatcaacgacttcgacgccgtccccgacttcataaccaccccgctatcccacaacccctcatatctcgtcggcaaatccgcacccacaacgccacgcctcctccaatccccctccaacacacgatccaactctccccaccgacgacgagcgtccatccccgagctcccaggcggatccgcctccctcggaaagtccaagtccacaacccacctacaagtccatcgcgcctctcgcaatggtcttggtctctcccccatcacacaccgccgtcgcccagaagacgacgaccgacgtgacagcgactgggtactccgcaccggtgtcctaatctcggctgaagcccgggaatccaagggccaagcctggctcgtatcgcggacctccgccacctctctcacgggtatgcgagatgccgacgaagaagctctcgagcgagaactagcacgtgagcgagagctcgcctcccgacgaagcagccgccatggaagcatcgcaggccacgacgaagatctaatctcgcctacgtcccgctacgggtcccgttcccactcccgcgtcggaagccgttcccagctacgcacacctctacgaactcccggcgagcggttcagcggagatgggtacttcacatcgcccactatcgatgaatctatccccggtccggacttcgtctctctagacgagaagctagaatctctggagctcgacacgagcgccgcagacgaacagaccgttcgcaaactagtcagtaggcggtctgatggcgtcggggcctggatgtggtcacttttcgctgtcgatgaggaaaatgacgaggaggaaaattctgaacccgaggatgatgaaccgggcagtggaatcccgaggagtgcaagtacggttgacttccagggtttctcgactttgcctgagctacaggtcagtcccccgcccaagggcgaacaagggacgtggcaggatgccgcatggttgctcagcgtggcgtcgaaggttttgctttaggagcgggattaaagaagtgattgtatcgatcatgctctattgatgggattaggatgctcctgctgctccacggagtacgcaggcaagtatatatctattgccctgcggaagttcgccagattcgacaattgtgtgatgagccatgagttttaatggtgtttggttttttgtattatactactatatactgaaagggcaggctggaaaataatacggagtatgaacgaacccaaagacgagataggaaaaagccaccttaggaggctaaaaatagaatgacctgtttaaggatgcctatcgttaatctcacctgaaagtagtcaagatacgatacagc

SEQ ID NO: 10759 - DNA, 4005 bp, Muscodor strobelii
  misc_feature: SGI cDNA ID NO. 563428
  misc_feature: Encodes the peptide sequence at SEQ ID NO 10760
atgcggaatcttcggaatattaagtttaacacctggcacgtcggctcggatttcgatggcgaatttgccattacgtcgacctgctgggacccggccaaagatgaacttttatgcaccctgggtccgagtgagctagaggggcgcattcggctcctgagaattcgcgagcatgtgagagcctcttcggtagatattgaatgtcaagaagttgcctcctgggttgctccaagccccaaccctgaccttgctgtcgacagaatagtgagtctgcatcactttgcagatagcttgacaacatgtcttgttctcgaaggaggcgatattgtcatcgttcgagagtcagaaggtctcaccccgtctgatggcgtgcacatagaaatcattggtggcatcgatgagggcatcaccgctgcgagctggtcacctgatgaggagctcttggttattactaccaaggcgaacacgggtgtgttcatgagccgcagcttcgatggcgttaccgatatgatcatgactgctgaagacctcaaagcttccaaacatgtttctgtaggttggggcaaaaaggagacccagtttcagggcaggggtgccaaagcactcagagacccgaccataccagagaaagtcgaccagggtgtcataagttccaaggacgatggtagcacaacgatcagttggagaggcgacggagcctatgtcgccatcagctcgattgaatctggtattcgcagagtcatacgagtgtattctcgagatggcgtcctcgacagtgttaccgaacccgtcgatcatatggaaagcgcattgagttggcgcccatctggtaacttgatggccagcatccaaagacttgaggaccgagtcgatgtgatattcttcgagcggaatggcctgagacatggtcaattctcattgcgaaaccctgacggcaggactcttggcggcgacagaatacagttagcatggaattcagactcaaccgtgcttgcggtgacattgaacgacagagttcagctctggacaatgggaaattaccattggtatctaaagcaggagatctctacagagagtcagccaagcaaagtgacttggcatccagagaaggcattacgctttggtgttgccgcctcagataagtcgtcacgaatttgcatcaatgataacgtttctcatagaggtataggtaagctcctgcaagcggagtatatattggaaatagccaaaggctcgctcgtcccgccgtatgattacggcgcaacggcagtcattgatggccagatcctcaagattacccctttccgaacctcaaacattccaccacccatggccatgtttgaacttcaatcttcgtcaccaatcgctgatgttgcattctcgcccgccaacactttcatggctgttctccatcagacaggcgtggacttatacgagtggaccaccaaggaatctaggtcattgaagccacgacttcttggcacttcaatattcagcaaagaagaatcagggaaacgtctactacctcttcaaattaccatcacagaaagtctctctatccattgcctatgctctggtgcagggcctatcatacattcacagacttttgaccagccaagtggggaatttgcagtcggagaaagcatatatgccggtgccatgttcggatttactcgcttgacgcaaggttcctcgactggtgttattgctcaagatctgtccggcagattccatggcgtcgataatgagacagatgatctgttctctgtgcgccataattcccagctcccgtggagtgagatgatcgacttggcaggcaatgtcattgcggttggtctctctcgcaatggacatctatacgcaaacactcgtctcttggtcaagaactgcacctcattcctcattacaccggctcatctaataatcacgacaactaatcactttctcaaattcattcacttgactgatgtggactctttggagattcctccagatgatcctgaaagggacgaaagatgcagaagtgtcgagagaggagccaggctcgtgacagcaatgccaacgaatatgagtatagtcttacagatgcctcgtggcaatctcgagacaatcttccctagagccatggtcgttgctggcatccgaaaactaattgaagcccttgattacaagaaagccttcgccgtctgcagaactcagcgggtagatatgaacattctttgcgatcaccagcctagccaatttttcgccaatgtcgggcttttcttagaccagattgaggatgtcgccaacatagatctctttttatcatctctgcgcgatgaggatgttacgcagaccatgtaccgagacacaaagatatcaacagaccaggcagcaccaacagaatcccaattgagtattacgggagacaaatcctccaaggtaaactccatctgtgactcagtactatcgcatcttcaagtacgtgaaaccaaagaccacggaatactacagaacatcatcactgccaacatctgcaaatcgcctccagcatttgaagacggcctccttgtcgtcgctacactaatgacagagaacgagcaactggcggagaaagccgtcgagcatatctgcttcttggcagatgtgaatactctgtatgacgaggctctcgggctctacaatctagaccttgctctgctcgtggcccaacaatcgcagagagatcctcgagaatacctccctttcatccaaaatctccaccaactccccgaactacgacgaaaattcgctatcgacgaccaccttaacagacacattaaggcactatgctacctgcaagagatgcaagcccacaaagaagcccaagactacacagtcaaacatgtcctctatgccaatgcccttcaactctaccgctacgacacaacaaatctcaccatacttcgaggattgtatgccacgtatctagaatcaaagtcgaagttccgcgaagcgggcttaacatacgaatcactccacgactactccggcgcaacgcgttgctaccgacaggcaggcgtctcctgctggcgcgaatgtctatttgtagcccctcagcagacccctccgccttccccagaggtgatggaagagctagccaagaccctcgccgaagcagtcttcgaagccaaggactatgctgcggccgctacgatccacctagagcatctacactctctcgaagctgcgatcccgtgcttctgtaaggggtacttattcgcagatgccatgcgtctctgcatccaacaccagcgttccgatcttctgcctactctcctcgacacgggtcttgcggacgcactgggaagtagcacggagttcctggcagactgtaaagcacagctcggcgctcaagtcccgcggatcgctgagcttcggaggaaagccgctgaggacccattagctttctatgaaggtgagagagccggcggcgctgatgtaccggacgatgtttccatcgctgcgtcttcgagagctggcgcgagtctgttcacgaggtacacggggaagaatgcagggggcagcgtggggaccctgggtacgggggttagtagagcgacgagtaagaataggaagagagaggagaagaagagggcgagagggagaaagggaacggtgtatgaggaggagtatctggtgaattctgtcaggagacttgtcgagagggtcgagactacgaggcaggagattgagaggttggttgaggggttggtgaggaggggcatggttgatagggcgagggcgctggaacaactagagagtgaggttgttgatgcgtgccagcagagtgttaaacaggttttccctgggaagaagaatcaggagggtgaagatgatgggaaagcggatgggggcgtagggggtgaggaggagtttagacctgttggggcggatgccgtgcttgctgagacgctggaggcgaattggaggaggcaggagccgcctgtcattagggcttttgagaggctttctctgcttggctga

SEQ ID NO: 10760 - protein, 1334 aa, Muscodor strobelii
  misc_feature: SGI Peptide ID NO. 563428
  misc_feature (1)..(943): Pfam Id: PF04762 Pfam Desc: IKI3 family
  misc_feature (605)..(943): Pfam Id: PF04762 Pfam Desc: IKI3 family
  misc_feature (71)..(372): Pfam Id: PF04762 Pfam Desc: IKI3 family
  misc_feature (415)..(460): Pfam Id: PF04762 Pfam Desc: IKI3 family
  misc_feature (1)..(1334): NCBI GI: 46117038 Blast Desc: FG04361.1 [Gibberella zeae PH-1]
  misc_feature (1)..(1334): NCBI GI: 256729244 Blast Desc: [Nectria haematococca mpVI 77-13-4]
  misc_feature (1)..(1334): NCBI GI: 145612511 Blast Desc: MGG_07174 [Magnaporthe grisea 70-15] gi|145019658|gb|EDK03886.1| MGG_07174 [Magnaporthe grisea 70-15]
  misc_feature (1)..(1334): NCBI GI: 85081647 Blast Desc: NCU01486 [Neurospora crassa OR74A] gi|28917839|gb|EAA27527.1| conserved [Neurospora crassa OR74A]
  misc_feature (103)..(1334): NCBI GI: 171689168 Blast Desc: protein product [Podospora anserina] gi|170944546|emb|CAP70657.1| protein product [Podospora anserina]
  misc_feature (1)..(1155): NCBI GI: 261356730 Blast Desc: elongator complex protein [Verticillium albo-atrum VaMs.102]
  misc_feature (1)..(1295): NCBI GI: 145256807 Blast Desc: An04g01550 [Aspergillus niger] gi|134058431|emb|CAK47918.1| protein product [Aspergillus niger]
  misc_feature (1)..(1334): NCBI GI: 240107918 Blast Desc: IKI3 family protein [Coccidioides posadasii C735 delta SOWgp]
  misc_feature (1)..(1334): NCBI GI: 261206462 Blast Desc: IKI3 family protein [Ajellomyces dermatitidis SLH14081] gi|239593027|gb|EEQ75608.1| IKI3 family protein [Ajellomyces dermatitidis SLH14081]
  misc_feature (1)..(1334): NCBI GI: 239610799 Blast Desc: IKI3 family protein [Ajellomyces dermatitidis ER-3]
MRNLRNIKFNTWHVGSDFDGEFAITSTCWDPAKDELLCTLGPSELEGRIRLLRIREHVRASSVDIECQEVASWVAPSPNPDLAVDRIVSLHHFADSLTTCLVLEGGDIVIVRESEGLTPSDGVHIEIIGGIDEGITAASWSPDEELLVITTKANTGVFMSRSFDGVTDMIMTAEDLKASKHVSVGWGKKETQFQGRGAKALRDPTIPEKVDQGVISSKDDGSTTISWRGDGAYVAISSIESGIRRVIRVYSRDGVLDSVTEPVDHMESALSWRPSGNLMASIQRLEDRVDVIFFERNGLRHGQFSLRNPDGRTLGGDRIQLAWNSDSTVLAVTLNDRVQLWTMGNYHWYLKQEISTESQPSKVTWHPEKALRFGVAASDKSSRICINDNVSHRGIGKLLQAEYILEIAKGSLVPPYDYGATAVIDGQILKITPFRTSNIPPPMAMFELQSSSPIADVAFSPANTFMAVLHQTGVDLYEWTTKESRSLKPRLLGTSIFSKEESGKRLLPLQITITESLSIHCLCSGAGPIIHSQTFDQPSGEFAVGESIYAGAMFGFTRLTQGSSTGVIAQDLSGRFHGVDNETDDLFSVRHNSQLPWSEMIDLAGNVIAVGLSRNGHLYANTRLLVKNCTSFLITPAHLIITTTNHFLKFIHLTDVDSLEIPPDDPERDERCRSVERGARLVTAMPTNMSIVLQMPRGNLETIFPRAMVVAGIRKLIEALDYKKAFAVCRTQRVDMNILCDHQPSQFFANVGLFLDQIEDVANIDLFLSSLRDEDVTQTMYRDTKISTDQAAPTESQLSITGDKSSKVNSICDSVLSHLQVRETKDHGILQNIITANICKSPPAFEDGLLVVATLMTENEQLAEKAVEHICFLADVNTLYDEALGLYNLDLALLVAQQSQRDPREYLPFIQNLHQLPELRRKFAIDDHLNRHIKALCYLQEMQAHKEAQDYTVKHVLYANALQLYRYDTTNLTILRGLYATYLESKSKFREAGLTYESLHDYSGATRCYRQAGVSCWRECLFVAPQQTPPPSPEVMEELAKTLAEAVFEAKDYAAAATIHLEHLHSLEAAIPCFCKGYLFADAMRLCIQHQRSDLLPTLLDTGLADALGSSTEFLADCKAQLGAQVPRIAELRRKAAEDPLAFYEGERAGGADVPDDVSIAASSRAGASLFTRYTGKNAGGSVGTLGTGVSRATSKNRKREEKKRARGRKGTVYEEEYLVNSVRRLVERVETTRQEIERLVEGLVRRGMVDRARALEQLESEVVDACQQSVKQVFPGKKNQEGEDDGKADGGVGGEEEFRPVGADAVLAETLEANWRRQEPPVIRAFERLSLLG

SEQ ID NO: 10761 - DNA, 6736 bp, Muscodor strobelii
  misc_feature: SGI EST ID NO. CUFF.25860.0
  misc_feature: Variant of the nucleotide sequence at SEQ ID NO 10759
agaactcgtcggagttgagagggtcaaacgccaccagcccgggtcattctgaataattcccacacgatgcggaatcttcggaatattaagtttaacacctggcacgtcggctcggatttcgatggcgaatttgccattacgtcgacctgctgggacccggccaaagatgaacttttatgcaccctgggtccgagtgagctagaggggcgcattcggctcctgagaattcgcgagcatgtgagagcctcttcggtagatattgaatgtcaagaagttgcctcctgggttgctccaagccccaaccctgaccttgctgtcgacagaatagtgagtctgcatcactttgcagatagcttgacaacatgtcttgttctcgaaggaggcgatattgtcatcgttcgagagtcagaaggtctcaccccgtctgatggcgtgcacatagaaatcattggtggcatcgatgagggcatcaccgctgcgagctggtcacctgatgaggagctcttggttattactaccaaggcgaacacgggtgtgttcatgagccgcagcttcgatggcgttaccgatatgatcatgactgctgaagacctcaaagcttccaaacatgtttctgtaggttggggcaaaaaggagacccagtttcagggcaggggtgccaaagcactcagagacccgaccataccagagaaagtcgaccagggtgtcataagttccaaggacgatggtagcacaacgatcagttggagaggcgacggagcctatgtcgccatcagctcgattgaatctggtattcgcagagtcatacgagtgtattctcgagatggcgtcctcgacagtgttaccgaacccgtcgatcatatggaaagcgcattgagttggcgcccatctggtaacttgatggccagcatccaaagacttgaggaccgagtcgatgtgatattcttcgagcggaatggcctgagacatggtcaattctcattgcgaaaccctgacggcaggactcttggcggcgacagaatacagttagcatggaattcagactcaaccgtgcttgcggtgacattgaacgacagagttcagctctggacaatgggaaattaccattggtatctaaagcaggagatctctacagagagtcagccaagcaaagtgacttggcatccagagaaggcattacgctttggtgttgccgcctcagataagtcgtcacgaatttgcatcaatgataacgtttctcatagaggtataggtaagctcctgcaagcggagtatatattggaaatagccaaaggctcgctcgtcccgccgtatgattacggcgcaacggcagtcattgatggccagatcctcaagattacccctttccgaacctcaaacattccaccacccatggccatgtttgaacttcaatcttcgtcaccaatcgctgatgttgcattctcgcccgccaacactttcatggctgttctccatcagacaggcgtggacttatacgagtggaccaccaaggaatctaggtcattgaagccacgacttcttggcacttcaatattcagcaaagaagaatcagggaaacgtctactacctcttcaaattaccatcacagaaagtctctctatccattgcctatgctctggtgcagggcctatcatacattcacagacttttgaccagccaagtggggaatttgcagtcggagaaagcatatatgccggtgccatgttcggatttactcgcttgacgcaaggttcctcgactggtgttattgctcaagatctgtccggcagattccatggcgtcgataatgagacagatgatctgttctctgtgcgccataattcccagctcccgtggagtgagatgatcgacttggcaggcaatgtcattgcggttggtctctctcgcaatggacatctatacgcaaacactcgtctcttggtcaagaactgcacctcattcctcattacaccggctcatctaataatcacgacaactaatcactttctcaaattcattcacttgactgatgtggactctttggagattcctccagatgatcctgaaagggacgaaagatgcagaagtgtcgagagaggagccaggctcgtgacagcaatgccaacgaatatgagtatagtcttacagatgcctcgtggcaatctcgagacaatcttccctagagccatggtcgttgctggcatccgaaaactaattgaagcccttgattacaagaaagccttcgccgtctgcagaactcagcgggtagatatgaacattctttgcgatcaccagcctagccaatttttcgccaatgtcgggcttttcttagaccagattgaggatgtcgccaacatagatctctttttatcatctctgcgcgatgaggatgttacgcagaccatgtaccgagacacaaagatatcaacagaccaggcagcaccaacagaatcccaattgagtattacgggagacaaatcctccaaggtaaactccatctgtgactcagtactatcgcatcttcaagtacgtgaaaccaaagaccacggaatactacagaacatcatcactgccaacatctgcaaatcgcctccagcatttgaagacggcctccttgtcgtcgctacactaatgacagagaacgagcaactggcggagaaagccgtcgagcatatctgcttcttggcagatgtgaatactctgtatgacgaggctctcgggctctacaatctagaccttgctctgctcgtggcccaacaatcgcagagagatcctcgagaatacctccctttcatccaaaatctccaccaactccccgaactacgacgaaaattcgctatcgacgaccaccttaacagacacattaaggcactatgctacctgcaagagatgcaagcccacaaagaagcccaagactacacagtcaaacatgtcctctatgccaatgcccttcaactctaccgctacgacacaacaaatctcaccatacttcgaggattgtatgccacgtatctagaatcaaagtcgaagttccgcgaagcgggcttaacatacgaatcactccacgactactccggcgcaacgcgttgctaccgacaggcaggcgtctcctgctggcgcgaatgtctatttgtagcccctcagcagacccctccgccttccccagaggtgatggaagagctagccaagaccctcgccgaagcagtcttcgaagccaaggactatgctgcggccgctacgatccacctagagcatctacactctctcgaagctgcgatcccgtgcttctgtaaggggtacttattcgcagatgccatgcgtctctgcatccaacaccagcgttccgatcttctgcctactctcctcgacacgggtcttgcggacgcactgggaagtagcacggagttcctggcagactgtaaagcacagctcggcgctcaagtcccgcggatcgctgagcttcggaggaaagccgctgaggacccattagctttctatgaaggtgagagagccggcggcgctgatgtaccggacgatgtttccatcgctgcgtcttcgagagctggcgcgagtctgttcacgaggtacacggggaagaatgcagggggcagcgtggggaccctgggtacgggggttagtagagcgacgagtaagaataggaagagagaggagaagaagagggcgagagggagaaagggaacggtgtatgaggaggagtatctggtgaattctgtcaggagacttgtcgagagggtcgagactacgaggcaggagattgagaggttggttgaggggttggtgaggaggggcatggttgatagggcgagggcgctggaacaactagagagtgaggttgttgatgcgtgccagcagagtgttaaacaggttttccctgggaagaagaatcaggagggtgaagatgatgggaaagcggatgggggcgtagggggtgaggaggagtttagacctgttggggcggatgccgtgcttgctgagacgctggaggcgaattggaggaggcaggagccgcctgtcattagggcttttgagaggctttctctgcttggctgagatatgagatatgaagcatgaggtatgaggatatgggtgagaaaggaaaacggcacgcgcgaggcatgaaaaggggtcataaaaggggacacggctgagaaggggttgggtgatagatagacctactagcccgactagctaagtgctatatgaatgaattatcatacacttaaactttgatgattagggaaggtcgtgaacggaaaacattgatcagagaattttgatcaggaggcaatcaggagtagtagactgctttggcgaacctgtcttttttctcttctgagtacacctgaagggattgtatccctcataagaaaacgtatgcgaatactcagaataatgttgaaactagggcccatcaagcatcttttttgatggtaggtagtgtccaaacactcaaatctatacacgtagtatacaaagccctcagactcttcaattcctatacatccatgccgtaaaattacgagccaaaaaaacaagacttgctcaatgcttactgtcgttttgttctaatgccaacctatacccaggtccatgtctaatggcgaaaaacccaagcgccaatatgactataatgatatcaaaatcctcgcggaactcgcagaattgatgccttatacgcacttcgcagtctcgccctctcctaaaatcaagttagcaaaccaatcagtcctgagattcacaccaccgctcattcaaaattgacggagtactcacctttaataatcttcccaacagcctggagaacactgataaacataacgacacacccaaacgcgacaaccgccccagcaacatacgtcctccagctcctggaggacaacctgatataacaaagcggcggcaaaatatacgccagcgcacacgcactcgtcgcgcccacaagttcgaaaacaatgcctaaatcacacgtaaacagactaatcgccatggcactgaccaccagcgccgagctatagatcagatgcaagttcatgttgaacggttcgtcggggaaccagtaattcagcatcacttctctgcagacgaatgcttctagcggtagagtggtgagcatattcagtccgaagaataggcgcgcgatcgtcaccattgtgttttctgctgggaagttgttgaggacgttgccgagggttttgtcgccgaaggttaggaatcctgctagtgccatggtgaggcaggccagcatggatacgccggtcgagtagtgggttacggttgcgaagcggtcgattgtgggggttttcagggagccgtagattaggagggagttgtgttggcagacgaatgctgcggaaatagaagtcagtaaaagggtcttgaaataggggcaggagtatggagaggtgcaaataccgaacgagataaccccaatggcttggaatatcccctcgttgatcgtgagtaagggcgtagtaaaagagccgcgttctgataggggcacgagagcaccttgtatgacgaccgtcgcgatgatgacacacatgctgatgagggcgagcgtacttgctttcgccagctatcaaaccaacatcagtactgccaatctccatcttctcccccaagctaaacataccttcgcaatatccctataaagcgtcagaggataactgatgcccagaataaaaatcgcaataacagcctgtctattccccaacaaccaaagcacgggcagacttccaatatccggccatatagctcgaaaaacaggcggtatgctatcccccacaataacaccaaacgccaccatgcctccaaatgcaaaagcccactgcgcaacactgatagcgatcaatcccgtcttgccaaagcagtgttcgactgtcccctggaagctggaagcaccagataacttgctattgatgacaatcaatcttatcgtccagtccacaacgattgtcagggagatgaggagcacaatccccgcgacgagccccgcatctttgaatgcgtatggctgcccgatgatcccggcgcctatgatgctgttcgccatattcatgaacgccgagcttaagccagacttgggacgcgcgcgttcgcgctccgcgaacgagtggatgtcgtcttctgcatcgaggctattcgcgaccgtcacagagggcgcctcgatatccgtgagtagtggccggcgggatgtgcgttcgacgggagaatcgggagattggacgtcgaagtaatcgctcggcgcatggccattgggtggtgggatttccgtcgtgttgaggtcgaagcgcactctgttcggtgtcctgggtgtgcgcgcatcttgatcggtgggagaatggccagggtgcacgatgatcccgtcttcgtcgtcgtcggactcgtgacccgcgagcaggccgtgctcttcttcgttccgcgggggagcggcgttgccgttggggggtggcgagctgcccttggccattttctgcgatggctgattctatcttggcattttaggtttttgtgttggactgtccggctgggggggagcagacgaggcgcattggcgtgagctgagattgtcgtgttatgtaagttcgcgataatccatacaagtcgtttcaattcccaaattcctacgacatcggtacgaaggtacttccgagctccccgttgtaagtccttatcgtcatgtgacggattgcactgtactgggagttaggccgtg

SEQ ID NO: 10762 - DNA, 1602 bp, Muscodor strobelii
  misc_feature: SGI cDNA ID NO. 563429
  misc_feature: Reduced expression when VOC is produced
  misc_feature: Encodes the peptide sequence at SEQ ID NO 10763
atggccaagggcagctcgccaccccccaacggcaacgccgctcccccgcggaacgaagaagagcacggcctgctcgcgggtcacgagtccgacgacgacgaagacgggatcatcgtgcaccctggccattctcccaccgatcaagatgcgcgcacacccaggacaccgaacagagtgcgcttcgacctcaacacgacggaaatcccaccacccaatggccatgcgccgagcgattacttcgacgtccaatctcccgattctcccgtcgaacgcacatcccgccggccactactcacggatatcgaggcgccctctgtgacggtcgcgaatagcctcgatgcagaagacgacatccactcgttcgcggagcgcgaacgcgcgcgtcccaagtctggcttaagctcggcgttcatgaatatggcgaacagcatcataggcgccgggatcatcgggcagccatacgcattcaaagatgcggggctcgtcgcggggattgtgctcctcatctccctgacaatcgttgtggactggacgataagattgattgtcatcaatagcaagttatctggtgcttccagcttccaggggacagtcgaacactgctttggcaagacgggattgatcgctatcagtgttgcgcagtgggcttttgcatttggaggcatggtggcgtttggtgttattgtgggggatagcataccgcctgtttttcgagctatatggccggatattggaagtctgcccgtgctttggttgttggggaatagacaggctgttattgcgatttttattctgggcatcagttatcctctgacgctttatagggatattgcgaagctggcgaaagcaagtacgctcgccctcatcagcatgtgtgtcatcatcgcgacggtcgtcatacaaggtgctctcgtgcccctatcagaacgcggctcttttactacgcccttactcacgatcaacgaggggatattccaagccattggggttatctcgttcgcattcgtctgccaacacaactccctcctaatctacggctccctgaaaacccccacaatcgaccgcttcgcaaccgtaacccactactcgaccggcgtatccatgctggcctgcctcaccatggcactagcaggattcctaaccttcggcgacaaaaccctcggcaacgtcctcaacaacttcccagcagaaaacacaatggtgacgatcgcgcgcctattcttcggactgaatatgctcaccactctaccgctagaagcattcgtctgcagagaagtgatgctgaattactggttccccgacgaaccgttcaacatgaacttgcatctgatctatagctcggcgctggtggtcagtgccatggcgattagtctgtttacgtgtgatttaggcattgttttcgaacttgtgggcgcgacgagtgcgtgtgcgctggcgtatattttgccgccgctttgttatatcaggttgtcctccaggagctggaggacgtatgttgctggggcggttgtcgcgtttgggtgtgtcgttatgtttatcagtgttctccaggctgttgggaagattattaaaggagagggcgagactgcgaagtgcgtataa

SEQ ID NO: 10763 - protein, 533 aa, Muscodor strobelii
  misc_feature: SGI Peptide ID NO. 563429
  misc_feature (129)..(520): Pfam Id: PF01490 Pfam Desc: Transmembrane amino acid transporter protein
  misc_feature (12)..(532): NCBI GI: 46117112 Blast Desc: FG04398.1 [Gibberella zeae PH-1]
  misc_feature (28)..(533): NCBI GI: 261356734 Blast Desc: vacuolar amino acid transporter 2 [Verticillium albo-atrum VaMs.102]
  misc_feature (12)..(532): NCBI GI: 256729271 Blast Desc: [Nectria haematococca mpVI 77-13-4]
  misc_feature (2)..(483): NCBI GI: 156059758 Blast Desc: SS1G_03892 [Sclerotinia sclerotiorum 1980] gi|154701678|gb|EDO01417.1| SS1G_03892 [Sclerotinia sclerotiorum 1980]
  misc_feature (18)..(532): NCBI GI: 169604516 Blast Desc: SNOG_05272 [Phaeosphaeria nodorum SN15] gi|111066543|gb|EAT87663.1| SNOG_05272 [Phaeosphaeria nodorum SN15]
  misc_feature (1)..(532): NCBI GI: 238838659 Blast Desc: amino acid transporter [Microsporum canis CBS 113480]
  misc_feature (18)..(499): NCBI GI: 116205007 Blast Desc: CHGG_10387 [Chaetomium globosum CBS 148.51] gi|88176515|gb|EAQ83983.1| CHGG_10387 [Chaetomium globosum CBS 148.51]
  misc_feature (10)..(532): NCBI GI: 212528502 Blast Desc: amino acid transporter, [Penicillium marneffei ATCC 18224] gi|210073806|gb|EEA27893.1| amino acid transporter, [Penicillium marneffei ATCC 18224]
  misc_feature (17)..(532): NCBI GI: 240107936 Blast Desc: Transmembrane amino acid transporter family protein [Coccidioides posadasii C735 delta SOWgp]
  misc_feature (3)..(532): NCBI GI: 67528460 Blast Desc: AN4428.2 [Aspergillus nidulans FGSC A4] gi|40741003|gb|EAA60193.1| AN4428.2 [Aspergillus nidulans FGSC A4] gi|259482758|tpe|CBF77543.1| TPA: amino acid transporter FGSC
  misc_feature: Useful for introducing or modulating the production of volatile compounds
MAKGSSPPPNGNAAPPRNEEEHGLLAGHESDDDEDGIIVHPGHSPTDQDARTPRTPNRVRFDLNTTEIPPPNGHAPSDYFDVQSPDSPVERTSRRPLLTDIEAPSVTVANSLDAEDDIHSFAERERARPKSGLSSAFMNMANSIIGAGIIGQPYAFKDAGLVAGIVLLISLTIVVDWTIRLIVINSKLSGASSFQGTVEHCFGKTGLIAISVAQWAFAFGGMVAFGVIVGDSIPPVFRAIWPDIGSLPVLWLLGNRQAVIAIFILGISYPLTLYRDIAKLAKASTLALISMCVIIATVVIQGALVPLSERGSFTTPLLTINEGIFQAIGVISFAFVCQHNSLLIYGSLKTPTIDRFATVTHYSTGVSMLACLTMALAGFLTFGDKTLGNVLNNFPAENTMVTIARLFFGLNMLTTLPLEAFVCREVMLNYWFPDEPFNMNLHLIYSSALVVSAMAISLFTCDLGIVFELVGATSACALAYILPPLCYIRLSSRSWRTYVAGAVVAFGCVVMFISVLQAVGKIIKGEGETAKCV

SEQ ID NO: 10764 - DNA, 4039 bp, Muscodor strobelii
  misc_feature: SGI EST ID NO. CUFF.25861.1
  misc_feature: Variant of the nucleotide sequence at SEQ ID NO 10762
ggattatcgcgaacttacataacacgacaatctcagctcacgccaatgcgcctcgtctgctcccccccagccggacagtccaacacaaaaacctaaaatgccaagatagaatcagccatcgcagaaaatggccaagggcagctcgccaccccccaacggcaacgccgctcccccgcggaacgaagaagagcacggcctgctcgcgggtcacgagtccgacgacgacgaagacgggatcatcgtgcaccctggccattctcccaccgatcaagatgcgcgcacacccaggacaccgaacagagtgcgcttcgacctcaacacgacggaaatcccaccacccaatggccatgcgccgagcgattacttcgacgtccaatctcccgattctcccgtcgaacgcacatcccgccggccactactcacggatatcgaggcgccctctgtgacggtcgcgaatagcctcgatgcagaagacgacatccactcgttcgcggagcgcgaacgcgcgcgtcccaagtctggcttaagctcggcgttcatgaatatggcgaacagcatcataggcgccgggatcatcgggcagccatacgcattcaaagatgcggggctcgtcgcggggattgtgctcctcatctccctgacaatcgttgtggactggacgataagattgattgtcatcaatagcaagttatctggtgcttccagcttccaggggacagtcgaacactgctttggcaagacgggattgatcgctatcagtgttgcgcagtgggcttttgcatttggaggcatggtggcgtttggtgttattgtgggggatagcataccgcctgtttttcgagctatatggccggatattggaagtctgcccgtgctttggttgttggggaatagacaggctgttattgcgatttttattctgggcatcagttatcctctgacgctttatagggatattgcgaagctggcgaaagcaagtacgctcgccctcatcagcatgtgtgtcatcatcgcgacggtcgtcatacaaggtgctctcgtgcccctatcagaacgcggctcttttactacgcccttactcacgatcaacgaggggatattccaagccattggggttatctcgttcgcattcgtctgccaacacaactccctcctaatctacggctccctgaaaacccccacaatcgaccgcttcgcaaccgtaacccactactcgaccggcgtatccatgctggcctgcctcaccatggcactagcaggattcctaaccttcggcgacaaaaccctcggcaacgtcctcaacaacttcccagcagaaaacacaatggtgacgatcgcgcgcctattcttcggactgaatatgctcaccactctaccgctagaagcattcgtctgcagagaagtgatgctgaattactggttccccgacgaaccgttcaacatgaacttgcatctgatctatagctcggcgctggtggtcagtgccatggcgattagtctgtttacgtgtgatttaggcattgttttcgaacttgtgggcgcgacgagtgcgtgtgcgctggcgtatattttgccgccgctttgttatatcaggttgtcctccaggagctggaggacgtatgttgctggggcggttgtcgcgtttgggtgtgtcgttatgtttatcagtgttctccaggctgttgggaagattattaaaggagagggcgagactgcgaagtgcgtataaggcatcaattctgcgagttccgcgaggattttgatatcattatagtcatattggcgcttgggtttttcgccattagacatggacctgggtataggttggcattagaacaaaacgacagtaagcattgagcaagtcttgtttttttggctcgtaattttacggcatggatgtataggaattgaagagtctgagggctttgtatactacgtgtatagatttgagtgtttggacactacctaccatcaaaaaagatgcttgatgggccctagtttcaacattattctgagtattcgcatacgttttcttatgagggatacaatcccttcaggtgtactcagaagagaaaaaagacaggttcgccaaagcagtctactactcctgattgcctcctgatcaaaattctctgatcaatgttttccgttcacgaccttccctaatcatcaaagtttaagtgtatgataattcattcatatagcacttagctagtcgggctagtaggtctatctatcacccaaccccttctcagccgtgtccccttttatgaccccttttcatgcctcgcgcgtgccgttttcctttctcacccatatcctcatacctcatgcttcatatctcatatctcagccaagcagagaaagcctctcaaaagccctaatgacaggcggctcctgcctcctccaattcgcctccagcgtctcagcaagcacggcatccgccccaacaggtctaaactcctcctcaccccctacgcccccatccgctttcccatcatcttcaccctcctgattcttcttcccagggaaaacctgtttaacactctgctggcacgcatcaacaacctcactctctagttgttccagcgccctcgccctatcaaccatgcccctcctcaccaacccctcaaccaacctctcaatctcctgcctcgtagtctcgaccctctcgacaagtctcctgacagaattcaccagatactcctcctcatacaccgttccctttctccctctcgccctcttcttctcctctctcttcctattcttactcgtcgctctactaacccccgtacccagggtccccacgctgccccctgcattcttccccgtgtacctcgtgaacagactcgcgccagctctcgaagacgcagcgatggaaacatcgtccggtacatcagcgccgccggctctctcaccttcatagaaagctaatgggtcctcagcggctttcctccgaagctcagcgatccgcgggacttgagcgccgagctgtgctttacagtctgccaggaactccgtgctacttcccagtgcgtccgcaagacccgtgtcgaggagagtaggcagaagatcggaacgctggtgttggatgcagagacgcatggcatctgcgaataagtaccccttacagaagcacgggatcgcagcttcgagagagtgtagatgctctaggtggatcgtagcggccgcagcatagtccttggcttcgaagactgcttcggcgagggtcttggctagctcttccatcacctctggggaaggcggaggggtctgctgaggggctacaaatagacattcgcgccagcaggagacgcctgcctgtcggtagcaacgcgttgcgccggagtagtcgtggagtgattcgtatgttaagcccgcttcgcggaacttcgactttgattctagatacgtggcatacaatcctcgaagtatggtgagatttgttgtgtcgtagcggtagagttgaagggcattggcatagaggacatgtttgactgtgtagtcttgggcttctttgtgggcttgcatctcttgcaggtagcatagtgccttaatgtgtctgttaaggtggtcgtcgatagcgaattttcgtcgtagttcggggagttggtggagattttggatgaaagggaggtattctcgaggatctctctgcgattgttgggccacgagcagagcaaggtctagattgtagagcccgagagcctcgtcatacagagtattcacatctgccaagaagcagatatgctcgacggctttctccgccagttgctcgttctctgtcattagtgtagcgacgacaaggaggccgtcttcaaatgctggaggcgatttgcagatgttggcagtgatgatgttctgtagtattccgtggtctttggtttcacgtacttgaagatgcgatagtactgagtcacagatggagtttaccttggaggatttgtctcccgtaatactcaattgggattctgttggtgctgcctggtctgttgatatctttgtgtctcggtacatggtctgcgtaacatcctcatcg

SEQ ID NO: 10765 - DNA, 1467 bp, Muscodor strobelii
  misc_feature: SGI cDNA ID NO. 563430
  misc_feature: Encodes the peptide sequence at SEQ ID NO 10766
atgtatcggtcatcgatctttcagctttcattatggattgccggtatatctgcgttatcgacgccaacgccaacaggtaatctggagagaagggaagatgataaccctgctgccaagggattcgttactttcaagctccagaaaaaggctctaccccgagctactcacaaccccagattccacgtaccaacaaagacagatatctcggcacgagacaacgagtacacaatagtcacagccgtagcaccgacagccagccaagccgctggcattgcccaggatggcacggattattcgtacttcgcccaggttgagtttgggtcgaacaacacgccgttgtacatgctcctcgacacgggtgctagtaccacgtgggttatgggaacaatgtgcgagtctccgtcgtgtacgtcgcacaacacatttgggcccgacgactcggatagctataaagatacgcaaaagacttattcgatagagtatggcacgggatcagtcgaagggacgttggttcaggacaccgtgagccttgcgggacttactgtcaccatgtccttcggtgttgcgaattctacttcggattcatttaaccaattcccattcgacggcattatgggtctgacgacgggctccgatacctggctgtctgcactccttgacgccaagttactggatgctaatatctttggtatcgacttggcaagggcgtcagatggtgttaatgacggggagatcatctttggctcgaccaatcccgacaagtacaccggagacatcagctacacggcagtgaaaaaccaggggtcatggatcatccccatggacgacgtaacagtcagcggtgattcctcaggtatcgcgagtacttccgcatatctcgacacaggcacgagtttcatcttcgggccaccagatgatgtgaaggagatgtacaagctcatcgacggagcatcatcaagtgacaacggtgcttcttataccattccgtgtgactctgatgcagaagttgcatttacgttctctggtaaaagctgggcgctttcttctaaggacttcatgtctaagaatggagatacttgcacgggcaatatctatgggattgagtatgtgtcaggcggttggctgctgggagacacgttcttgaagaatgtctatagcgtcttcgatgctgacaatcagcaaattggctttgctgcccctaaaacttcatctgacagcacgtcaacgtcgtccagcgcatcagcgagtggcacatctaccgtgtcgactaccatgtccgcgccatcgtcgtcaactactacggacccgatgggtcttaatggccaccagacaccgactacctcgggcacggctgcgaatgctccggcgactgagagcccgacgccggataactcgtcgagcagacctgtagttggtgtggccttgttgatagtagcattgttgtcgatggtggtcgcattgccttga

SEQ ID NO: 10766 - protein, 488 aa, Muscodor strobelii
  misc_feature: SGI Peptide ID NO. 563430
  misc_feature (99)..(400): Pfam Id: PF00026 Pfam Desc: Eukaryotic aspartyl protease
  misc_feature (62)..(466): NCBI GI: 46117110 Blast Desc: FG04397.1 [Gibberella zeae PH-1]
  misc_feature (61)..(420): NCBI GI: 164422595 Blast Desc: NCU10907 [Neurospora crassa OR74A] gi|157069737|gb|EDO64883.1| [Neurospora crassa OR74A]
  misc_feature (6)..(484): NCBI GI: 116205007 Blast Desc: CHGG_10387 [Chaetomium globosum CBS 148.51] gi|88176515|gb|EAQ83983.1| CHGG_10387 [Chaetomium globosum CBS 148.51]
  misc_feature (62)..(399): NCBI GI: 256729270 Blast Desc: NECHADRAFT_101400 [Nectria haematococca mpVI 77-13-4]
  misc_feature (66)..(482): NCBI GI: 39971727 Blast Desc: MGG_07179 [Magnaporthe grisea 70-15] gi|145019664|gb|EDK03892.1| MGG_07179 [Magnaporthe grisea 70-15]
  misc_feature (42)..(462): NCBI GI: 156059856 Blast Desc: SS1G_03941 [Sclerotinia sclerotiorum 1980] gi|154701727|gb|EDO01466.1| SS1G_03941 [Sclerotinia sclerotiorum 1980]
  misc_feature (72)..(401): NCBI GI: 259157351 Blast Desc: aspartic proteinase [Botryotinia fuckeliana]
  misc_feature (65)..(415): NCBI GI: 212528474 Blast Desc: aspartic-type endopeptidase (CtsD), [Penicillium marneffei ATCC 18224] gi|210073792|gb|EEA27879.1| aspartic-type endopeptidase (CtsD), [Penicillium marneffei ATCC 18224]
  misc_feature (54)..(399): NCBI GI: 242766368 Blast Desc: aspartic-type endopeptidase (CtsD), [Talaromyces stipitatus ATCC 10500] gi|218724352|gb|EED23769.1| aspartic-type endopeptidase (CtsD), [Talaromyces stipitatus ATCC 10500]
  misc_feature (61)..(438): NCBI GI: 119188191 Blast Desc: CIMG_04143 [Coccidioides immitis RS]
  misc_feature (97)..(398): SWISSPROT Homolog: EC 3.4.23.1 Pepsin A
MYRSSIFQLSLWIAGISALSTPTPTGNLERREDDNPAAKGFVTFKLQKKALPRATHNPRFHVPTKTDISARDNEYTIVTAVAPTASQAAGIAQDGTDYSYFAQVEFGSNNTPLYMLLDTGASTTWVMGTMCESPSCTSHNTFGPDDSDSYKDTQKTYSIEYGTGSVEGTLVQDTVSLAGLTVTMSFGVANSTSDSFNQFPFDGIMGLTTGSDTWLSALLDAKLLDANIFGIDLARASDGVNDGEIIFGSTNPDKYTGDISYTAVKNQGSWIIPMDDVTVSGDSSGIASTSAYLDTGTSFIFGPPDDVKEMYKLIDGASSSDNGASYTIPCDSDAEVAFTFSGKSWALSSKDFMSKNGDTCTGNIYGIEYVSGGWLLGDTFLKNVYSVFDADNQQIGFAAPKTSSDSTSTSSSASASGTSTVSTTMSAPSSSTTTDPMGLNGHQTPTTSGTAANAPATESPTPDNSSSRPVVGVALLIVALLSMVVALP

SEQ ID NO: 10767 - DNA, 3106 bp, Muscodor strobelii
  misc_feature: SGI EST ID NO. CUFF.25453.0
  misc_feature: Variant of the nucleotide sequence at SEQ ID NO 10765
gcgccgatagaaacgcatgcggtagccctcaatgggcaagtcgggtagaacacattactgtgttcgaacgaactcgcagtgcgccaaggacccgactctgccgatcgatgctcgttaggccaattcagggtgcaggggcttgcacttctcgactgcttgagccgacgttggttgccggaatggatggtgaagtcagggcccggaatatgcgcttttgagtttccatggcttctgcgcgcgattcagcgtcgacacattcatcgctcatcccctccacctcattcccccaatctttctgtcgttgataattttgtggtgtggttcaatacctaattaatgactagtatcctattgctattgtcttttttataatcgttaatatcctgacctccttgtcctgtcctcgagttattcgatagaacagtggcgtgtctcttcctttttgtctcaaaacttcccgagctgtgtttctcctaagcggcttcttgtctgagatattcgatacggcatatattggattttagatttcattatcctcggttgccatatctgatcagaccctacattccttaaaagctcgggtcacgaaacgcatcttcgaccatcatcatcaacgcccatccctcgctctaagctcggggatttttctccttgattatactcgggagaatcggatttctttatgccttcgcttcgacaaatgacgcttctataacttcttactatcatttaataatctagactctgagtctggaactcggtcgcctcctgctgatatatatacatcattacgtgtatctggaagttgttacgcggccgattgattgctcaagatatttcgcttgcccctggattgcctatcgcttgtctggcatcacgattgcttgcacagacggtcatttatcgttttatatacatatctgtatatatatccacctatcgacgactttcgaagctggcgctgcttcacgaaccgagcgagagaggtgtttggagtaggaattaattcaactgggacgttgcctaattgaattattcgtttttattgagaaagtcgcattaagatgtatcggtcatcgatctttcagctttcattatggattgccggtatatctgcgttatcgacgccaacgccaacaggtaatctggagagaagggaagatgataaccctgctgccaagggattcgttactttcaagctccagaaaaaggctctaccccgagctactcacaaccccagattccacgtaccaacaaagacagatatctcggcacgagacaacgagtacacaatagtcacagccgtagcaccgacagccagccaagccgctggcattgcccaggatggcacggattattcgtacttcgcccaggttgagtttgggtcgaacaacacgccgttgtacatgctcctcgacacgggtgctagtaccacgtgggttatgggaacaatgtgcgagtctccgtcgtgtacgtcgcacaacacatttgggcccgacgactcggatagctataaagatacgcaaaagacttattcgatagagtatggcacgggatcagtcgaagggacgttggttcaggacaccgtgagccttgcgggacttactgtcaccatgtccttcggtgttgcgaattctacttcggattcatttaaccaattcccattcgacggcattatgggtctgacgacgggctccgatacctggctgtctgcactccttgacgccaagttactggatgctaatatctttggtatcgacttggcaagggcgtcagatggtgttaatgacggggagatcatctttggctcgaccaatcccgacaagtacaccggagacatcagctacacggcagtgaaaaaccaggggtcatggatcatccccatggacgacgtaacagtcagcggtgattcctcaggtatcgcgagtacttccgcatatctcgacacaggcacgagtttcatcttcgggccaccagatgatgtgaaggagatgtacaagctcatcgacggagcatcatcaagtgacaacggtgcttcttataccattccgtgtgactctgatgcagaagttgcatttacgttctctggtaaaagctgggcgctttcttctaaggacttcatgtctaagaatggagatacttgcacgggcaatatctatgggattgagtatgtgtcaggcggttggctgctgggagacacgttcttgaagaatgtctatagcgtcttcgatgctgacaatcagcaaattggctttgctgcccctaaaacttcatctgacagcacgtcaacgtcgtccagcgcatcagcgagtggcacatctaccgtgtcgactaccatgtccgcgccatcgtcgtcaactactacggacccgatgggtcttaatggccaccagacaccgactacctcgggcacggctgcgaatgctccggcgactgagagcccgacgccggataactcgtcgagcagacctgtagttggtgtggccttgttgatagtagcattgttgtcgatggtggtcgcattgccttgaaggaaatagcacctactcaaagtcgccattcacccttcttcttatcctagaagaaactcacagagcaattcaatagaaattgccgggacgcgatattccgtatcgtgaccctgccacacagaatcccaccgaagacacagaaagaaagagagaaagaatgcctggacatgcccgagatgaggccgggtacgagagagagataggataggacatacatgataccccgaatatgcacaacaagtcagttagaagtcagtcgaggaaaagacacgagaggaagaaacataaaagtcagcttgagatgcccgaggacgaggaaatggctcgggcgtgctcgtatctagagtattatctatgtaatggggaatgaaatgagaattatcttcggtgctgcatttgatgcttcgtttctaaaattgtgagcttgatgtgttcgagtgaagcatgtttgccccttttctgaaaccagatacgagtcgaatgagaaggtgtgcaacaattttcacaattacctacgagaaacgtctatcttcaacactagatcgctgacttattgcctttaaacttttatgata

SEQ ID NO: 10768 - DNA, 981 bp, Muscodor strobelii
  misc_feature: SGI cDNA ID NO. 563431
  misc_feature: Encodes the peptide sequence at SEQ ID NO 10769
atgtctagatcgatagacaagaatttagttgcacagctaaaagcagaagaccctcaaccagcatacaatagcctttcgcggttactcacaaacctaccggaatgtggtctactagaaatcgagttcctcggctacagtcatcagctagagtccggtgtgttttatctccaagatgaaaatgcggttgcgattccaaaattgagactacttcaagctttcttcgtggctcgcaatgtcttgcaaaggcatctcgaacttgtgaacgtgcctcactccgacatcctggctgcgacggctgtcatactattgatggatcctgagcacttgacagcagctaataccagaaaacgtgcccttctcagtgatggaaacccgacagtcactgctttgaagcgagaaaaagacttcgtcgacacacttctcacggcaagactgcatcgccatacaaagtcacccatagtctggtcacatcgccgctggctctttggtgagagccgcaaagtagggctcaactggaacattcgacaagatatcaaagatgtgattatgattgcagcagagcgccatcctcgaaattacgtagcgtggcagcatgctcgaattctagtcaatgcggacagaagcctagcagctctgattgcggcggatgtgaaagacttctgtcttaggaatcactccgacatctccagctggacgtttctttcatattgcatcagtcacatagacacccaagagactcgccagaaagcctattcatccgtgatcgccgatgtgctctctctggccgactcgtttcgatggacaaatgaatcagtttgggtcttcttacgcacgattgtcagcgcaagatttgtcagcgatgagcaacggaaacaattcttcgcgacacttgataaagtctctagaaatttatctcaaagttcaacccagtggagaataatggagaacacccgcaagtggtgcgacgaatacagcgcgtga

SEQ ID NO: 10769 - protein, 326 aa, Muscodor strobelii
  misc_feature: SGI Peptide ID NO. 563431
  misc_feature (1)..(324): NCBI GI: 116205005 Blast Desc: CHGG_10386 [Chaetomium globosum CBS 148.51] gi|88176514|gb|EAQ83982.1| CHGG_10386 [Chaetomium globosum CBS 148.51]
  misc_feature (1)..(324): NCBI GI: 171689144 Blast Desc: protein product [Podospora anserina] gi|170944534|emb|CAP70645.1| protein product [Podospora anserina]
  misc_feature (1)..(322): NCBI GI: 46117108 Blast Desc: FG04396.1 [Gibberella zeae PH-1]
  misc_feature (1)..(281): NCBI GI: 256729269 Blast Desc: NECHADRAFT_47308 [Nectria haematococca mpVI 77-13-4]
  misc_feature (1)..(325): NCBI GI: 154316010 Blast Desc: BC1G_04577 [Botryotinia fuckeliana B05.10] gi|150846973|gb|EDN22166.1| BC1G_04577 [Botryotinia fuckeliana B05.10]
  misc_feature (1)..(320): NCBI GI: 156059862 Blast Desc: SS1G_03944 [Sclerotinia sclerotiorum 1980] gi|154701730|gb|EDO01469.1| SS1G_03944 [Sclerotinia sclerotiorum 1980]
  misc_feature (17)..(320): NCBI GI: 39971729 Blast Desc: MGG_07180 [Magnaporthe grisea 70-15] gi|145019665|gb|EDK03893.1| MGG_07180 [Magnaporthe grisea 70-15]
  misc_feature (51)..(308): NCBI GI: 169603848 Blast Desc: SNOG_04932 [Phaeosphaeria nodorum SN15] gi|111066203|gb|EAT87323.1| SNOG_04932 [Phaeosphaeria nodorum SN15]
  misc_feature (21)..(281): NCBI GI: 189196758 Blast Desc: conserved [Pyrenophora tritici-repentis Pt-1C-BFP] gi|187980596|gb|EDU47222.1| conserved [Pyrenophora tritici-repentis Pt-1C-BFP]
  misc_feature (22)..(312): NCBI GI: 212528548 Blast Desc: conserved [Penicillium marneffei ATCC 18224] gi|210073829|gb|EEA27916.1| conserved [Penicillium marneffei ATCC 18224]
MSRSIDKNLVAQLKAEDPQPAYNSLSRLLTNLPECGLLEIEFLGYSHQLESGVFYLQDENAVAIPKLRLLQAFFVARNVLQRHLELVNVPHSDILAATAVILLMDPEHLTAANTRKRALLSDGNPTVTALKREKDFVDTLLTARLHRHTKSPIVWSHRRWLFGESRKVGLNWNIRQDIKDVIMIAAERHPRNYVAWQHARILVNADRSLAALIAADVKDFCLRNHSDISSWTFLSYCISHIDTQETRQKAYSSVIADVLSLADSFRWTNESVWVFLRTIVSARFVSDEQRKQFFATLDKVSRNLSQSSTQWRIMENTRKWCDEYSA

SEQ ID NO: 10770 - DNA, 1056 bp, Muscodor strobelii
  misc_feature: SGI cDNA ID NO. 563433
  misc_feature: Encodes the peptide sequence at SEQ ID NO 10771
atggtcacaataacgtgggggactatcaagtccctcctaatcttcttcgggcccatcctgctcccgaaagcaatcaacctctaccgcacactccgcgcaacgaacgcctcgcaacgcctccccatcatcccgctctccgcttctgcctttcgatccatcgccattctagtcggcgccgcagcggctcatctctccgcaatattcccctcgccaaggaacatattcaaactcacaagctcccgcctacaaatccccaccgacgtgcttttcacccggctgtcgtccctccgccccttaacacaagccgacgaagtcctccgctccaagttcgtaaacctcgagtctcgcctcctatacctccaatatgggccttccgtcctatcctcctgtccattctgcgactctcaggatccaataacatacttctactacgcattaccatcgctcttagcaccgcacctcctcaatttcatcatcatctctctcgcgacctcacccacaatcagcagcccaggcgcagccagatggcgctggatcggggtcttggcacaagccatcatcgctggattagatgtctacgctacattctcctacaatacgtccgccaacaaacgatccaccacaccgttcaacatcgacgcattcttctccacctcccacgtctaccgctacctgctcctcacgttcctcaacattacactttcgtccctgatctacctctccaccaccaaccgattattcgctctacctccggacccaacagcaaggatcgaagcagtcgccagaacaataggcgtggcgaagagtaaattgaatgcactaggtatcgtgaaaaacacggcgttgagagacgaggagttgagacagaagatgatggagtattgggttagtgagggagtgctgatgagggagttaatggaggagaaggaggtgctggatggtgttaatgatgcgttgagcagcaggataaagatggaggatatgagtcgggatgcggagattttcgctcggaatgtactcccgcctatgcctgtggaacctgtgcttgttgggtag

SEQ ID NO: 10771 - protein, 351 aa, Muscodor strobelii
  misc_feature: SGI Peptide ID NO. 563433
  misc_feature (2)..(342): NCBI GI: 85089485 Blast Desc: NCU10035 [Neurospora crassa OR74A] gi|28919267|gb|EAA28736.1| [Neurospora crassa OR74A]
  misc_feature (2)..(347): NCBI GI: 256729465 Blast Desc: NECHADRAFT_105135 [Nectria haematococca mpVI 77-13-4]
  misc_feature (2)..(340): NCBI GI: 171689148 Blast Desc: protein product [Podospora anserina] gi|170944536|emb|CAP70647.1| protein product [Podospora anserina]
  misc_feature (2)..(342): NCBI GI: 116205001 Blast Desc: CHGG_10384 [Chaetomium globosum CBS 148.51] gi|88176512|gb|EAQ83980.1| CHGG_10384 [Chaetomium globosum CBS 148.51]
  misc_feature (2)..(346): NCBI GI: 46117104 Blast Desc: FG04394.1 [Gibberella zeae PH-1]
  misc_feature (1)..(351): NCBI GI: 39971733 Blast Desc: MGG_07182 [Magnaporthe grisea 70-15] gi|145019667|gb|EDK03895.1| MGG_07182 [Magnaporthe grisea 70-15]
  misc_feature (1)..(340): NCBI GI: 156059866 Blast Desc: SS1G_03946 [Sclerotinia sclerotiorum 1980] gi|154701732|gb|EDO01471.1| SS1G_03946 [Sclerotinia sclerotiorum 1980]
  misc_feature (1)..(340): NCBI GI: 154316014 Blast Desc: BC1G_04579 [Botryotinia fuckeliana B05.10] gi|150846975|gb|EDN22168.1| BC1G_04579 [Botryotinia fuckeliana B05.10]
  misc_feature (2)..(351): NCBI GI: 261356794 Blast Desc: conserved [Verticillium albo-atrum VaMs.102]
  misc_feature (4)..(322): NCBI GI: 242766050 Blast Desc: conserved [Talaromyces stipitatus ATCC 10500] gi|218724292|gb|EED23709.1| conserved [Talaromyces stipitatus ATCC 10500]
MVTITWGTIKSLLIFFGPILLPKAINLYRTLRATNASQRLPIIPLSASAFRSIAILVGAAAAHLSAIFPSPRNIFKLTSSRLQIPTDVLFTRLSSLRPLTQADEVLRSKFVNLESRLLYLQYGPSVLSSCPFCDSQDPITYFYYALPSLLAPHLLNFIIISLATSPTISSPGAARWRWIGVLAQAIIAGLDVYATFSYNTSANKRSTTPFNIDAFFSTSHVYRYLLLTFLNITLSSLIYLSTTNRLFALPPDPTARIEAVARTIGVAKSKLNALGIVKNTALRDEELRQKMMEYWVSEGVLMRELMEEKEVLDGVNDALSSRIKMEDMSRDAEIFARNVLPPMPVEPVLVG

SEQ ID NO: 10772 - DNA, 4606 bp, Muscodor strobelii
  misc_feature: SGI EST ID NO. CUFF.25473.0
  misc_feature: Variant of the nucleotide sequence at SEQ ID NO 10770
gttcgaaatgccagttcataagcaccgaggcaagagttcgctcgctggcttggcgagattttcttgtgcgagatattatggatctaatgttttaggagaatggtgctgcaaaatgccagcatacgtcatttctccatcgactagttctggctatgacttagttctaagtttgtaggcgcgccgtcgacgccgtttctgccaggaatccaggagttcgggacgcgacatacgaacgatgagttcgtctatctctttttctttttcccatctaagactccatgtttctccatggcgagagtttcacactctcgcgaggtttgtgaaacggacctactcagaggccgatgagtgaccgcgtctgattcagaatatctgacagacgcgacagcgggtggcgtgggctctgattcacgcgctgtattcgtcgcaccacttgcgggtgttctccattattctccactgggttgaactttgagataaatttctagagactttatcaagtgtcgcgaagaattgtttccgttgctcatcgctgacaaatcttgcgctgacaatcgtgcgtaagaagacccaaactgattcatttgtccatcgaaacgagtcggccagagagagcacatcggcgatcacggatgaataggctttctggcgagtctcttgggtgtctatgtgactgatgcaatatgaaagaaacgtccagctggagatgtcggagtgattcctaagacagaagtctttcacatccgccgcaatcagagctgctaggcttctgtccgcattgactagaattcgagcatgctgccacgctacgtaatttcgaggatggcgctctgctgcaatcataatcacatctttgatatcttgtcgaatgttccagttgagccctactttgcggctctcaccaaagagccagcggcgatgtgaccagactatgggtgactttgtatggcgatgcagtcttgccgtgagaagtgtgtcgacgaagtctttttctcgcttcaaagcagtgactgtcgggtttccatcactgagaagggcacgttttctggtattagctgctgtcaagtgctcaggatccatcaatagtatgacagccgtcgcagccaggatgtcggagtgaggcacgttcacaagttcgagatgcctttgcaagacattgcgagccacgaagaaagcttgaagtagtctcaattttggaatcgcaaccgcattttcatcttggagataaaacacaccggactctagctgatgactgtagccgaggaactcgatttctagtagaccacattccggtaggtttgtgagtaaccgcgaaaggctattgtatgctggttgagggtcttctgcttttagctgtgcaactaaattcttgtctatcgatctagacatctcgaggctattgctggaggtagttggcgctgtggacaagacatcgagaagaacgataacacattgatgacatactcaagcagataagcaatagcacaaatgagtggacattaatttgcaaagcaaataataggatacccaagcccactgatatggcattgtctcgtggactggttgcttaatgttctctcgcaactctttgaacggctcagatatcgaggtaggatggtggggtacatgatatcgctaatggagttgaatgggtttggtacatatttggcgggacagctgtcaataaggtgaagcacgtcaggagctaccttcagacatggaattaaatcgaaggccagcgtatgacatgatgctgccggggcacaccacatatcaaatctacccagcctgattatccttctacacacatagccctccacaaggccgacggtcaacatgccgtccttgcttcttgtcgtcctcctcgttgaggtggctgtgaccctggtcaacaccattggcgccgcagccatcaaccaagtgctatggaacatctacctcgcactcccgacccagacgtcacgatcagcagccgaaaagcagaaggtccagaaggaatacctggcgatccgacgggacctgaacgctaccagcagccaggaccagtttgcgaagtgggcgaaactcagacgacagcatgacaaatcgctggagcagctggagaagatgaagacgtcgtacgaagcctcgaaagcaaagttcgaccgcaccgccggcatcattcgctggacagcgacgtcgggcgtcaagttcatactcccctggatctacggaaaggaggccatgttctggctgccgagcggctggttcccctactacgtcgaatggatcctatccttcccgcgcgcacccctcggcagcgtcagcatcgtatcgtggcagactgcctgcgcaggcgtcgtccttctactcgccgatgcgatcaaggcggtccttgctttagctttgggccagaaacaagtgccgcaggcgcaaccggctgaggagacggcgggagagaaaacatctacaccagcagagagcaagaagagggcatgaaggacgacaaaaggcaaagcatatatcatacagcacaatcagactcagccaggcgatcacacaatactacagtcacagaatacgcgagggaatgtctctcatcttaatttgacgcagagtttgtcatggcgcacgaatgcctccgactctgtaacacgattgagatgactcttggcagagtacttggggtcgatctaggcatgctttttgacttttgcgaccaccgggcagaagatggcaaaagcttcgaaagtgccaaaagaatctactgaggaggtgtagtatacggggactacgttcttacctgcgtcgatgctcaaacctgaaccaaggtgaatggcaagctaggcgcaagagtatcgtgtttgatgggttctctgaggttcgaagagaattagatgggtggctgaccaagtagatcctcacagaaccgagctacaggcctgaatatagtgtagcgaccagcctttaatgcatccagtgacactcgaagctcagtttgaccacgatgatatgtgactttgaaggtgaagactggttgcggcatgacgaaggaagagggaagatggaaaaggttggccaggcgcaaacaaagaaatagcagaaaatagtggaagtggataacggctcgcgaaacttattgaccaatcatctgataagaaacacactaacaaggacttaccccataacgcctggatcccctgccactgacgaccgtagtggggtgcagcctcctgtgagtccgacaaggctgagaacaatgacatctgtcctccaattagcaaccaatactttagtcctttgatatcttcctcgactcttccgattttgacacctcggcgatacgaagaagaggaataccaagacgaatatctgcttctttatacgacatcatgaggtaacagagacgcaagaggtctaaacaccatggtcacaataacgtgggggactatcaagtccctcctaatcttcttcgggcccatcctgctcccgaaagcaatcaacctctaccgcacactccgcgcaacgaacgcctcgcaacgcctccccatcatcccgctctccgcttctgcctttcgatccatcgccattctagtcggcgccgcagcggctcatctctccgcaatattcccctcgccaaggaacatattcaaactcacaagctcccgcctacaaatccccaccgacgtgcttttcacccggctgtcgtccctccgccccttaacacaagccgacgaagtcctccgctccaagttcgtaaacctcgagtctcgcctcctatacctccaatatgggccttccgtcctatcctcctgtccattctgcgactctcaggatccaataacatacttctactacgcattaccatcgctcttagcaccgcacctcctcaatttcatcatcatctctctcgcgacctcacccacaatcagcagcccaggcgcagccagatggcgctggatcggggtcttggcacaagccatcatcgctggattagatgtctacgctacattctcctacaatacgtccgccaacaaacgatccaccacaccgttcaacatcgacgcattcttctccacctcccacgtctaccgctacctgctcctcacgttcctcaacattacactttcgtccctgatctacctctccaccaccaaccgattattcgctctacctccggacccaacagcaaggatcgaagcagtcgccagaacaataggcgtggcgaagagtaaattgaatgcactaggtatcgtgaaaaacacggcgttgagagacgaggagttgagacagaagatgatggagtattgggttagtgagggagtgctgatgagggagttaatggaggagaaggaggtgctggatggtgttaatgatgcgttgagcagcaggataaagatggaggatatgagtcgggatgcggagattttcgctcggaatgtactcccgcctatgcctgtggaacctgtgcttgttgggtaggttgttaaaagggggatggaatttaggggtacgtttggtgtttggtggttggtacctagctcataggaattgatgatgagttcttgacattgcgtgttttcttttgtgatatttgtgtttagtttgtaatgcgtataaccaagtc

SEQ ID NO: 10773 - DNA, 585 bp, Muscodor strobelii
  misc_feature: SGI cDNA ID NO. 563434
  misc_feature: Encodes the peptide sequence at SEQ ID NO 10774
atggctgagattcgccgaaagctcgtcatcgttggcgacggtgcctgtggtaagacttgtttgctgatcgtcttctccaagggcaccttccccgaggtctacgtccccaccgtcttcgagaactacgtcgccgatgtcgaggtcgacggcaagcacgtcgagctagccttgtgggatacggctggtcaggaagactacgaccgtctccgcccgctgtcctaccccgactcccacgttatcctcatctgcttcgctattgactcgcccgactcgctggacaacgtgcaggagaagtggatctctgaggttcttcacttctgccagggtctccccatcattctcgtcggctgcaagaaggatttgcgatacgaccccaagaccatcgaggagctccgcaagacgagccagaagcccgtgtcacccgaggagggtgaggacattcgcaagaagattggtgcctataagtacctcgagtgttcggccaagaccaacgagggtgtccgggaggtcttcgagcacgccactcgtgctgctctcctgtctcgcaaccgccccaagaagcactccaagtgcttggtcctctaa

SEQ ID NO: 10774 - protein, 194 aa, Muscodor strobelii
  misc_feature: SGI Peptide ID NO. 563434
  misc_feature (7)..(120): Pfam Id: PF08477 Pfam Desc: Miro-like protein
  misc_feature (7)..(180): Pfam Id: PF00071 Pfam Desc: Ras family
  misc_feature (1)..(194): NCBI GI: 46117116 Blast Desc: FG04400.1 [Gibberella zeae PH-1]
  misc_feature (1)..(194): NCBI GI: 256729467 Blast Desc: [Nectria haematococca mpVI 77-13-4]
  misc_feature (1)..(194): NCBI GI: 62275438 Blast Desc: small GTPase-binding protein [Fusarium oxysporum]
  misc_feature (1)..(194): NCBI GI: 39971721 Blast Desc: MGG_07176 [Magnaporthe grisea 70-15] gi|145019660|gb|EDK03888.1| MGG_07176 [Magnaporthe grisea 70-15]
  misc_feature (1)..(194): NCBI GI: 148475342 Blast Desc: Rho1 [Cordyceps militaris]
  misc_feature (1)..(194): NCBI GI: 189196188 Blast Desc: GTP-binding protein rho1 precursor [Pyrenophora tritici-repentis Pt-1C-BFP] gi|187980311|gb|EDU46937.1| GTP-binding protein rho1 precursor [Pyrenophora tritici-repentis
  misc_feature (1)..(194): NCBI GI: 121709978 Blast Desc: Rho GTPase Rho1 [Aspergillus clavatus NRRL 1] gi|119400755|gb|EAW11179.1| Rho GTPase Rho1 [Aspergillus clavatus NRRL 1]
  misc_feature (1)..(194): NCBI GI: 119468002 Blast Desc: Rho GTPase Rho1 [Neosartorya fischeri NRRL 181] gi|119405959|gb|EAW15910.1| Rho GTPase Rho1 [Neosartorya fischeri NRRL 181]
  misc_feature (1)..(194): NCBI GI: 67539140 Blast Desc: AN5740.2 [Aspergillus nidulans FGSC A4] gi|41017789|sp|Q9C3Y4.1|RHOA_EMENI RecName: Full=GTP-binding protein rhoA; AltName: Full=Rho1 protein homolog; Flags: rho FGSC
  misc_feature (1)..(194): NCBI GI: 145255691 Blast Desc: An18g05980 [Aspergillus niger] gi|134084643|emb|CAK43321.1| protein product [Aspergillus niger]
MAEIRRKLVIVGDGACGKTCLLIVFSKGTFPEVYVPTVFENYVADVEVDGKHVELALWDTAGQEDYDRLRPLSYPDSHVILICFAIDSPDSLDNVQEKWISEVLHFCQGLPIILVGCKKDLRYDPKTIEELRKTSQKPVSPEEGEDIRKKIGAYKYLECSAKTNEGVREVFEHATRAALLSRNRPKKHSKCLVL

SEQ ID NO: 10775 - DNA, 1679 bp, Muscodor strobelii
  misc_feature: SGI EST ID NO. CUFF.26242.1
  misc_feature: Variant of the nucleotide sequence at SEQ ID NO 10773
tggaagctacctggcagatacagatagtgtaggtagagaccgagactcaattgagcaaaggctgggcaacgctgcagccaaccttagttctccttctccttctgcttccatcatccacggtccgactcacacctctcccaatctctcccccatctcccgaccatctatctctatctcctttctccatcccgacggcggagaatcaacagcaacacgacctcgtcgacacatcgccatccatctgccactccggagtctctcgctgctcccgcgtgcccgcctcaacgcagccaccgcagcccctaatcgcagcagctgccgcttccccccatcacatcgaccgccatggctgagattcgccgaaagctcgtcatcgttggcgacggtgcctgtggtaagacttgtttgctgatcgtcttctccaagggcaccttccccgaggtctacgtccccaccgtcttcgagaactacgtcgccgatgtcgaggtcgacggcaagcacgtcgagctagccttgtgggatacggctggtcaggaagactacgaccgtctccgcccgctgtcctaccccgactcccacgttatcctcatctgcttcgctattgactcgcccgactcgctggacaacgtgcaggagaagtggatctctgaggttcttcacttctgccagggtctccccatcattctcgtcggctgcaagaaggatttgcgatacgaccccaagaccatcgaggagctccgcaagacgagccagaagcccgtgtcacccgaggagggtgaggacattcgcaagaagattggtgcctataagtacctcgagtgttcggccaagaccaacgagggtgtccgggaggtcttcgagcacgccactcgtgctgctctcctgtctcgcaaccgccccaagaagcactccaagtgcttggtcctctaaatgcttccccaaccttgtactgaatgatacctttgatatcccggcgtgtgacacccgtcgtcttcctcgttcttcacgccatgcgaactattagcctgatcggatgactggagtttctatgcaagacggggcttgggagggaaggagaacacctgcgcatcacatgggttccacggctggagttttcgatccgtaatcactacctcttcgtatctgcttctccggccggcgtgctttgctcaggtcggcttctttcacaccacaatcagacacctcgcggttatcgctgcaacaggaggcgaattaatagtgacacttgactggactgtccagctgggttgtggttctttatttgtttcctgtgtgtcattgctcgggctctggggtgtcagacccggcggtatacattggggactggaactggaccgggccttgtttattagatgattgactgacttgggtggtctgaaggggatgagatgaccactgacgtgtatgtgtgtgggatcgagagcggagtcttgcggtggatgagtgctaactgctgagtgttgtgttgcgtgtctgtacgtgcggcaagtctggcgacgttcatatccccagagaatacggctatatcataaatcttttctgtcttttcctgcgtgtctgtgtcggttgctgtatcgtcgctggtgtcaatagtacttgcgatagacttgataatctgagttttatactatagtgaggtctcgactcgtattcacgga

SEQ ID NO: 10776 - DNA, 1158 bp, Muscodor strobelii
  misc_feature: SGI cDNA ID NO. 563435
  misc_feature: Reduced expression when VOC is produced
  misc_feature: Encodes the peptide sequence at SEQ ID NO 10777
atgcagaagatcctcaaacgcgtgcgcacggcggagcgtgtggcggccaagcgcaagaccaagaaggacggcatgtacttcaactacaacaagcgcgacaccaagtaccaggacaagcaggtcttcaggatatacagcgacgagatcaaagagtccaagaagtccatccgcgacgactggaagtacggccccaacgctgcgcggaccgacgtcggccacaaggctcacgctctcggcgccatccacgaggtccgcttctcctcggccacctcggacgccatcaccctcgcccagcgcaatcgccgctgccagtgggccggcggtgcatactcgctgtgtctgaaggagaaggaccgcgtcgtcgtgctcgagggccccgacaagggcaagatcggctccgtcaccaagatccgtcaccagtacgccgacctcttcgtcgagggtctgaacaaggccaacgtccacatcggcgaaatcacaagaacagaccagcccgaccgccacgttgccaccctcgagctgcccctccccatctccgccgtccgcctcgtccaccccgtcctcgacgaggccacgggccagacccgcgacgtcatcatcaaccagatcctgccgcaaaacctcatcaccgaccgactgaccggcgagcggcgctggaaccgcgtcatctaccagggcgacaccctacgcatcgacgtcgaagaaaagaccttcgtcccgacactcctccgtccaccaatgccggagaaagtcatcgatgagctaaggaacaagtactcaaggttcagaacgagacatgaaccggagtatatcgcgaagttggagaaggagaagaaggagatggaggataggaagctgcttatgaagagtatggagaccccgctgcaggagttccataagaaggaacgcgaaaataagaagaagaaggggaagccgagattgagcgttgagatgctggagaagattggggaggtcattgctaggaatagggagatgacgcttaagggtgttggtgttgagcctgcgaggatgcttggtggtgcggaggggacgaggacgattaatgggggggatgctagcgctactgtggtgccggatgtgcctggtgtggttgttgaggatatggggaaagggggtgaggagcggcctactttgtag

SEQ ID NO: 10777 - protein, 385 aa, Muscodor strobelii
  misc_feature: SGI Peptide ID NO. 563435
  misc_feature (1)..(342): NCBI GI: 116205011 Blast Desc: CHGG_10389 [Chaetomium globosum CBS 148.51] gi|88176517|gb|EAQ83985.1| CHGG_10389 [Chaetomium globosum CBS 148.51]
  misc_feature (1)..(363): NCBI GI: 171689134 Blast Desc: protein product [Podospora anserina] gi|170944529|emb|CAP70640.1| protein product [Podospora anserina]
  misc_feature (1)..(339): NCBI GI: 46117118 Blast Desc: FG04401.1 [Gibberella zeae PH-1]
  misc_feature (3)..(371): NCBI GI: 85081643 Blast Desc: NCU01485 [Neurospora crassa OR74A] gi|28917838|gb|EAA27526.1| [Neurospora crassa OR74A]
  misc_feature (1)..(365): NCBI GI: 156059706 Blast Desc: SS1G_03866 [Sclerotinia sclerotiorum 1980] gi|154701652|gb|EDO01391.1| SS1G_03866 [Sclerotinia sclerotiorum 1980]
  misc_feature (49)..(341): NCBI GI: 39971719 Blast Desc: MGG_07175 [Magnaporthe grisea 70-15] gi|145019659|gb|EDK03887.1| MGG_07175 [Magnaporthe grisea 70-15]
  misc_feature (1)..(339): NCBI GI: 154315830 Blast Desc: BC1G_04487 [Botryotinia fuckeliana B05.10] gi|150846883|gb|EDN22076.1| BC1G_04487 [Botryotinia fuckeliana B05.10]
  misc_feature (1)..(339): NCBI GI: 256729272 Blast Desc: NECHADRAFT_63081 [Nectria haematococca mpVI 77-13-4]
  misc_feature (1)..(345): NCBI GI: 261356731 Blast Desc: KOW motif domain-containing protein [Verticillium albo-atrum VaMs.102]
  misc_feature (1)..(285): NCBI GI: 261206376 Blast Desc: KOW domain-containing protein domain-containing protein [Ajellomyces dermatitidis SLH14081] gi|239592984|gb|EEQ75565.1| KOW domain-containing protein protein
  misc_feature: Useful for introducing or modulating the production of volatile compounds
MQKILKRVRTAERVAAKRKTKKDGMYFNYNKRDTKYQDKQVFRIYSDEIKESKKSIRDDWKYGPNAARTDVGHKAHALGAIHEVRFSSATSDAITLAQRNRRCQWAGGAYSLCLKEKDRVVVLEGPDKGKIGSVTKIRHQYADLFVEGLNKANVHIGEITRTDQPDRHVATLELPLPISAVRLVHPVLDEATGQTRDVIINQILPQNLITDRLTGERRWNRVIYQGDTLRIDVEEKTFVPTLLRPPMPEKVIDELRNKYSRFRTRHEPEYIAKLEKEKKEMEDRKLLMKSMETPLQEFHKKERENKKKKGKPRLSVEMLEKIGEVIARNREMTLKGVGVEPARMLGGAEGTRTINGGDASATVVPDVPGVVVEDMGKGGEERPTL

SEQ ID NO: 10778 - DNA, 1516 bp, Muscodor strobelii
  misc_feature: SGI EST ID NO. CUFF.25731.1
  misc_feature: Variant of the nucleotide sequence at SEQ ID NO 10776
gacgtgcgattcgagacaagccaaaccaccacctcgagctacctcccaacccgcaccatgccctcatagtctcaaaacacaaccattccaccgagacatagacatctcgacgaccggaggagacagcaagatgcagaagatcctcaaacgcgtgcgcacggcggagcgtgtggcggccaagcgcaagaccaagaaggacggcatgtacttcaactacaacaagcgcgacaccaagtaccaggacaagcaggtcttcaggatatacagcgacgagatcaaagagtccaagaagtccatccgcgacgactggaagtacggccccaacgctgcgcggaccgacgtcggccacaaggctcacgctctcggcgccatccacgaggtccgcttctcctcggccacctcggacgccatcaccctcgcccagcgcaatcgccgctgccagtgggccggcggtgcatactcgctgtgtctgaaggagaaggaccgcgtcgtcgtgctcgagggccccgacaagggcaagatcggctccgtcaccaagatccgtcaccagtacgccgacctcttcgtcgagggtctgaacaaggccaacgtccacatcggcgaaatcacaagaacagaccagcccgaccgccacgttgccaccctcgagctgcccctccccatctccgccgtccgcctcgtccaccccgtcctcgacgaggccacgggccagacccgcgacgtcatcatcaaccagatcctgccgcaaaacctcatcaccgaccgactgaccggcgagcggcgctggaaccgcgtcgtgccaggcctcaacctatcccatccccctggccggaaaaggaacccgaagaccaccagatctaccagggcgacaccctacgcatcgacgtcgaagaaaagaccttcgtcccgacactcctccgtccaccaatgccggagaaagtcatcgatgagctaaggaacaagtactcaaggttcagaacgagacatgaaccggagtatatcgcgaagttggagaaggagaagaaggagatggaggataggaagctgcttatgaagagtatggagaccccgctgcaggagttccataagaaggaacgcgaaaataagaagaagaaggggaagccgagattgagcgttgagatgctggagaagattggggaggtcattgctaggaatagggagatgacgcttaagggtgttggtgttgagcctgcgaggatgcttggtggtgcggaggggacgaggacgattaatgggggggatgctagcgctactgtggtgccggatgtgcctggtgtggttgttgaggatatggggaaagggggtgaggagcggcctactttgtagtgggatgggctgagatgagagtatttatggactggagatagggtgtccgtcatagacttgtacagctagatgtacgctgaattatctgtcgaagtagaagagatgtattatacttgtatataccaaaaataagacttggcatcatgtcaaatgcgctatcgttgcaaag

SEQ ID NO: 10779 - DNA, 534 bp, Muscodor strobelii
  misc_feature: SGI cDNA ID NO. 563436
  misc_feature: Encodes the peptide sequence at SEQ ID NO 10780
atggcctccaagaccacgtccgaccaggaatcactccagttactcgacaccctcgataatacaatgagtaaacagattgcgaggtggtccaatgatgagtttgagggacactggtcgaaagtgcttcctcttgaagtcccaaagtcaccagacgcaaacgacaatttccttacctttgctataggctacaatgctcgtaactatgtggaagccaagatcaccacagatttagtcaagaacaaaacgggtcggccgtatcttgattacgcaccgtttacagacttcggactgggcactgatcctgaaatggtcgatgtcttgttgaaccatggcgccaacccgcacgctcagtatgaaggcagatcgctcttggatcgattccgcgagacatgcaacgaacggaaatggctcaatacaaaagactcaagatcaaatcgcgaagtggtccaattgcttgaatctacaccagaggccggacgaacgttagccttaaataacgcgacaggcattcctgacttggctgagttaccttaa

SEQ ID NO: 10780 - protein, 177 aa, Muscodor strobelii
  misc_feature: SGI Peptide ID NO. 563436
  misc_feature (37)..(133): NCBI GI: 171691234 Blast Desc: protein product [Podospora anserina] gi|170945565|emb|CAP71677.1| protein product [Podospora anserina]
  misc_feature (3)..(127): NCBI GI: 256726514 Blast Desc: NECHADRAFT_79534 [Nectria haematococca mpVI 77-13-4]
MASKTTSDQESLQLLDTLDNTMSKQIARWSNDEFEGHWSKVLPLEVPKSPDANDNFLTFAIGYNARNYVEAKITTDLVKNKTGRPYLDYAPFTDFGLGTDPEMVDVLLNHGANPHAQYEGRSLLDRFRETCNERKWLNTKDSRSNREVVQLLESTPEAGRTLALNNATGIPDLAELP

SEQ ID NO: 10781 - DNA, 117 bp, Muscodor strobelii
  misc_feature: SGI EST ID NO. CUFF.25515.0
  misc_feature: Variant of the nucleotide sequence at SEQ ID NO 10779
ccaagatcaccacagatttagtcaagaacaaaacgggtcggccgtatcttgattacgcaccgtttacagacttcggactgggcactgatcctgaaatggtcgatgtcttgttgaacc

SEQ ID NO: 10782 - DNA, 633 bp, Muscodor strobelii
  misc_feature: SGI cDNA ID NO. 563437
  misc_feature: Encodes the peptide sequence at SEQ ID NO 10783
atgacagataacgctcgcataacccaaaccatggacgcagaagtcgagacagcaaagactcaacagaagaccgacgaagaaatacaactcgaagaagaactcggaaaaacagtcgatgagtttattaagcgcagcgtctcatctctaagttggtttaagctgcggtgcttggaggcgaatgaagccaaggagccccgaaccttgtctctctgtggaaacttctcggagtattgcatcgtgtacagccttgagaaagacgtcagcctacccggtcttaaacctaaagcactgaagcttgcgaaacggaatatcaccgagacaaaccaaatcgaagagtttcgaacgagtattcttgaagagttacagttttgggttaggaaagagacgagacctatcaaattacattgttataaacatcctgacctcgaggattcgaatcctattaagtcttggttggtcgatacatttggctgcaggctactatggtatgtttacggttataagcagcatgaggcggtcctacctaagtggtatgcgaaagatcgtgttgctgggaaggtcgttgatgatatctccgaagatcaggatatgaaggaatctgaatcggatagtagtagttcgcaaacgagctag

SEQ ID NO: 10783 - protein, 210 aa, Muscodor strobelii
  misc_feature: SGI Peptide ID NO. 563437
MTDNARITQTMDAEVETAKTQQKTDEEIQLEEELGKTVDEFIKRSVSSLSWFKLRCLEANEAKEPRTLSLCGNFSEYCIVYSLEKDVSLPGLKPKALKLAKRNITETNQIEEFRTSILEELQFWVRKETRPIKLHCYKHPDLEDSNPIKSWLVDTFGCRLLWYVYGYKQHEAVLPKWYAKDRVAGKVVDDISEDQDMKESESDSSSSQTS

SEQ ID NO: 10784 - DNA, 603 bp, Muscodor strobelii
  misc_feature: SGI cDNA ID NO. 563438
  misc_feature: Encodes the peptide sequence at SEQ ID NO 10785
atggacgcagaagtcgagacagcaaagactcaacagaagaccgacgaagaaatacaactcgaagaagaactcggaaaaacagtcgatgagtttattaagcgcagcgtctcatctctaagttggtttaagctgcggtgcttggaggcgaatgaagccaaggagccccgaaccttgtctctctgtggaaacttctcggagtattgcatcgtgtacagccttgagaaagacgtcagcctacccggtcttaaacctaaagcactgaagcttgcgaaacggaatatcaccgagacaaaccaaatcgaagagtttcgaacgagtattcttgaagagttacagttttgggttaggaaagagacgagacctatcaaattacattgttataaacatcctgacctcgaggattcgaatcctattaagtcttggttggtcgatacatttggctgcaggctactatggtatgtttacggttataagcagcatgaggcggtcctacctaagtggtatgcgaaagatcgtgttgctgggaaggtcgttgatgatatctccgaagatcaggatatgaaggaatctgaatcggatagtagtagttcgcaaacgagctag

SEQ ID NO: 10785 - protein, 200 aa, Muscodor strobelii
  misc_feature: SGI Peptide ID NO. 563438
MDAEVETAKTQQKTDEEIQLEEELGKTVDEFIKRSVSSLSWFKLRCLEANEAKEPRTLSLCGNFSEYCIVYSLEKDVSLPGLKPKALKLAKRNITETNQIEEFRTSILEELQFWVRKETRPIKLHCYKHPDLEDSNPIKSWLVDTFGCRLLWYVYGYKQHEAVLPKWYAKDRVAGKVVDDISEDQDMKESESDSSSSQTS

SEQ ID NO: 10786 - DNA, 579 bp, Muscodor strobelii
  misc_feature: SGI cDNA ID NO. 563439
  misc_feature: Elevated expression when VOC is produced
  misc_feature: Encodes the peptide sequence at SEQ ID NO 10787
atggcagacaacattcgcccaacccaggccatcaaaccagaagatggcacagacaaaactcaacaggacaacgatgcaaagccaaagctcagaaatgaagcagatgaacaacgtcaagaaatcggcgaagctattgataaatttgctcgcgaccatatgtcgaacccattgcagctaaaagggttatacgaccaggcaaatctacataagacgccacaagtcggagctgtctttgctggagccgcatcaggatattgtttaatctatagcattgtcaaatacatgaaaataccaggagattacaaaaagcagattaccgaggacacccagattgaaaagttcagagacggcattgtgaatgatctacagtcttggattgtacagcggaaaagacccgatgcctatcttcattattatcaacctctggatcgcagttccctcagggctaaatttcgccttttcaataaagacaaggataatgacgagactaagcttgtgttctgtgtttatagctacaataaagtcgctggcactgcgaccgaccctcggttcaatggcgaggacaaccctgctaagtaa

SEQ ID NO: 10787 - protein, 192 aa, Muscodor strobelii
  misc_feature: SGI Peptide ID NO. 563439
  misc_feature: Useful for introducing or modulating the production of volatile compounds
MADNIRPTQAIKPEDGTDKTQQDNDAKPKLRNEADEQRQEIGEAIDKFARDHMSNPLQLKGLYDQANLHKTPQVGAVFAGAASGYCLIYSIVKYMKIPGDYKKQITEDTQIEKFRDGIVNDLQSWIVQRKRPDAYLHYYQPLDRSSLRAKFRLFNKDKDNDETKLVFCVYSYNKVAGTATDPRFNGEDNPAK

SEQ ID NO: 10788 - DNA, 743 bp, Muscodor strobelii
  misc_feature: SGI EST ID NO. CUFF.25524.1
  misc_feature: Variant of the nucleotide sequence at SEQ ID NO 10786
ctttggtattcccggattacttgttccacttcgcactacacttcatcatattcaccatggcagacaacattcgcccaacccaggccatcaaaccagaagatggcacagacaaaactcaacaggacaacgatgcaaagccaaagctcagaaatgaagcagatgaacaacgtcaagaaatcggcgaagctattgataaatttgctcgcgaccatatgtcgaacccattgcagctaaaagggttatacgaccaggcaaatctacataagacgccacaagtcggagctgtctttgctggagccgcatcaggatattgtttaatctatagcattgtcaaatacatgaaaataccaggagattacaaaaagcagattaccgaggacacccagattgaaaagttcagagacggcattgtgaatgatctacagtcttggattgtacagcggaaaagacccgatgcctatcttcattattatcaacctctggatcgcagttccctcagggctaaatttcgccttttcaataaagacaaggataatgacgagactaagcttgtgttctgtgtttatagctacaataaagtcgctggcactgcgaccgaccctcggttcaatggcgaggacaaccctgctaagtaaagcagaagcttgagagtcgtgctgcttgaaaagtcgcttgtattaactattagaatcttttgggtgtttgctggattaatttttttctttttgttgttgttgttgttg

SEQ ID NO: 10789 - DNA, 1686 bp, Muscodor strobelii
  misc_feature: SGI cDNA ID NO. 563440
  misc_feature: Encodes the peptide sequence at SEQ ID NO 10790
atgtcgatacaagagtcgaagcctcctaatgcggatccaacgtcggcaaccaatttacctgacgcccataccaaagaggacgcccagtccttccggagaggcgtaaaattctgggcgatactaggcactttagctttgacgagcctactcacttctttggaggctacaatcacgtcgacggtcctaccagccgttattaccgatcttggaggaggggagaagtacatatggattgctaatgcgtatttcttagcactcacttcacttcagccgatgttcggccagatcgcaaatgtcttcggtcgtcgatggcctatgatattttcaacaactgcgttcgtgctcgggagtggaatatgtggcggagctacgaatatcggcatgatgatagctggtcgagctattcaggggatcggtggatctggtgtttccgttctatgcgaaatcatcatatgcgacttggtccctctccgagagagagggacttacatggccatagtctttggcatggtatcgctgggggccgcacttggtcccttgttcggagggcttattgttagctatagcacttggcgctgggccttctatctcgcattgcccatcggggggtcagcgcttgttctgctcttcctttttcttcatgtcaagtacgacaagtcgctgacgttagccaccaagctctccaggctagactggctgggcaatgttgtctttattggcgcttcaagctcggtgctcgtcgccctcagctgggctggagggcaatactcatggtcttcgtatgatgtcatcgtaccgctcattgttgggatctttggattgttcggctttgtcacgattgagggtactcggctcgttacaaaccccatgataccacttcatctcttttccaatcttgtcacagctattgtgtatcttctcacatttctccatggtgttgtcactatgtgggctttttactttcttccggtctactttcaaggtgtccttggtgcgagtccctacagatctggcgttatgctcttaccaaccatcctcgcactggtccccgctgctatcataggaggacttttgcttacaaagcttggccgctataagccgattttagtctttgcgctcgcattgatcgttgttgggtttggtctcttctcacttctggacgggagttcggacataggagcatggattgggtttcagattatcgagtccgtcggcgtaggtctcgcgataccaacgttactcccggcgcttctagctcccttaacagacaaggacacggctcttgcgaccggtacatgggcattcacgcgaagctttggtataacatggggagtggcgattgcgggaaccgtatttagtacacgagctgcgcagcttgcagattcaggtgcaattagcagcaatgcaacggtgactaccgatttcaaagccggcggagcatatcaagcggcaacggcacagtttcttggctctctctcagcagagacacgagcccaagtggtgggagtacaggcagccgcattacagcgctcatggcaagtcggcattgcgttcggagcactgggattcgtcgctgctatggccctcaaagagatcccattgaggaaagagcttgatagtgagtttggcatgtcagagggggatcaggcgccagtacaggcgaagcggcctcgaaatcagccataa

SEQ ID NO: 10790 - protein, 561 aa, Muscodor strobelii
  misc_feature: SGI Peptide ID NO. 563440
  misc_feature (44)..(445): Pfam Id: PF07690 Pfam Desc: Major Facilitator Superfamily
  misc_feature (92)..(213): Pfam Id: PF00083 Pfam Desc: Sugar (and other) transporter
  misc_feature (1)..(549): NCBI GI: 240109581 Blast Desc: Major Facilitator Superfamily protein [Coccidioides posadasii C735 delta SOWgp]
  misc_feature (20)..(558): NCBI GI: 261190168 Blast Desc: methylenomycin A resistance protein [Ajellomyces dermatitidis SLH14081] gi|239591322|gb|EEQ73903.1| methylenomycin A resistance protein [Ajellomyces dermatitidis SLH14081] A ER-3]
  misc_feature (32)..(546): NCBI GI: 242789535 Blast Desc: efflux pump antibiotic resistance protein, [Talaromyces stipitatus ATCC 10500] gi|218717967|gb|EED17387.1| efflux pump antibiotic resistance protein, [Talaromyces ATCC
  misc_feature (4)..(548): NCBI GI: 212538541 Blast Desc: conserved [Penicillium marneffei ATCC 18224] gi|210069168|gb|EEA23259.1| conserved [Penicillium marneffei ATCC 18224]
  misc_feature (4)..(549): NCBI GI: 119183366 Blast Desc: CIMG_06626 [Coccidioides immitis RS]
  misc_feature (33)..(551): NCBI GI: 145233185 Blast Desc: An02g08330 [Aspergillus niger] gi|134056892|emb|CAK37795.1| protein product [Aspergillus niger]
  misc_feature (26)..(546): NCBI GI: 145244244 Blast Desc: An11g06420 [Aspergillus niger] gi|134079311|emb|CAK96940.1| protein product [Aspergillus niger]
  misc_feature (21)..(556): NCBI GI: 154322713 Blast Desc: BC1G_00699 [Botryotinia fuckeliana B05.10] gi|150848033|gb|EDN23226.1| BC1G_00699 [Botryotinia fuckeliana B05.10]
  misc_feature (36)..(554): NCBI GI: 145236904 Blast Desc: An07g00060 [Aspergillus niger] gi|134075564|emb|CAK39230.1| protein product [Aspergillus niger]
  misc_feature (17)..(549): NCBI GI: 255941836 Blast Desc: Pc16g13890 [Penicillium chrysogenum Wisconsin 54-1255] gi|211586310|emb|CAP94059.1| Pc16g13890 [Penicillium chrysogenum Wisconsin 54-1255]
MSIQESKPPNADPTSATNLPDAHTKEDAQSFRRGVKFWAILGTLALTSLLTSLEATITSTVLPAVITDLGGGEKYIWIANAYFLALTSLQPMFGQIANVFGRRWPMIFSTTAFVLGSGICGGATNIGMMIAGRAIQGIGGSGVSVLCEIIICDLVPLRERGTYMAIVFGMVSLGAALGPLFGGLIVSYSTWRWAFYLALPIGGSALVLLFLFLHVKYDKSLTLATKLSRLDWLGNVVFIGASSSVLVALSWAGGQYSWSSYDVIVPLIVGIFGLFGFVTIEGTRLVTNPMIPLHLFSNLVTAIVYLLTFLHGVVTMWAFYFLPVYFQGVLGASPYRSGVMLLPTILALVPAAIIGGLLLTKLGRYKPILVFALALIVVGFGLFSLLDGSSDIGAWIGFQIIESVGVGLAIPTLLPALLAPLTDKDTALATGTWAFTRSFGITWGVAIAGTVFSTRAAQLADSGAISSNATVTTDFKAGGAYQAATAQFLGSLSAETRAQVVGVQAAALQRSWQVGIAFGALGFVAAMALKEIPLRKELDSEFGMSEGDQAPVQAKRPRNQP

SEQ ID NO: 10791 - DNA, 828 bp, Muscodor strobelii
  misc_feature: SGI cDNA ID NO. 563441
  misc_feature: Encodes the peptide sequence at SEQ ID NO 10792
atgggagatatatatacagatcaaatgacccgccacgcgagcgaggtgaagcgaaatattggatatcttctgcatccttcggtgaaggacggtcttccaaaagtcccccgaattgctgatattggtactggtaccggttgctttttgctacgcttgcacgaagaaagcctatatccggatgccattctggatggctcagatatctcttccgaattgtttccgtccaagaacgatatggttccatctacggtgtcattatcgatcctcgacatcaaaaagcctcccccggagggccttcgtggccaatacgacttggtgcacgtccgcctgctcatagcggccatgttacccgaagactgggacccggttgtcagcaatctgagtttactactaaagccgggaggtttcctacagtgggaagagtcaaactttgctgatggaagatacatgcgttcaaaagtgaattctacgattgaagcagcgagtctcattgaatactcttttcgtgatgctctcaaagacaggtttgagcatggttggagtacactaccacaaaacatgagcaacgccggattatcaccagttattagggacgtgatcagctctgatagaatatcagagacacgtgaaagactgacagcgacgggcatgcgcgcaatattctcctgggcacgacttatgactaagcgaggagtcgagggctcaatgactgatgagcaattggatgagctggaagtgaaggcatacgaagacataaaatcaggctgttacttcagaaacgacatacacgttgtgtgtggactgaagccctctcatttagcaaaatga

SEQ ID NO: 10792 - protein, 275 aa, Muscodor strobelii
  misc_feature: SGI Peptide ID NO. 563441
  misc_feature (39)..(137): Pfam Id: PF08242 Pfam Desc: Methyltransferase domain
  misc_feature (3)..(270): NCBI GI: 255950778 Blast Desc: Pc22g22620 [Penicillium chrysogenum Wisconsin 54-1255] gi|211593173|emb|CAP99550.1| Pc22g22620 [Penicillium chrysogenum Wisconsin 54-1255]
  misc_feature (17)..(270): NCBI GI: 119489916 Blast Desc: NFIA_061810 [Neosartorya fischeri NRRL 181] gi|119411077|gb|EAW21020.1| conserved [Neosartorya fischeri NRRL 181]
  misc_feature (18)..(202): NCBI GI: 169596262 Blast Desc: SNOG_00888 [Phaeosphaeria nodorum SN15] gi|160701267|gb|EAT92383.2| SNOG_00888 [Phaeosphaeria nodorum SN15]
  misc_feature (17)..(143): NCBI GI: 145258266 Blast Desc: An04g06270 [Aspergillus niger] gi|134074595|emb|CAK38888.1| protein product [Aspergillus niger]
  misc_feature (17)..(270): NCBI GI: 70998749 Blast Desc: methyltransferase [Aspergillus fumigatus Af293] gi|66851733|gb|EAL92058.1| methyltransferase, [Aspergillus fumigatus Af293]
  misc_feature (17)..(270): NCBI GI: 159127115 Blast Desc: methyltransferase, [Aspergillus fumigatus A1163]
  misc_feature (6)..(204): NCBI GI: 226286195 Blast Desc: conserved [Paracoccidioides brasiliensis Pb01]
  misc_feature (6)..(161): NCBI GI: 226291659 Blast Desc: conserved [Paracoccidioides brasiliensis Pb18]
  misc_feature (89)..(204): NCBI GI: 156034468 Blast Desc: [Sclerotinia sclerotiorum 1980] gi|154698940|gb|EDN98678.1| [Sclerotinia sclerotiorum 1980]
  misc_feature (20)..(272): NCBI GI: 121701965 Blast Desc: conserved [Aspergillus clavatus NRRL 1] gi|119397390|gb|EAW07821.1| conserved [Aspergillus clavatus NRRL 1]
MGDIYTDQMTRHASEVKRNIGYLLHPSVKDGLPKVPRIADIGTGTGCFLLRLHEESLYPDAILDGSDISSELFPSKNDMVPSTVSLSILDIKKPPPEGLRGQYDLVHVRLLIAAMLPEDWDPVVSNLSLLLKPGGFLQWEESNFADGRYMRSKVNSTIEAASLIEYSFRDALKDRFEHGWSTLPQNMSNAGLSPVIRDVISSDRISETRERLTATGMRAIFSWARLMTKRGVEGSMTDEQLDELEVKAYEDIKSGCYFRNDIHVVCGLKPSHLAK

SEQ ID NO: 10793 - DNA, 963 bp, Muscodor strobelii
  misc_feature: SGI cDNA ID NO. 563442
  misc_feature: Encodes the peptide sequence at SEQ ID NO 10794
atgcttgacataacggtcaatcacttcctgccggaaagaccgtacatacctctggcacggcttatacggatcgtgagctttggggtgatgctcaaggtgcttttcaaagtcattccaaatgaagctcacgtttgtgacattcaagaagccaccgaggcaataaatcggctatgggttcagtccaaggacaagaatgcagagtcctcgccttatgaccggactcttcttaataacgccttgcatcgactgcttccagaccagtacactctcgataaggatcatgcaagtcctctgaatcttcttctaccggcatacgaaactcttggccgggtagtactcctggtattcatagccgcagcgtatcgcaccagggaccctgaaagcaatgacttggtgcgagcggctgccgaacacgttccgcagtgtttcggccgagatggggacagtgacgcagagatggaagcaagattgatagcaaaggaaggccttcgactatacccgccaaccaagagaatataccgaatagcttcggtaagggaaacccacgaatcgcaagtcctcgctgccgacattgaggcgtgccatcgagatcgcgacatctggggaccagatgctaatgaattccgcccggcgcggttccgcaagtggctcgacggcccctcatcggctacgggaatcgagaagaacctctgcgacacaagcgcggctgaactctcgcactcggagctgcaacaacttgcctacatgccttttagcgtagggaaacatcagtgtccggccgcaaatgggttcggcgagaggatgattattatgctcgtcgtgaagctcatcatgcgcttcggtactcgtgaaacaggtctttatatacacctaggaaacgtggagctagagacaagtctaaaggttccgttgccatctgggcgagctgatttagagggctgggtacttcagctaaacgagtag

SEQ ID NO: 10794 - protein, 320 aa, Muscodor strobelii
  misc_feature: SGI Peptide ID NO. 563442
  misc_feature (13)..(314): NCBI GI: 164428030 Blast Desc: NCU01573 [Neurospora crassa OR74A] gi|157071981|gb|EAA26974.2| [Neurospora crassa OR74A]
  misc_feature (13)..(314): NCBI GI: 16416038 Blast Desc: related to cytochrome P450 [Neurospora crassa]
  misc_feature (16)..(287): NCBI GI: 238837625 Blast Desc: conserved [Microsporum canis CBS 113480]
  misc_feature (18)..(276): NCBI GI: 116199743 Blast Desc: CHGG_08027 [Chaetomium globosum CBS 148.51] gi|88179306|gb|EAQ86774.1| CHGG_08027 [Chaetomium globosum CBS 148.51]
  misc_feature (18)..(317): NCBI GI: 171688818 Blast Desc: protein product [Podospora anserina] gi|170944371|emb|CAP70481.1| protein product [Podospora anserina]
  misc_feature (21)..(280): NCBI GI: 242760763 Blast Desc: conserved [Talaromyces stipitatus ATCC 10500] gi|218723251|gb|EED22668.1| conserved [Talaromyces stipitatus ATCC 10500]
  misc_feature (36)..(298): NCBI GI: 242826486 Blast Desc: conserved [Talaromyces stipitatus ATCC 10500] gi|218712469|gb|EED11895.1| conserved [Talaromyces stipitatus ATCC 10500]
  misc_feature (13)..(267): NCBI GI: 242760071 Blast Desc: conserved [Talaromyces stipitatus ATCC 10500] gi|218723110|gb|EED22527.1| conserved [Talaromyces stipitatus ATCC 10500]
  misc_feature (46)..(281): NCBI GI: 169764253 Blast Desc: [Aspergillus oryzae RIB40] gi|83764452|dbj|BAE54596.1| protein product [Aspergillus oryzae]
  misc_feature (16)..(298): NCBI GI: 242771661 Blast Desc: conserved [Talaromyces stipitatus ATCC 10500] gi|218721507|gb|EED20925.1| conserved [Talaromyces stipitatus ATCC 10500]
  misc_feature (123)..(290): SWISSPROT Homolog: EC 1.3.3.9 Secologanin synthase
MLDITVNHFLPERPYIPLARLIRIVSFGVMLKVLFKVIPNEAHVCDIQEATEAINRLWVQSKDKNAESSPYDRTLLNNALHRLLPDQYTLDKDHASPLNLLLPAYETLGRVVLLVFIAAAYRTRDPESNDLVRAAAEHVPQCFGRDGDSDAEMEARLIAKEGLRLYPPTKRIYRIASVRETHESQVLAADIEACHRDRDIWGPDANEFRPARFRKWLDGPSSATGIEKNLCDTSAAELSHSELQQLAYMPFSVGKHQCPAANGFGERMIIMLVVKLIMRFGTRETGLYIHLGNVELETSLKVPLPSGRADLEGWVLQLNE

SEQ ID NO: 10795 - DNA, 9201 bp, Muscodor strobelii
  misc_feature: SGI cDNA ID NO. 563443
  misc_feature: Encodes the peptide sequence at SEQ ID NO 10796
atgggccgaccaattcccatagccgtagtcggcgtggccttccgtcttccaggaggtgccaattgtcttgagagtcttgaggatctcatcaataacggacggtcgggctttgtgcctgtccctgaggataggtggaatcgcggcgcattcttcaacacgcaacagagcgcaaagggtgggatgcccacgcaatatggctacttccttgaagaagacatatccaagtttgatgctcgcttcttcaacgtatcgcctcaagaagcctccacaatggatccgaagcaacggatactacttcagaccacatatgaggctctcgagaatgctggaatgtcaatggaacacgtcaaggggagcaatacttcagtatatgtcagcacgttcacttatgattttgaacgcatggggtttcgggacatgcaaaccttatctggattccatacgacgagcgttggccctgccattctagcaaaccgtctttcttattttttcgatttgaaaggcccatcattcacgctcgataccggctgttctggaggtcttgttgcactccatcaagcatgtcagaatttgagacttggcgagtcaaaccttgctattgtgggaggagctcagcttttaatcgatcctgatcaatccacaaatatgtcaacattaggcatgctcaatgcagatggacattgttatgccttcgactcgcgaggaagtggctatggtcgcggcgagggagtagcaacgctgatcttgaagcgcttagatgaagcgcttgccgatggcgacccagttcagactgttattgtgaattcaggtctcaatcaagacggcaaatcggcagggagtctcatgtctccgagtgcagaagcacaaacggatttaattcgatcagtgtatgctcaagttaggttggaccctggtgaaacgtcatacgtcgaggcacatgggacagtgagtataaagtgcttcttatccatgttacagaaaggactaacagaactgcatagggaaccaaagtcggtgagcgacacaaacgaggtatcgtccatataccaagtcttctgtgaaggcaggcaaaggcagaatgaccttgtggtagggtctgtcaaggctaatatcggacatcttgaggccgtcgctgggctcgcaggattcgtcaaatcgatcaatgtcctgaattccaaactcataccacctcaacttaattttttggagccaaaaccgactttaaaactcgaagagaggcgcatcaaaatccctacacaactattggcgttgccacctgggccttgtcgagcttccgtaaacagctttggctacggtggtaccaacgcccatgtcatcatcgagtcgttgtcctcatatttggaaaagagccgtaagttggtaagcgaaatgggtttgtctaacggcaagatcaacgggcatcacttcaagacaaatggcacgcaatcacagcacacaaccggcttgaatggcatcaatggtgcaatctgcgtgaagaagcatgccggtgatgagacgccccttcggcttttccttatgagcgccaatagcgaagcctcattgaaagcatacgggcagaagctttcagcgtggacgctgaaacaaaagccttgcgctgacaagatgactgatctctcacacacgctgctgacacggagatcacttctcttatggcgatacgctttcatagcctcagactactatgatctcaatgacaagctgagtgatgtccgtcctgcccgaacatcaacatccaaccggattgcattcgtgtttacgggccagggagcacagtggcaaggcatgggtcgcgaattgacccgatatccagtttttgagagatccattatgaaatcagagaattatctcctacaaatgggctgcgtttggtatctaacggatgagatactcttcgatcaggcatcatcaaggctcggggaggctgaagtcgcgcaaccggcaactacggcacttcaaatcgctttgatcgatctcttggcgagtctcggcatatttccaaactatgtcgtcggacacagctcaggagaaataggtgccgcctatgctgcaggagctttgactcacgagtccgcaataaaggcagcatatcggcgtggcatatattctggtaaggccaaacgcaaaaatagacatcctggatctatgatggctgttgggcttggcaaacaactagccagctcttacatcaagaaggttaagaatggtagattgtgcattgcctgtgtgaacagtcccgaaagcacgacgatatcaggagatgtcggggctcttgacgagctgaagcagatgcttgacgccgagtccatcttcgctcggagattgagggttgataccgcatatcattcacatcacatgcaagtcgttgccgatgaatacctggagtcactccgtgacattgccacagattcgacacgccaaggagtgaccttctgctctactgtcataggatccccgaaaaaagacggctttacagcggagtattgggtgcagaatctcgtgtcacaagttcagtttgtcgaaggccttcaactagtagcgaagaaaatgaacgagtccctgccctatggtgaccctcagttcacttttatcgagatcggtccagcaggagctctcgcagggccggcaaaacaaacactttcagatatcgatttcaaacacacctatctaccagtgctgaacagaaagacaaacgcctccaagacacttttgacgatggtcgggaagctcattgaattgggtcatggctgtgacttaaagtcaattgcgcacatcgcgccacgaccgacttccggcaatgcagaggttcttcgagatatacccggctatgcattcgatgaatcatcgcattgggcagaatctcgagtgagcgttgcgcaccggttccggaaatttccttacaatgatctgtgcggcattctggaccctgcgagcggctggtatgagccgcggtggaggcatactctcgatttagatgccttgccttggcttaaagatcatgcaattggcggcgatattgtgtttcctgcctcaggttacgtcgcgatggtagtagaggcaatgaagcagctcgtccaagttcaggagctccaggggtcgatcaagaacttcttaatcagcgacatgacactcgcccaagccgtggcaatttcgcctgaggaacataacgccaaggtcgaattgcagctaactattacccctagtaaggcggggttgagatggcatgagttcaaaatcttctcgtataacaaccaagggaatcgttgggttgaaaactgctacggtcttgttgcaacagagacgcgagtcgaggacgatgatgtcgaagaagatttggaagacattacgagagttcaagaaaaactcagcctatttcaagtaatccaatccgcctcgacagaattattagaaagggacgccttctacagtcaactcaaagcctcgggaaatcactacggtaattcctttgctctccttggggacgtttataaagatgaaaatcacggctggtgctcgctctcagtcccagactattccgcgttgtttcgtgggcatcacatgcagcctcatgttatacaccctactctgctcgactctttcagtcacatcggggcgcttcttgcaaagaagccttgccgggatgcctcaattgtcgtcggaaagatcagcgatatgacaatctcggctgatttcgcgcgaggttccagggccggattatatctggcaacaacgcagcagccccaagatctcagcacggtcgaatcgcagtctgttgttttacagacacacgcagacggccaagtcttccccgcgctcactgcatcttacacatatcgagctttcggtgtgacgtcagacagcgacaaggaaggcccgttctcgtacaagaaggtgtattcgcttgttcgccagccagatgtcgatttccttcgctccgaagacttgtcgggtgagacttcgcaaagcgtcgtggatgttttaacgaaatacttgaatgctatggcatttaagcggccccgtctcagaatacttgaaattggttgttccgcagaaggggttaccacgcctttactctcctccttgaccaatgctggaagagagcaatgggctggccactatgacatagttagcctttgcacagagcctgagggactattagagcgatggcgcgagcacattaacgtgcggcaacttgacatcaagaaagatctaccttctgaagcaaaagagaccaaatacgacgtcatcattgccgccgatgtcgttgacgatagagcaagcgccagcacgacactgatcaacatccacgacctattacgcgatggcggtaagctggtgcttgttggatcaagccatttagatcttcaaatgaagcaggttcgagaagttttgcaaagaaactcttacagcgatatcgacatccttgttgagactacgaagcccaaggcgttcattcttattgcatccgccattgccaatgtcacaacagagagcatgggatcatccgctgtgaatattgtgaacggatcggactctgcggcatcgacgatgatctcatggggcttatcagaaatcgccttgaaaagccggtgctcttgggatttttctcacgtcacactgaatgaaactgtcatctcccagaactcgacttatatcattctagacactgcggagaattccctgctcatgaatcgtgatcctaaatcgttcactaaagtcagagagttactcagtgcagacacaaacatcctctgggtctccttacaagacacgatgacacgtacggcttcatcggtgaaatcaatgatgcaaggagcctcgagagttatccgccgagagaatgaaggcacgacatcacttacgctattcgaagttgacgaccaagtaacatgggctagtgctctagacatctgccagcagctcttgaagatcgttgttgcgccagatggttcattggagcacgaatatgtctatcgtgatagcaacgtcatgatccctcgtctcaagctggatcaaaagtttcttcgtggggttggaagtcgctccagcggacaggacaatgtctttaaagttccttatcataacgcgaatcgccctctccgccttgagattgggcaacccggtctcctgaacagtctgcggttcgttgatgataaaccaccacaagacttgaagccatgcgacatccagctatcatctcgcgcacacggcatcaatttcaaagatgtcttcatatctctcggacaaatgcctccatctgccagcatggttggagaggtgagcggtatcgtgactgcagtcgggcgagatatggccaagagatacaacattggcgatcacgtcatgggtttttttgccaacccgtttgcaagcaatcctcacatcaacggagacctcgcacacgtcgtgccaaagaacatggaattcaacattgcggccacgattccatgtgtctacacgacagcgtaccactgcctcttcgaagtcgcgcgtctgcgaaagggccagtcgattctcataacggccgcttccggtggtgtcggccaggcggcaattcagctagcacagcatgctggcgcaggtgaaatattcgttacactcggctcaagtcaaaagaaaaagctcgtaatggaagaatatgacattcctgcgagtcatgttttctcgtcgcgaaagcttgatttcaagcagggcatcctgcgaatgacagggggacggggtgttgatgttgtgttgaactcgttgactggcgatatgctcactgacgcctttgactgcgttgcgaagctggggactttctgcgaaatcggaaagggcgatatctacaagggcaaacatttgcgtctcaattctttcgaccgcagtgttactttcgcctccgtagatctcgtcgcaatcgcacaggaacgtcctgacattctgtactctcatcttggcagtatcgtcgaattgttcgaaaatcgtcgtcttcgttctttaaagccaatcaatacatacccgatcgggcagattgaggaagcttttcgattgattgccggacgaaagcataccggcaagcttatcttggaatccccggagacttcaatagtcgaggccacacttccactaccaaagaagcttgtcttacctgcacacgcagcatacatcattgctggcggtcttggggatattggcaggagagtcgccgtcctcttatcctcacgcggtgccaaacatattgtacttctatctcggcgtgcactgccagtagaagccaagaagcagctccacgatagtgtcgcccattatggtagtactatccacattgtaagatgtgatatcagtgtcgaatcagacgttgctaaatgtgccaactactgccgggagaatcagcttatcgtcaaaggcatcgtccagagtgccatgcttttgagagatcggccgttttccaacatgacttacgacgagttctgtgctcctctcgggcccaaggtgtacggtacaatcaacttggacaaagccttcgcgtcttcgcagcttgatttcttcataatgctttcatcctcggctacagtcattggcaacggaagccaagcaaattatgcagccggcaatgctttccaggacgcctttgccaactcccgcgccggcagccacactacctacgttgctctcaatttgggcgccgttgaaggctctcatgctgttgcagagacctcggaagctcaaaacaaccgtctcaagagtatctctatcaccatggatgagttactatcaagtatcgaatacgccatgggctcgcaagctcacgatgataagctctcacttgccatcatgggcctttctaggcaaggatttgtcgatgcaaatgacgaatactccctcaagaacccactcttcagccacctcccagctgcggacgatgaaggcggggcagctagcaagggcgagcatgatatcgttcatcgcatcgccgaagcttcaacgccggaagaagcacaggctctgatcaccgaagcagtcgtaacgaaatgcgcctctttccttggctgcgcggtggaggaggtgtcccaaacccagccactctacgagattggtttcgattctcttgtgtctatcgagctaaagaattggctcttgcggacgtttgagtcgcccgtacagacagccgagatctctggcgcgtcgagtatcattgctctggctgcaatgactacaagtcggtccaaattggtgaatgctcgtgagcgaacagcgggaaacgttgaaaacctcgagccgaacggggtgattatgaggaccaatggtcaccaccacagcttccagactcacgggatccgaaagaccgaggacttcggccttcagatttttaaatgttgcgttacatcgccgcctctgaagcttcccatgttcgatctcgaggattatcttgattgctacagaataaccgtagaggagttcgcaaagactaacgaggaaaaggccgacatcgtcaaggccgtgaatgaattccgtgaccccaagagcctgggtgcaaaaacatatgctgcactgatcgaacgggcaaacgatcccacaatcgaatgttggcttgcagacacggagaccaacagtgtatttttgcacttccgacatccgcttgcgccatggaattctttcattcacacacaccacgatgcttcaactccccattcccaggccgagcgagctgctgttctcactacggtggcctttggcttccttcagggcatggagagaaacgagatcgagaatgattggctaggctcacgcccgctttgctcggactactggaggtggatgttcaacgccgttcgtctgcctgttgtccactgtgataagatgaagatctattctcagagccggtatgttgccgtattgagaaaagggcatgcattcaagattaaactgcagggccagcaaggcaatctgtcgctcgagcaggcagcagcgatgttccagcagatcttagatgtagacgtgggagagaactgctgggctagcatactcaccacggatttccgtgatacctgggccgtgaatcgagaggcgatcatcgctatcagcgagtcaaacagtgcttacttccagacgatagaagaagcgaccttcgtcgtctgtctcgacgaaggtaagcccgagacacatgaggaaaccatagcacaggggattgccggcgacggcttcaatcgttggttcgataagacggtgcagtttgtcgtctacgcgaatggccgttctgcccacatctctgatcacaccatgattgatggcacgacacctctgcgcttgaccgagttcattcacgatgcaattatcagccatcaacatcttgcctcgggttatgggtcggccgcagtctcaacgccagagtatttccctctgcacaccacgtcggacatcgacgagtacgtacagaaagtccgctcacgctaccgacagactaccctgactcggggctaccgatacatcaagagctcggccttgagtcagggtctcgctgctggcacgggcctctcatcgaagcactgtcttgactttgccatacaacttgcggcgcggctgcatttcggctatctccctgccgcgtgggagcccatctcagtccagcacttccatcgcgggcggcccgaccctcgccaggcagtttcatcacatgtcgtcgcgttctgtgacgccgcgctggacaagagtgtgccactcgtcgaaaagaggcgactaatggagatcgcggccgctgagtgggatgagcagacgaagcgcacgcaggaaggatctgggtttctacgccgtaccgaggctcttctcgggatcattgctaagctcgcgccgccacctaaggacgatgtccctatcgtgcaatacaccgaggagcagctcgctaactggagttgggccgactcgcttgcgagcattgtcggtgagaacacggtgatgcccacgctgttcactaatgaagtcttcaatcgtgtatatccgggcaatatggagcaagtccgcaatgagggcgagttcgtggacgcagcgggatatgtcatgaatgataattgtatttggatcagtaaccgggttcgggagaattatgttacactctccattgtcggcgatgccgataaggttggtgattatgaggaatgctttcatcgagctgtaactataatacgttccatcatggccgcaaagtag

SEQ ID NO: 10796 - protein, 3066 aa, Muscodor strobelii
  misc_feature: SGI Peptide ID NO. 563443
  misc_feature (589)..(923): Pfam Id: PF00698 Pfam Desc: Acyl transferase domain
  misc_feature (2052)..(2219): Pfam Id: PF00106 Pfam Desc: short chain dehydrogenase
  misc_feature (1840)..(1989): Pfam Id: PF00107 Pfam Desc: Zinc-binding dehydrogenase
  misc_feature (2466)..(3061): Pfam Id: PF00755 Pfam Desc: Choline/Carnitine o-acyltransferase
  misc_feature (5)..(255): Pfam Id: PF00109 Pfam Desc: Beta-ketoacyl synthase, N-terminal domain
  misc_feature (263)..(402): Pfam Id: PF02801 Pfam Desc: Beta-ketoacyl synthase, C-terminal domain
  misc_feature (2052)..(2232): Pfam Id: PF08659 Pfam Desc: KR domain
  misc_feature (649)..(850): Pfam Id: PF00698 Pfam Desc: Acyl transferase domain
  misc_feature (589)..(621): Pfam Id: PF00698 Pfam Desc: Acyl transferase domain
  misc_feature (2052)..(2215): Pfam Id: PF00106 Pfam Desc: short chain dehydrogenase
  misc_feature (1840)..(1946): Pfam Id: PF00107 Pfam Desc: Zinc-binding dehydrogenase
  misc_feature (2540)..(2773): Pfam Id: PF00755 Pfam Desc: Choline/Carnitine o-acyltransferase
  misc_feature (341)..(402): Pfam Id: PF02801 Pfam Desc: Beta-ketoacyl synthase, C-terminal domain
  misc_feature (263)..(315): Pfam Id: PF02801 Pfam Desc: Beta-ketoacyl synthase, C-terminal domain
  misc_feature (1333)..(3064): NCBI GI: 156063378 Blast Desc: SS1G_01807 [Sclerotinia sclerotiorum 1980] gi|154697141|gb|EDN96879.1| SS1G_01807 [Sclerotinia sclerotiorum 1980]
  misc_feature (5)..(1321): NCBI GI: 242809371 Blast Desc: polyketide synthase, [Talaromyces stipitatus ATCC 10500] gi|218715980|gb|EED15402.1| polyketide synthase, [Talaromyces stipitatus ATCC 10500]
  misc_feature (5)..(1208): NCBI GI: 121712301 Blast Desc: polyketide synthase, [Aspergillus clavatus NRRL 1] gi|119401914|gb|EAW12336.1| polyketide synthase, [Aspergillus clavatus NRRL 1]
  misc_feature (5)..(1249): NCBI GI: 119473815 Blast Desc: polyketide synthase, [Neosartorya fischeri NRRL 181] gi|119406936|gb|EAW16886.1| polyketide synthase, [Neosartorya fischeri NRRL 181]
  misc_feature (6)..(2399): NCBI GI: 255940140 Blast Desc: Pc16g04890 [Penicillium chrysogenum Wisconsin 54-1255] gi|211585462|emb|CAP93159.1| Pc16g04890 [Penicillium chrysogenum Wisconsin 54-1255]
  misc_feature (5)..(1208): NCBI GI: 146323155 Blast Desc: polyketide synthase [Aspergillus fumigatus Af293] gi|129556492|gb|EAL86424.2| polyketide synthase, [Aspergillus fumigatus Af293]
  misc_feature (5)..(1208): NCBI GI: 159128403 Blast Desc: polyketide synthase, [Aspergillus fumigatus A1163]
  misc_feature (3)..(1319): NCBI GI: 121704114 Blast Desc: polyketide synthase, [Aspergillus clavatus NRRL 1] gi|119398465|gb|EAW08895.1| polyketide synthase, [Aspergillus clavatus NRRL 1]
  misc_feature (6)..(1328): NCBI GI: 40388707 Blast Desc: polyketide synthase [Mycosphaerella zeae-maydis]
  misc_feature (5)..(1265): NCBI GI: 238504606 Blast Desc: polyketide synthase, [Aspergillus flavus NRRL3357] gi|220691005|gb|EED47354.1| polyketide synthase, [Aspergillus flavus NRRL3357]
  misc_feature: Useful for fungicidal and/or biocontrol applications
MGRPIPIAVVGVAFRLPGGANCLESLEDLINNGRSGFVPVPEDRWNRGAFFNTQQSAKGGMPTQYGYFLEEDISKFDARFFNVSPQEASTMDPKQRILLQTTYEALENAGMSMEHVKGSNTSVYVSTFTYDFERMGFRDMQTLSGFHTTSVGPAILANRLSYFFDLKGPSFTLDTGCSGGLVALHQACQNLRLGESNLAIVGGAQLLIDPDQSTNMSTLGMLNADGHCYAFDSRGSGYGRGEGVATLILKRLDEALADGDPVQTVIVNSGLNQDGKSAGSLMSPSAEAQTDLIRSVYAQVRLDPGETSYVEAHGTVSIKCFLSMLQKGLTELHREPKSVSDTNEVSSIYQVFCEGRQRQNDLVVGSVKANIGHLEAVAGLAGFVKSINVLNSKLIPPQLNFLEPKPTLKLEERRIKIPTQLLALPPGPCRASVNSFGYGGTNAHVIIESLSSYLEKSRKLVSEMGLSNGKINGHHFKTNGTQSQHTTGLNGINGAICVKKHAGDETPLRLFLMSANSEASLKAYGQKLSAWTLKQKPCADKMTDLSHTLLTRRSLLLWRYAFIASDYYDLNDKLSDVRPARTSTSNRIAFVFTGQGAQWQGMGRELTRYPVFERSIMKSENYLLQMGCVWYLTDEILFDQASSRLGEAEVAQPATTALQIALIDLLASLGIFPNYVVGHSSGEIGAAYAAGALTHESAIKAAYRRGIYSGKAKRKNRHPGSMMAVGLGKQLASSYIKKVKNGRLCIACVNSPESTTISGDVGALDELKQMLDAESIFARRLRVDTAYHSHHMQVVADEYLESLRDIATDSTRQGVTFCSTVIGSPKKDGFTAEYWVQNLVSQVQFVEGLQLVAKKMNESLPYGDPQFTFIEIGPAGALAGPAKQTLSDIDFKHTYLPVLNRKTNASKTLLTMVGKLIELGHGCDLKSIAHIAPRPTSGNAEVLRDIPGYAFDESSHWAESRVSVAHRFRKFPYNDLCGILDPASGWYEPRWRHTLDLDALPWLKDHAIGGDIVFPASGYVAMVVEAMKQLVQVQELQGSIKNFLISDMTLAQAVAISPEEHNAKVELQLTITPSKAGLRWHEFKIFSYNNQGNRWVENCYGLVATETRVEDDDVEEDLEDITRVQEKLSLFQVIQSASTELLERDAFYSQLKASGNHYGNSFALLGDVYKDENHGWCSLSVPDYSALFRGHHMQPHVIHPTLLDSFSHIGALLAKKPCRDASIVVGKISDMTISADFARGSRAGLYLATTQQPQDLSTVESQSVVLQTHADGQVFPALTASYTYRAFGVTSDSDKEGPFSYKKVYSLVRQPDVDFLRSEDLSGETSQSVVDVLTKYLNAMAFKRPRLRILEIGCSAEGVTTPLLSSLTNAGREQWAGHYDIVSLCTEPEGLLERWREHINVRQLDIKKDLPSEAKETKYDVIIAADVVDDRASASTTLINIHDLLRDGGKLVLVGSSHLDLQMKQVREVLQRNSYSDIDILVETTKPKAFILIASAIANVTTESMGSSAVNIVNGSDSAASTMISWGLSEIALKSRCSWDFSHVTLNETVISQNSTYIILDTAENSLLMNRDPKSFTKVRELLSADTNILWVSLQDTMTRTASSVKSMMQGASRVIRRENEGTTSLTLFEVDDQVTWASALDICQQLLKIVVAPDGSLEHEYVYRDSNVMIPRLKLDQKFLRGVGSRSSGQDNVFKVPYHNANRPLRLEIGQPGLLNSLRFVDDKPPQDLKPCDIQLSSRAHGINFKDVFISLGQMPPSASMVGEVSGIVTAVGRDMAKRYNIGDHVMGFFANPFASNPHINGDLAHVVPKNMEFNIAATIPCVYTTAYHCLFEVARLRKGQSILITAASGGVGQAAIQLAQHAGAGEIFVTLGSSQKKKLVMEEYDIPASHVFSSRKLDFKQGILRMTGGRGVDVVLNSLTGDMLTDAFDCVAKLGTFCEIGKGDIYKGKHLRLNSFDRSVTFASVDLVAIAQERPDILYSHLGSIVELFENRRLRSLKPINTYPIGQIEEAFRLIAGRKHTGKLILESPETSIVEATLPLPKKLVLPAHAAYIIAGGLGDIGRRVAVLLSSRGAKHIVLLSRRALPVEAKKQLHDSVAHYGSTIHIVRCDISVESDVAKCANYCRENQLIVKGIVQSAMLLRDRPFSNMTYDEFCAPLGPKVYGTINLDKAFASSQLDFFIMLSSSATVIGNGSQANYAAGNAFQDAFANSRAGSHTTYVALNLGAVEGSHAVAETSEAQNNRLKSISITMDELLSSIEYAMGSQAHDDKLSLAIMGLSRQGFVDANDEYSLKNPLFSHLPAADDEGGAASKGEHDIVHRIAEASTPEEAQALITEAVVTKCASFLGCAVEEVSQTQPLYEIGFDSLVSIELKNWLLRTFESPVQTAEISGASSIIALAAMTTSRSKLVNARERTAGNVENLEPNGVIMRTNGHHHSFQTHGIRKTEDFGLQIFKCCVTSPPLKLPMFDLEDYLDCYRITVEEFAKTNEEKADIVKAVNEFRDPKSLGAKTYAALIERANDPTIECWLADTETNSVFLHFRHPLAPWNSFIHTHHDASTPHSQAERAAVLTTVAFGFLQGMERNEIENDWLGSRPLCSDYWRWMFNAVRLPVVHCDKMKIYSQSRYVAVLRKGHAFKIKLQGQQGNLSLEQAAAMFQQILDVDVGENCWASILTTDFRDTWAVNREAIIAISESNSAYFQTIEEATFVVCLDEGKPETHEETIAQGIAGDGFNRWFDKTVQFVVYANGRSAHISDHTMIDGTTPLRLTEFIHDAIISHQHLASGYGSAAVSTPEYFPLHTTSDIDEYVQKVRSRYRQTTLTRGYRYIKSSALSQGLAAGTGLSSKHCLDFAIQLAARLHFGYLPAAWEPISVQHFHRGRPDPRQAVSSHVVAFCDAALDKSVPLVEKRRLMEIAAAEWDEQTKRTQEGSGFLRRTEALLGIIAKLAPPPKDDVPIVQYTEEQLANWSWADSLASIVGENTVMPTLFTNEVFNRVYPGNMEQVRNEGEFVDAAGYVMNDNCIWISNRVRENYVTLSIVGDADKVGDYEECFHRAVTIIRSIMAAK

SEQ ID NO: 10797 - DNA, 3816 bp, Muscodor strobelii
  misc_feature: SGI cDNA ID NO. 563444
  misc_feature: Encodes the peptide sequence at SEQ ID NO 10798
atgattgcagcagacgcatattggagagaagctttggccggcgccgagcatacaccttatcctcccctacccccatttgccgaccaggcagagcctactaaagtggtggaatgccgcataaaaaatgctgatacatcgtcactcatttatgctgcatgggcgctaatcgctggacggatgattgattctgaggatgtcattttcggaatttctgcatacgaggcatctactgtcgtgccgcttcgtgtacgcttgggacagagcaaaactgttgcaactttcttgaaagctgtccagcgggagacagaaaacgtgactaaattctcatcactcggtgtcaagggaatatctcggctctctcctgaatgtgctgaaacttgcttgtttcagaccgtcctcgctcttgatcatccggcgagcccttttattgaccagccaaagaaatatggctttacaattcaattggtaaaagctggtggcgatataaatgcttcagcatcgctggatccgacaatgattgagccacggcttgccttcaggctgctctgtcgtcttgaattcgtcatcatgcagctcaccagggctgaaccagagacaccgatgaatagtctccagatgatccctccgcatgagttgaacctccttcaggaatggaacagctgcgctccagcggtagtggaaagacgcatccacgatttcttcaaagagcacgttgccacgacacctcactcatcagccgtctgtgcttgggacggggagttgacatacctgcagctagatgagctatctaccaatctcgctcatcatctgattgacttgaacgttgggccagagaaggttgtccctctctgctttgagaagtccatgtggaccgttgtggccatgctcgctgttctgaaggcgggtggtgcgtttgtgctactcgacccaagcttgcccgatactcgaattgcgaaagtatgtcaacaagtcaaggcaaaaatttccataacgtctgtgtcctgcaaacctcgcttgtcttcttccacaaaacacaacatcgcattgtgccaagagactgccgaagctctaggatcgaaaactacagtcattacgaatgtgaatcaccgcaacgctgcttacatcatattcacttcgggcagtacaggagaaccgaagggatgcgtagttgagcacagatcttattgctcagcggcctttggacacggcaagagcctcggcatgagctccgaaacacgtgctcttcaatttggttcttatgacttcgcaggagccattatggagacactcatgaccctgatgtacgggggctgtgtctgcattccatcagctgaagaccgcgctaccgccttggcccaagttattgaaagactgaacgccaattgggcttttcttacttcgaccgttttagcgatcctccgcccagaggaagtaccgtcactacgtactatatgtgtcggcggtgaggccatacgacactcgcaaatcaaagaatgggcaccaagcgtacgtttgcgacagacatatggcagtgcagagactgctgccgttgtagcgtcttcagatctggatccctcagctgctgtcaccagtgtcgggatcccgaccactgccaaatgctggcttacgcatcctgcggacatcaaccagctcgtcccaatcggcgcccccggtgaagtcgttttcgaaggcccggtaattggccgcgaataccttggtaatccagaaaagacggcccaagccttcattgatacgccgtcttggagggcagccttcggcactccggccgcgtcgtcccgattctaccgaacgggtgacattgcgactttccgaactgatggatctctcgatcttcaaggccggaaagatacgcaagtgaagatccggggtcagcgtgtcgagcttggcgaaatcgagcatcaggcacgattgacttcgctgggcctgaaagaagttgcagttgatatagcgacgactggtgttcgcggccctgtactagtgtgttttatagttctccaagcaggcaaggagtcgccggatcttatcgtggctactatgcgccgtcaactacaagacgtccttccgccctacatggtccctggtctattcttctctacatctgctctaccacttacggtatctggtaagctcgatcgaagacggctacggcagatgggtgccacaatggccgcggagcaacagcagaaatcccagtcggcattaggtgaccagaactcgcagccaacgacagaggttgagcttcaattgcagacaatctggtctgtagtattgaagatggagccgaggtccattgggaccaacacgagcttctttcagcttggtggtgattctgtttctgctatgaaagtcgtcaccgaggctcgaaaatgtggtatgactttgacaatgaaagaccttttcaaaagggacacaattgcagcgttggcagatcaagtcctcgcccaccctccgagtccctccaagcaatcgcaccaagattttcttgacggatctttcttgtcggctcgcgacaaagtggacttggccagcgtgggcgttgatgcttcgaacgtggaagacatttaccccctcactggggtgcaggaacttctggttgccactaccgtggccactaaacagatggtggattattttatccttggtcttgatcaccataatctggatttacagaagttagaggctagctgcgtgaaggtcatgcagaaactccccatccttcgttcttgctggcttaacctcggcggccgattctggcaggttatcttacgcacaatacccaaaatatttcgcactgtcagtgtttcgtcagagacagcagatgcctgccgagagttttgcctgcacgaccaaggctcggtcttcacgactcacccaactgccgcgtggatactggtgaagcatgataacggtagcgtaaagttattgttccgggcatctcacgcgcagtacgatgctttcagtattccgatcatctttcaagcagtcatggatgactatgcaggaacagatactctgactcagctgaggtttcctagctttctgtcatacatctcccaccagcgccccaagtcgatccagcattggaaggaagcgttgaggggttccaacttcacacctcttgcacctcacatgaatatatcgcccgagtgcctcgcattaccgcctgctatagttgtagcccagtctgtggcccacgtaccaaaccgccccgcgagaatcactcccgcgtcacttgttcgcgtagcttgggccatagttatcgcatgtctgactggtaccaacgatgtaatttttggccacgtcgtcgctggccgtaacgcagatttcccggaggtggagaagatcgtgggctgctgtcttaacattcttcccgggcgcgtcaacttatcgtcgtctatgactgtagatgaactgttgcgtgagaatcaggagcagatcttcacgatgggcgacgctgatacgctcaattgtttcgatatattgaaagaatgcacgaattggcccgctggggccacgtacgactccattttacatcatcgggttgtagaaacagagcccgaggttcgtatgccagacggtggggtcgcacgcgtgcagactttaaacttcgcagtcatgcctccatttctgtttattgtctctgtttccaaggcagatcattttagccttgaattgtttggtaacactcacctcttaagtccggagagggcccagaaaatgattgatgatcttgctcggggcgtagagaagctttgcaacagcatggagatgccagccttttccctattagactag

SEQ ID NO: 10798 - protein, 1271 aa, Muscodor strobelii
  misc_feature: SGI Peptide ID NO. 563444
  misc_feature (255)..(654): Pfam Id: PF00501 Pfam Desc: AMP-binding enzyme
  misc_feature (858)..(1137): Pfam Id: PF00668 Pfam Desc: Condensation domain
  misc_feature (754)..(819): Pfam Id: PF00550 Pfam Desc: Phosphopantetheine attachment site
  misc_feature (1089)..(1137): Pfam Id: PF00668 Pfam Desc: Condensation domain
  misc_feature (858)..(1028): Pfam Id: PF00668 Pfam Desc: Condensation domain
  misc_feature (3)..(1263): NCBI GI: 59876531 Blast Desc: nonribosomal peptide synthetase 1 [Cochliobolus heterostrophus]
  misc_feature (38)..(1265): NCBI GI: 119501491 Blast Desc: nonribosomal peptide synthase, [Neosartorya fischeri NRRL 181] gi|119415668|gb|EAW25605.1| nonribosomal peptide synthase, [Neosartorya fischeri NRRL 181]
  misc_feature (3)..(1156): NCBI GI: 189208862 Blast Desc: HC-toxin synthetase [Pyrenophora tritici-repentis Pt-1C-BFP] gi|187976857|gb|EDU43483.1| HC-toxin synthetase [Pyrenophora tritici-repentis Pt-1C-BFP]
  misc_feature (7)..(1190): NCBI GI: 238845960 Blast Desc: peptide synthetase [Microsporum canis CBS 113480]
  misc_feature (7)..(1199): NCBI GI: 121710978 Blast Desc: nonribosomal peptide synthase, [Aspergillus clavatus NRRL 1] gi|119401255|gb|EAW11679.1| nonribosomal peptide synthase, [Aspergillus clavatus NRRL 1]
  misc_feature (7)..(1156): NCBI GI: 189208871 Blast Desc: HC-toxin synthetase [Pyrenophora tritici-repentis Pt-1C-BFP] gi|187976861|gb|EDU43487.1| HC-toxin synthetase [Pyrenophora tritici-repentis Pt-1C-BFP]
  misc_feature (3)..(1263): NCBI GI: 115436950 Blast Desc: [Aspergillus terreus NIH2624] gi|114188501|gb|EAU30201.1| [Aspergillus terreus NIH2624]
  misc_feature (5)..(1258): NCBI GI: 119472489 Blast Desc: nonribosomal peptide synthase, [Neosartorya fischeri NRRL 181] gi|119406495|gb|EAW16446.1| nonribosomal peptide synthase, [Neosartorya fischeri NRRL 181]
  misc_feature (38)..(1268): NCBI GI: 240105081 Blast Desc: D-lysergyl-peptide-synthetase, [Coccidioides posadasii C735 delta SOWgp]
  misc_feature (38)..(1268): NCBI GI: 119194973 Blast Desc: CIMG_01861 [Coccidioides immitis RS]
  misc_feature (4)..(1151): SWISSPROT Homolog: EC 5.1.1.13 Aspartate racemase
  misc_feature (4)..(1151): SWISSPROT Homolog: EC 5.1.1.11 Phenylalanine racemase (ATP-hydrolyzing)
MIAADAYWREALAGAEHTPYPPLPPFADQAEPTKVVECRIKNADTSSLIYAAWALIAGRMIDSEDVIFGISAYEASTVVPLRVRLGQSKTVATFLKAVQRETENVTKFSSLGVKGISRLSPECAETCLFQTVLALDHPASPFIDQPKKYGFTIQLVKAGGDINASASLDPTMIEPRLAFRLLCRLEFVIMQLTRAEPETPMNSLQMIPPHELNLLQEWNSCAPAVVERRIHDFFKEHVATTPHSSAVCAWDGELTYLQLDELSTNLAHHLIDLNVGPEKVVPLCFEKSMWTVVAMLAVLKAGGAFVLLDPSLPDTRIAKVCQQVKAKISITSVSCKPRLSSSTKHNIALCQETAEALGSKTTVITNVNHRNAAYIIFTSGSTGEPKGCVVEHRSYCSAAFGHGKSLGMSSETRALQFGSYDFAGAIMETLMTLMYGGCVCIPSAEDRATALAQVIERLNANWAFLTSTVLAILRPEEVPSLRTICVGGEAIRHSQIKEWAPSVRLRQTYGSAETAAVVASSDLDPSAAVTSVGIPTTAKCWLTHPADINQLVPIGAPGEVVFEGPVIGREYLGNPEKTAQAFIDTPSWRAAFGTPAASSRFYRTGDIATFRTDGSLDLQGRKDTQVKIRGQRVELGEIEHQARLTSLGLKEVAVDIATTGVRGPVLVCFIVLQAGKESPDLIVATMRRQLQDVLPPYMVPGLFFSTSALPLTVSGKLDRRRLRQMGATMAAEQQQKSQSALGDQNSQPTTEVELQLQTIWSVVLKMEPRSIGTNTSFFQLGGDSVSAMKVVTEARKCGMTLTMKDLFKRDTIAALADQVLAHPPSPSKQSHQDFLDGSFLSARDKVDLASVGVDASNVEDIYPLTGVQELLVATTVATKQMVDYFILGLDHHNLDLQKLEASCVKVMQKLPILRSCWLNLGGRFWQVILRTIPKIFRTVSVSSETADACREFCLHDQGSVFTTHPTAAWILVKHDNGSVKLLFRASHAQYDAFSIPIIFQAVMDDYAGTDTLTQLRFPSFLSYISHQRPKSIQHWKEALRGSNFTPLAPHMNISPECLALPPAIVVAQSVAHVPNRPARITPASLVRVAWAIVIACLTGTNDVIFGHVVAGRNADFPEVEKIVGCCLNILPGRVNLSSSMTVDELLRENQEQIFTMGDADTLNCFDILKECTNWPAGATYDSILHHRVVETEPEVRMPDGGVARVQTLNFAVMPPFLFIVSVSKADHFSLELFGNTHLLSPERAQKMIDDLARGVEKLCNSMEMPAFSLLD

SEQ ID NO: 10799 - DNA, 1268 bp, Muscodor strobelii
  misc_feature: SGI EST ID NO. CUFF.25605.0
  misc_feature: Variant of the nucleotide sequence at SEQ ID NO 10797
gctgcgtgaaggtcatgcagaaactccccatccttcgttcttgctggcttaacctcggcggccgattctggcaggttatcttacgcacaatacccaaaatatttcgcactgtcagtgtttcgtcagagacagcagatgcctgccgagagttttgcctgcacgaccaaggctcggtcttcacgactcacccaactgccgcgtggatactggtgaagcatgataacggtagcgtaaagttattgttccgggcatctcacgcgcagtacgatgctttcagtattccgatcatctttcaagcagtcatggatgactatgcaggaacagatactctgactcagctgaggtttcctagctttctgtcatacatctcccaccagcgccccaagtcgatccagcattggaaggaagcgttgaggggttccaacttcacacctcttgcacctcacatgaatatatcgcccgagtgcctcgcattaccgcctgctatagttgtagcccagtctgtggcccacgtaccaaaccgccccgcgagaatcactcccgcgtcacttgttcgcgtagcttgggccatagttatcgcatgtctgactggtaccaacgatgtaatttttggccacgtcgtcgctggccgtaacgcagatttcccggaggtggagaagatcgtgggctgctgtcttaacattcttcccgggcgcgtcaacttatcgtcgtctatgactgtagatgaactgttgcgtgagaatcaggagcagatcttcacgatgggcgacgctgatacgctcaattgtttcgatatattgaaagaatgcacgaattggcccgctggggccacgtacgactccattttacatcatcgggttgtagaaacagagcccgaggttcgtatgccagacggtggggtcgcacgcgtgcagactttaaacttcgcagtcatgcctccatttctgtttattgtctctgtttccaaggcagatcattttagccttgaattgtttggtaacactcacctcttaagtccggagagggcccagaaaatgattgatgatcttgctcggggcgtagagaagctttgcaacagcatggagatgccagccttttccctattagactagacgctgtagctatgacatatgtctcaatcacgtcagggcaagctctatagttgtggtggtagggtaggatagatatccaataactaagcaaaggaggtacggacgattattccgtcgttgtcgtttagatttacatagtcagctacatgctcatta

SEQ ID NO: 10800 - DNA, 1176 bp, Muscodor strobelii
  misc_feature: SGI cDNA ID NO. 563445
  misc_feature: Encodes the peptide sequence at SEQ ID NO 10801
atggcgaaagttgtcctcgaaagtctggcaaaggtccccgtggccttacgcgagtccacagcattatcaaaggcagaataccggagacttggaacctcggggttaagagtgtctaatcctattttgggcgctttgggcctggggagctcacgttggcttccatgggttcaagacgaagacaaagctctcaaagtcttaaagacggcatacgacaatgggataaacacgtgggacacagcaaacgtctactcaaatggcgaatcggagagaatcatagggaaagctctgcagaaatatcgaattccgagacagaaggtcgttataatgaccaagtgttaccgtgtcatgtgtgatcctgaaagatatgacccggcctcaacggtgactatgcatcatgaagccgcagatctgagcaaagattacgtgaatcaatggggtatacaagaaccaaagctttatttgaagcccactctaacattctggctaggtctttcacggggagcaatcatcagcgctgttgagggctccttgaagcgtctcaataccagctacattgatgtccttcaaattcatcgctttgatgagacggtgaatcctgaagagactatgcgtacccttgatgacctcgtgaggacaggtatggttcgctatattggcgcgagctcaatgtgggcttatcaatttgctctactgcagaacgtcgctgagaagaatgggtggacaaagtttatttcaatgcagaatcattacaatctcatatatcgcgaggaggagcgcgagatgaatccctactgtaagatgcatggcataggactcacaccgtgggcaccattagcctcgggaaagcttgcccgcgatcccaaggtgtcattagcgagcatcagttccaagagatccgaagtcagctcgagtggctcgatatatgatacgggtgatgatgggaactcgacagagatcatcgagcgggtgagagaggttgcgatgaagaaagggtggcccatgagtcatgtgagtctcgcgtggctcaacagacgagttacggctcccgttctgggctttaactccgaagagcgtgtcattgaggcgttatcggcgcgaggaaagatactcacgagagcagaagagctctatctggaagaagcataccttgcgagacccatccagggccattcatag

SEQ ID NO: 10801 - protein, 391 aa, Muscodor strobelii
  misc_feature: SGI Peptide ID NO. 563445
  misc_feature (35)..(383): Pfam Id: PF00248 Pfam Desc: Aldo/keto reductase family
  misc_feature (163)..(383): Pfam Id: PF00248 Pfam Desc: Aldo/keto reductase family
  misc_feature (35)..(111): Pfam Id: PF00248 Pfam Desc: Aldo/keto reductase family
  misc_feature (1)..(391): NCBI GI: 256725360 Blast Desc: NECHADRAFT_45914 [Nectria haematococca mpVI 77-13-4]
  misc_feature (13)..(391): NCBI GI: 34482014 Blast Desc: aldo-keto reductase [Alternaria alternata] gi|261336129|dbj|BAI44761.1| aldo-keto reductase [Alternaria alternata] gi|261336172|dbj|BAI44803.1| aldo-keto reductase
  misc_feature (10)..(391): NCBI GI: 46127375 Blast Desc: FG08065.1 [Gibberella zeae PH-1]
  misc_feature (13)..(391): NCBI GI: 34482012 Blast Desc: aldo-keto reductase [Alternaria alternata]
  misc_feature (8)..(391): NCBI GI: 256722534 Blast Desc: [Nectria haematococca mpVI 77-13-4]
  misc_feature (9)..(391): NCBI GI: 85091264 Blast Desc: NCU06009 [Neurospora crassa OR74A] gi|28920203|gb|EAA29581.1| NCU06009 [Neurospora crassa OR74A]
  misc_feature (8)..(390): NCBI GI: 256722456 Blast Desc: NECHADRAFT_66997 [Nectria haematococca mpVI 77-13-4]
  misc_feature (19)..(390): NCBI GI: 242798023 Blast Desc: aldo/keto reductase, [Talaromyces stipitatus ATCC 10500] gi|218716428|gb|EED15849.1| aldo/keto reductase, [Talaromyces stipitatus ATCC 10500]
  misc_feature (11)..(390): NCBI GI: 115389786 Blast Desc: ATEG_03220 [Aspergillus terreus NIH2624] gi|114194794|gb|EAU36494.1| ATEG_03220 [Aspergillus terreus NIH2624]
  misc_feature (15)..(391): NCBI GI: 116201715 Blast Desc: conserved [Chaetomium globosum CBS 148.51] gi|88177260|gb|EAQ84728.1| conserved [Chaetomium globosum CBS 148.51]
  misc_feature (33)..(286): SWISSPROT Homolog: EC 1.1.1.91 Aryl-alcohol dehydrogenase (NADP(+))
MAKVVLESLAKVPVALRESTALSKAEYRRLGTSGLRVSNPILGALGLGSSRWLPWVQDEDKALKVLKTAYDNGINTWDTANVYSNGESERIIGKALQKYRIPRQKVVIMTKCYRVMCDPERYDPASTVTMHHEAADLSKDYVNQWGIQEPKLYLKPTLTFWLGLSRGAIISAVEGSLKRLNTSYIDVLQIHRFDETVNPEETMRTLDDLVRTGMVRYIGASSMWAYQFALLQNVAEKNGWTKFISMQNHYNLIYREEEREMNPYCKMHGIGLTPWAPLASGKLARDPKVSLASISSKRSEVSSSGSIYDTGDDGNSTEIIERVREVAMKKGWPMSHVSLAWLNRRVTAPVLGFNSEERVIEALSARGKILTRAEELYLEEAYLARPIQGHS

SEQ ID NO: 10802 - DNA, 1378 bp, Muscodor strobelii
  misc_feature: SGI EST ID NO. CUFF.25614.0
  misc_feature: Variant of the nucleotide sequence at SEQ ID NO 10800
ctttggtctataattggtagcatcccttgctgagagtatttacaatcgctaagcacgcaggatctaccgaatatcggggtctgattcaaaggtggcgcatgtcctatacaacgcatcaggtaaaccgtgttccctgcgcttaggcagtaatctcctatcacccatacatgctgacccttgctacattgtacacggagctgatccgtggaatagtcctgctcgtgggcgacaaggaaaaaagctcagctgaaagccagaattggtggtgtagtcggccctcggtcttcgacggccatgatcggttgaagcaactgctctgggagctatctcgtgaactttggcgtcggcgctggaagatgtgtcatgtgcttcgctcgcaagggcaggacaacgcgtggtatgatgtaaaatgcttgcgaggctcacagaaagggcagcacgtgtttaactttggcgtaattgccgcgctatgagttgttttccgccctcggcggccatggtgtcgtcaggcctgtcaaaaagagtggagcaggaagaacatgtcatagttcatctgatagacatcagtgcgggagcatggtactagtgtgatacttgtcgtgagagtatcttttttctagagtttctgatggctcttctagggaaattttcatattagtattagtagtcgaaggcgggaatagtagtagaacatgtcatccgtgccgaaccgtggaagtcgtgataaacctgtcaatgggaaatccgatctgttcgtaccactagaaccgaaatcttctcatcacgctcaatatggcgaaagttgtcctcgaaagtctggcaaaggtccccgtggccttacgcgagtccacagcattatcaaaggcagaataccggagacttggaacctcggggttaagagtgtctaatcctattttgggcgctttgggcctggggagctcacgttggcttccatgggttcaagacgaagacaaagctctcaaagtcttaaagacggcatacgacaatgggataaacacgtgggacacagcaaacgtctactcaaatggcgaatcggagagaatcatagggaaagctctgcagaaatatcgaattccgagacagaaggtcgttataatgaccaagtgttaccgtgtcatgtgtgatcctgaaagatatgacccggcctcaacggtgactatgcatcatgaagccgcagatctgagcaaagattacgtgaatcaatggggtatacaagaaccaaagctttatttgaagcccactctaacattctggctaggtctttcacggggagcaatcatcagcgctgttgagggctccttgaagcgtctcaataccagctacattgatgtccttcaaattcatcgctttgatgaga

SEQ ID NO: 10803 - DNA, 1596 bp, Muscodor strobelii
  misc_feature: SGI cDNA ID NO. 563446
  misc_feature: Encodes the peptide sequence at SEQ ID NO 10804
atgaggttatcgcgtatatcgtgggcactcgtgtctagtctcgttgcaattcaaagcgagagcctcactttccaatcagatcccgtttcggagctcgttaatcggggcatcagatccccgatcctagacgctgtacatttcacatcaagcagcgatgctacctgcctctgctcacaggcttgcgacatcctcgcggcaacatttgggccagatcaagttcataccttgggagacgatgcctaccatgcggcaatggcccgttactggtcagtgcagcaatcgaaggacacaaagccacgctgttttttccagccagaaaatgcgaaagaagtatcagtcgctgtgctactttcgcgtgcaactcaatgtccctttgcggtgaagggtgccggacacgccgccttcaagggagcttcaaatagcgatggcggcattaccattgattttattcgtatgacctatgtcattcccagctcggatcgaaaaactgcatctctcggccctggcaacacatggcagaatgtctataatcacctagaacgatataatctgacaatggtaggagggcgtgtggcttcagtcggtgttggaggtctacttttgggagacggatgggcttgtgataacataattgactacgaagtcgtcctagcatctggcgaaatcctcgatgttaatgctcttacttaccctgacctcttctgggcattgcgtggtgggggcggtaactttggtatcgtcacccaattcacggcgaacgtcttcgagcaggaattgatgtggggaggattcatgggctgggaaatgcatagcacgaaagcagcagcaatggatgctatggctgaatatgccactgtgaaggcggtggaagaccccaaggcggctcttatcgtctcttttgcttatgctcagtcctataacatgtggactacatttgtgcatagtgcgcactccgacacgttcgagcccgggagtcacccccaatcgttggacacctttgcgaggatggacaacaaatttcttaatactctcaggacaacttcgcactccaacttgacagtcgagatcgacaacttcgcaccatttggttctagacaaagcttttggacattcacctattacttcgaccagcaactcgcatcggatattctcactatgtttgaagaagagatagcccctcttatcaatcttacgggaatagtgccagccttagcttaccaagtagtcagtgtatcgaccctcaaaagtatgaaccgacaaggaggcaatgttttaggtatcagcgacgagaccaggcctctacaagttatgaatccatctgttcagtgggctctggagtcggacgacgccctcgttatcgggacattccgcagattcacactccgtgcccaagccttagctaaggagcgcgggctgcatcatccattcctctacatgaactacgcgagtccttggcaggatcccgtagccgggaatggcgagaagagaaagagtaaactcctcgatgtgtcaaggaaatacgacccggacggggtctttcaaaacctccatccaggtttcttcaagcttagcggggcaccactggaatgggtttga

SEQ ID NO: 10804 - protein, 531 aa, Muscodor strobelii
  misc_feature: SGI Peptide ID NO. 563446
  misc_feature (99)..(226): Pfam Id: PF01565 Pfam Desc: FAD binding domain
  misc_feature (56)..(527): NCBI GI: 145228549 Blast Desc: An01g01430 [Aspergillus niger] gi|134054674|emb|CAK43515.1| protein product [Aspergillus niger]
  misc_feature (57)..(527): NCBI GI: 189209696 Blast Desc: FAD binding domain containing protein [Pyrenophora tritici-repentis Pt-1C-BFP] gi|187977273|gb|EDU43899.1| FAD binding domain containing protein [Pyrenophora tritici-repentis
  misc_feature (57)..(523): NCBI GI: 238842428 Blast Desc: 6-hydroxy-D-nicotine oxidase [Microsporum canis CBS 113480]
  misc_feature (61)..(524): NCBI GI: 240278798 Blast Desc: FAD binding domain-containing protein [Ajellomyces capsulatus H143]
  misc_feature (57)..(523): NCBI GI: 242801896 Blast Desc: conserved [Talaromyces stipitatus ATCC 10500] gi|218717209|gb|EED16630.1| conserved [Talaromyces stipitatus ATCC 10500]
  misc_feature (10)..(527): NCBI GI: 189194099 Blast Desc: FAD binding domain containing protein [Pyrenophora tritici-repentis Pt-1C-BFP] gi|187978952|gb|EDU45578.1| FAD binding domain containing protein [Pyrenophora tritici-repentis
  misc_feature (57)..(523): NCBI GI: 212545761 Blast Desc: conserved [Penicillium marneffei ATCC 18224] gi|210064554|gb|EEA18649.1| conserved [Penicillium marneffei ATCC 18224]
  misc_feature (57)..(525): NCBI GI: 169616017 Blast Desc: SNOG_11178 [Phaeosphaeria nodorum SN15] gi|111060557|gb|EAT81677.1| SNOG_11178 [Phaeosphaeria nodorum SN15]
  misc_feature (1)..(525): NCBI GI: 242822124 Blast Desc: FAD binding domain protein [Talaromyces stipitatus ATCC 10500] gi|218712740|gb|EED12165.1| FAD binding domain protein [Talaromyces stipitatus ATCC 10500]
  misc_feature (49)..(524): NCBI GI: 225560049 Blast Desc: FAD binding domain-containing protein [Ajellomyces capsulatus G186AR]
MRLSRISWALVSSLVAIQSESLTFQSDPVSELVNRGIRSPILDAVHFTSSSDATCLCSQACDILAATFGPDQVHTLGDDAYHAAMARYWSVQQSKDTKPRCFFQPENAKEVSVAVLLSRATQCPFAVKGAGHAAFKGASNSDGGITIDFIRMTYVIPSSDRKTASLGPGNTWQNVYNHLERYNLTMVGGRVASVGVGGLLLGDGWACDNIIDYEVVLASGEILDVNALTYPDLFWALRGGGGNFGIVTQFTANVFEQELMWGGFMGWEMHSTKAAAMDAMAEYATVKAVEDPKAALIVSFAYAQSYNMWTTFVHSAHSDTFEPGSHPQSLDTFARMDNKFLNTLRTTSHSNLTVEIDNFAPFGSRQSFWTFTYYFDQQLASDILTMFEEEIAPLINLTGIVPALAYQVVSVSTLKSMNRQGGNVLGISDETRPLQVMNPSVQWALESDDALVIGTFRRFTLRAQALAKERGLHHPFLYMNYASPWQDPVAGNGEKRKSKLLDVSRKYDPDGVFQNLHPGFFKLSGAPLEWV

SEQ ID NO: 10805 - DNA, 667 bp, Muscodor strobelii
  misc_feature: SGI EST ID NO. CUFF.25629.0
  misc_feature: Variant of the nucleotide sequence at SEQ ID NO 10803
ttcgtctcctctaggctttcaacacagattagagcacgattcactagaagatgaggttatcgcgtatatcgtgggcactcgtgtctagtctcgttgcaattcaaagcgagagcctcactttccaatcagatcccgtttcggagctcgttaatcggggcatcagatccccgatcctagacgctgtacatttcacatcaagcagcgatgctacctgcctctgctcacaggcttgcgacatcctcgcggcaacatttgggccagatcaagttcataccttgggagacgatgcctaccatgcggcaatggcccgttactggtcagtgcagcaatcgaaggacacaaagccacgctgttttttccagccagaaaatgcgaaagaagtatcagtcgctgtgctactttcgcgtgcaactcaatgtccctttgcggtgaagggtgccggacacgccgccttcaagggagcttcaaatagcgatggcggcattaccattgattttattcgtatgacctatgtcattcccagctcggatcgaaaaactgcatctctcggccctggcaacacatggcagaatgtctataatcacctagaacgatataatctgacaatggtaggagggcgtgtggcttcagtcggtgttggaggtctacttttgggagggggcatttc

SEQ ID NO: 10806 - DNA, 2031 bp, Muscodor strobelii
  misc_feature: SGI cDNA ID NO. 563447
  misc_feature: Encodes the peptide sequence at SEQ ID NO 10807
atggacagcttcaaaaatttctgttataaaagccttcctgaggggccatttctgaggacagcgacaatagaaccagctattccaggggctgacgttattgtttctctagatgtcatctctttcgctgcaaacgctgcagtcacttatgaggctctgagttattgttggggtacggatgtccgggagtcgcccgacttcatctatgtgaaagacaatgctcagcaccggaatgagcagcaccagaatcttccgagcctaagtgttggtgtcaacctttatcaggcacttttggctctgcggttcagggacaaaccgcgacaaatgtggattgatgccatctgtatcaatcaggtggatagcgacgaaaaggacgtgcaggttgctatgatgggagatgtatatcggcgcgcccgccgagtatcaatttggctaggcccgaagactggtgatagcgacggcgcaatgcactacattcagtctcttggatctcaagtcgaagttagcagcatcgtcaaaatgcagttaacaccccgctaccaagaaactcggggtctggctgatcgtaaccaggacttagagatctccagcacacaggccaagagtgttctcaatttgattcagcgtccttggttcgagagactctggattcgccaggaggtatatctttctgaagtcacggcagtggtagtatgcggtagtgttgaggtaccatggaaggacttccactcgggcctgatcattctaagtttgaagcgcaaactaggaccaggtatgacagtgcccatggtcaacgaactcgaagaacgtcttcgagaaatttcttcaatttttgaaacagaaagacatccatcacttcaccgtctgagactatgtttcggtaccgcgaagtgcgcagatccccgtgatcgtattttcgcagtcttagagctactacatccctctcagcaacgtctcggaattcgtccagactataaagcgacgaaagcggagacttacactagagtcacttctcagtatctccagactttcgggttagctgatattcttgtcgaatgtcagcttgacccacaatcggactgcccaagctgggtgccagactggtcgaagcaattgaatatcacaaatcaccggatgatgagttttgccagctcgttagccttggctgagttcaagaccgatagcatcagagggatattgcgacttgccggtacaccagtctttacgctcgaggcaattggcccgactaaggataggctagacactcatgctatgtcaatcgactttgtcagaaggatttgggaaatggtaaacgggctattttcaaaagaatattatttagagtcggatctcgaagaagcactccttcatactttatgcgttgaccacgccaacctctctcatccacctgatgatactttccctgatctagagcagatcaagggcttcatgccggaagtaatgggcctaatggccataagagatctagccgttgaccatgttacaaacctggtgttacgtgatatatcagttcaaaaattcgtttctagagcaaatggtatgctaaacggccggcgactctcccgaacaaacacggggctgcctgccctcgttccggacagcgcgagacctggtgatgttgtgtgtgtgcttctgggatgtgaggcgccaatgctgctacgacctatgaaaaccgatggcaaatttcaagtagttggacagtgctttatgtcttgcattgctcacggtgaagctattcttgggccactacctccacatattcggtttgtgtgggcgaaaaatgttgctactggtgaaagatggggatttttgaatgacagaaccggacaatactcgagatgggaccctaggcttgacctcttacctatcaatctccagcaaggtcggaggtatgtcatggaaaacagagataagtacatatactgtaacttgagcgccgacctccttcgtgaacatgggactaggtgggacggagcgaagggggtcaatatgcagttcttcaatcttgtgtag

SEQ ID NO: 10807 - protein, 676 aa, Muscodor strobelii
  misc_feature: SGI Peptide ID NO. 563447
  misc_feature (49)..(219): Pfam Id: PF06985 Pfam Desc: Heterokaryon incompatibility protein (HET)
  misc_feature (49)..(156): Pfam Id: PF06985 Pfam Desc: Heterokaryon incompatibility protein (HET)
  misc_feature (6)..(590): NCBI GI: 256730222 Blast Desc: NECHADRAFT_82497 [Nectria haematococca mpVI 77-13-4]
  misc_feature (6)..(676): NCBI GI: 171678935 Blast Desc: protein product [Podospora anserina] gi|170937538|emb|CAP62196.1| protein product [Podospora anserina]
  misc_feature (49)..(623): NCBI GI: 115492481 Blast Desc: [Aspergillus terreus NIH2624] gi|114197728|gb|EAU39428.1| [Aspergillus terreus NIH2624]
  misc_feature (49)..(676): NCBI GI: 39974569 Blast Desc: MGG_00569 [Magnaporthe grisea 70-15] gi|145018530|gb|EDK02809.1| MGG_00569 [Magnaporthe grisea 70-15]
  misc_feature (95)..(625): NCBI GI: 256719970 Blast Desc: NECHADRAFT_98482 [Nectria haematococca mpVI 77-13-4]
  misc_feature (49)..(676): NCBI GI: 154311024 Blast Desc: BC1G_06630 [Botryotinia fuckeliana B05.10] gi|150851034|gb|EDN26227.1| BC1G_06630 [Botryotinia fuckeliana B05.10]
  misc_feature (84)..(633): NCBI GI: 145609067 Blast Desc: MGG_09107 [Magnaporthe grisea 70-15] gi|145016510|gb|EDK00940.1| MGG_09107 [Magnaporthe grisea 70-15]
  misc_feature (44)..(629): NCBI GI: 46139411 Blast Desc: FG11220.1 [Gibberella zeae PH-1]
  misc_feature (82)..(596): NCBI GI: 261353850 Blast Desc: conserved [Verticillium albo-atrum VaMs.102]
  misc_feature (66)..(628): NCBI GI: 256727220 Blast Desc: NECHADRAFT_32743 [Nectria haematococca mpVI 77-13-4]
MDSFKNFCYKSLPEGPFLRTATIEPAIPGADVIVSLDVISFAANAAVTYEALSYCWGTDVRESPDFIYVKDNAQHRNEQHQNLPSLSVGVNLYQALLALRFRDKPRQMWIDAICINQVDSDEKDVQVAMMGDVYRRARRVSIWLGPKTGDSDGAMHYIQSLGSQVEVSSIVKMQLTPRYQETRGLADRNQDLEISSTQAKSVLNLIQRPWFERLWIRQEVYLSEVTAVVVCGSVEVPWKDFHSGLIILSLKRKLGPGMTVPMVNELEERLREISSIFETERHPSLHRLRLCFGTAKCADPRDRIFAVLELLHPSQQRLGIRPDYKATKAETYTRVTSQYLQTFGLADILVECQLDPQSDCPSWVPDWSKQLNITNHRMMSFASSLALAEFKTDSIRGILRLAGTPVFTLEAIGPTKDRLDTHAMSIDFVRRIWEMVNGLFSKEYYLESDLEEALLHTLCVDHANLSHPPDDTFPDLEQIKGFMPEVMGLMAIRDLAVDHVTNLVLRDISVQKFVSRANGMLNGRRLSRTNTGLPALVPDSARPGDVVCVLLGCEAPMLLRPMKTDGKFQVVGQCFMSCIAHGEAILGPLPPHIRFVWAKNVATGERWGFLNDRTGQYSRWDPRLDLLPINLQQGRRYVMENRDKYIYCNLSADLLREHGTRWDGAKGVNMQFFNLV

SEQ ID NO: 10808 - DNA, 508 bp, Muscodor strobelii
  misc_feature: SGI EST ID NO. CUFF.25635.0
  misc_feature: Variant of the nucleotide sequence at SEQ ID NO 10806
gaaaaggacgtgcaggttgctatgatgggagatgtatatcggcgcgcccgccgagtatcaatttggctaggcccgaagactggtgatagcgacggcgcaatgcactacattcagtctcttggatctcaagtcgaagttagcagcatcgtcaaaatgcagttaacaccccgctaccaagaaactcggggtctggctgatcgtaaccaggacttagagatctccagcacacaggccaagagtgttctcaatttgattcagcgtccttggttcgagagactctggattcgccaggaggtatatctttctgaagtcacggcagtggtagtatgcggtagtgttgaggtaccatggaaggacttccactcgggcctgatcattctaagtttgaagcgcaaactaggaccaggtatgacagtgcccatggtcaacgaactcgaagaacgtcttcgagaaatttcttcaatttttgaaacagaaagacatccatcacttcaccgtctgagactat

SEQ ID NO: 10809 - DNA, 651 bp, Muscodor strobelii
  misc_feature: SGI cDNA ID NO. 563448
  misc_feature: Encodes the peptide sequence at SEQ ID NO 10810
atggcgctcgccccaaaattcgcagcccaaaagctcgccttcgcggccccatccgcctccggctcagtgccacccgcagcacacaccttagagctcttcctcgactacgtctgccccttctccgcccgccaattcaacacaatctacaacgtcgtcgcaccgctcgtgaagtccaatcctaaatgggcgcccaacgtacaattcatcatccgtcagcagatccagccatggcacccctcctcaaccctcgcccacgaagccgccgtcgcagttctccaggtcgcgccagagaaatactggagcttcagcgatgcgctcttcaaggatcagaaggcatacttcgacgtcaatgttgttaatgagacgcgcaatgagacttataagcgtcttgctaagcttgcgggatctgtgggtgttgatgagagtgcggtgtatgataagttggctatctctgataagcctgctgaggatggaagtctgaacgtggggaataaggttactaatgatctgaaggtgctggtcaagatggcgaggctggtaggtgtgcatgtcagtccgacggtcatcttcgatggggttgttgcgaatgatatttcatcgggctggacgaaggagcagtgggaggagtggttgacgaagaacattgtttga

SEQ ID NO: 10810 - protein, 216 aa, Muscodor strobelii
  misc_feature: SGI Peptide ID NO. 563448
  misc_feature (1)..(216): NCBI GI: 46134935 Blast Desc: FG09316.1 [Gibberella zeae PH-1]
  misc_feature (1)..(216): NCBI GI: 256735563 Blast Desc: [Nectria haematococca mpVI 77-13-4]
  misc_feature (1)..(215): NCBI GI: 156054895 Blast Desc: SS1G_06295 [Sclerotinia sclerotiorum 1980] gi|154704075|gb|EDO03814.1| SS1G_06295 [Sclerotinia sclerotiorum 1980]
  misc_feature (1)..(216): NCBI GI: 171695888 Blast Desc: protein product [Podospora anserina] gi|170948186|emb|CAP60350.1| protein product [Podospora anserina]
  misc_feature (1)..(215): NCBI GI: 169603159 Blast Desc: SNOG_04588 [Phaeosphaeria nodorum SN15] gi|111067228|gb|EAT88348.1| SNOG_04588 [Phaeosphaeria nodorum SN15]
  misc_feature (1)..(215): NCBI GI: 85119630 Blast Desc: NCU02547 [Neurospora crassa OR74A] gi|28927490|gb|EAA36442.1| conserved [Neurospora crassa OR74A]
  misc_feature (1)..(216): NCBI GI: 226281650 Blast Desc: conserved [Paracoccidioides brasiliensis Pb01]
  misc_feature (1)..(215): NCBI GI: 189203275 Blast Desc: conserved [Pyrenophora tritici-repentis Pt-1C-BFP] gi|187985072|gb|EDU50560.1| conserved [Pyrenophora tritici-repentis Pt-1C-BFP]
  misc_feature (1)..(213): NCBI GI: 145616036 Blast Desc: MGG_13507 [Magnaporthe grisea 70-15] gi|145009809|gb|EDJ94465.1| MGG_13507 [Magnaporthe grisea 70-15]
  misc_feature (1)..(216): NCBI GI: 154285924 Blast Desc: conserved [Ajellomyces capsulatus NAm1] gi|150407398|gb|EDN02939.1| conserved [Ajellomyces capsulatus NAm1]
MALAPKFAAQKLAFAAPSASGSVPPAAHTLELFLDYVCPFSARQFNTIYNVVAPLVKSNPKWAPNVQFIIRQQIQPWHPSSTLAHEAAVAVLQVAPEKYWSFSDALFKDQKAYFDVNVVNETRNETYKRLAKLAGSVGVDESAVYDKLAISDKPAEDGSLNVGNKVTNDLKVLVKMARLVGVHVSPTVIFDGVVANDISSGWTKEQWEEWLTKNIV

SEQ ID NO: 10811 - DNA, 1387 bp, Muscodor strobelii
  misc_feature: SGI EST ID NO. CUFF.25650.0
  misc_feature: Variant of the nucleotide sequence at SEQ ID NO 10809
aagatgatttgcaattaattgttacacgatgtctcaagatttccaatagtcaacagcagaggaaggtgagtctcgccatgaaacgaagccgtagacccacagcaggaatgcaggcacagccggggaatggcggattgcctgcatgatgcaggaaatggcgtcaccctcaatgcttcaggcgcctcacagatacagtaatatcatcgcggggtcaactcaagcccctcccttacgttttcaattgcttataatctaaatagtaacgctcccatctctttctacagtatctctacagaaagctcaagcaatatcatcatcaaaatggcgctcgccccaaaattcgcagcccaaaagctcgccttcgcggccccatccgcctccggctcagtgccacccgcagcacacaccttagagctcttcctcgactacgtctgccccttctccgcccgccaattcaacacaatctacaacgtcgtcgcaccgctcgtgaagtccaatcctaaatgggcgcccaacgtacaattcatcatccgtcagcagatccagccatggcacccctcctcaaccctcgcccacgaagccgccgtcgcagttctccaggtcgcgccagagaaatactggagcttcagcgatgcgctcttcaaggatcagaaggcatacttcgacgtcaatgttgttaatgagacgcgcaatgagacttataagcgtcttgctaagcttgcgggatctgtgggtgttgatgagagtgcggtgtatgataagttggctatctctgataagcctgctgaggatggaagtctgaacgtggggaataaggttactaatgatctgaaggtgctggtcaagatggcgaggctggtaggtgtgcatgtcagtccgacggtcatcttcgatggggttgttgcgaatgatatttcatcgggctggacgaaggagcagtgggaggagtggttgacgaagaacattgtttgaatggaggagtggatatccgagtcgaggctttgagatgttgtgtatagaatgcaacattgctcttagttgctgtgatacaagcctacgtgtgggaaacaaaatgtaaggcttacaagtgtggaagtatgtcatgtctcatttgctatgaagttcagtcgtaactcctttttttagtgattgattcactggtatgtgacgctccaactaaacactgagcctcaatgcggtgatatgagtaaaacatgttttgaagtccatggatgccaatagtcgcaggatcaatctgactttcgttctcttgctcgggttgacaccacgcattcgttcattcagcacatatccatatatgagtctgatgcatgcgcatgggcggtttctttttagaactcaatcgcataggaagagcctatccgtc

SEQ ID NO: 10812 - DNA, 3729 bp, Muscodor strobelii
  misc_feature: SGI cDNA ID NO. 563449
  misc_feature: Reduced expression when VOC is produced
  misc_feature: Encodes the peptide sequence at SEQ ID NO 10813
atgacagaccagaatgcgaacatccatacccagagcgccactgcgcgcccgatgccaaagagcgccctgccccgatcatccgccagctatgggagcgggagctacggaagcaacaatgccgaatctagcactgctgtgaacgacgttcccgactcctccatagacagtgtagctgctgttcgatcgggctcccaaagtccgcaagacgccgcaagctccgatcctctctcgcccagatacagagaacagggtcgcagctacgaactacgccctgatagacggcgctcgcgcaagtctcgaccaagcagtggcttcctgctgcccgactctgccgcaaacgctcgttctgcaccgagtccagcttccagggaggagaacagacggacatctcgaatacctatcgacacgcgcaagggaaagagtccgctaaggcactctgaggatgcggatcggttagggtcatctgcgtccggtgatagtccaggctctcgtgagatggatggactatatgcagcgaacgtgccaaacggacgtcatgatgccccgggtgaccggccgaagagccaggcggctgctagtagacgaacatccagaataccgtctgtgcgacctacctcggcacccctggatgtggattcgacccagatcgtatctatggctcttaatctgagcgagtccagacggttggcatcgaggaggaatgtatcaaaccccgtgccgccgcgtcttgcccagcttcctgacaacactgccggagggaatctcaagcagcacttgcagcaacagcggcggacttcgcgtaccgtctcaccccaggcccttcgcaccatgaccccaagaattgtgtccacgccgaccatgagcagccctctacattcgacgttcgataatgaaggcaactacacttatcatttctcatcttcaactctcaaccgagcgcagagagccaaagaatatctcgagttgatggctcaataccgacgacttctcttattcgtccctcctctcaaacagcagccgagctccaggccgtccacttccggtcctctaacctcaccaggccccaattcgtcacctttggacgctcttgcaactcaaaataatcgagttcttggccgaccctacaatccactacagtatattcgaaatcggaagattcggactcgtgagcgaagaacgatcgatggcgaagagcagggatttaccgacgtttccagagtgacagattgggtcgatgaggtggcaacagtagctgctacttccaactctactgagaattcgacgttgccgccatatgcaggagcagatgagaatttcggacaacagtacccgtcgaatattccgagacctgcttcagcgaacaaaccgaaacggccaagatttgattggagtatagaacctgcagatatgctcgcggacgcatattggttggagcaagacgataacaaatacctgatagagaaccgtcactattccaagatattcaccttccgcccaaccaccaaggcaccggagcccaaatctgccctttcttccaccgtgtccaaaacgactcctgaagctgagcacggcttcccagatctgatgccctctcaatctaccaaagttgatggagacgcaactcgcacgagggatcgagctcgtcagaagcttcaggacttgaaaggcctacatcacaagcacagcagctcgcttcattctcaccacgactacttgcggttcagattaggctcatctcccgatacctcggatagcgagactgattggcggagaagaggtcgtggtgggaccatcagtgcaagtggccaggatctgctagagaagcaaatgcgagaactactggagaaagaaacccgtgagcagtcggagagatcggctggtgaagcagatgttaactatttcaaaccgatgcctgaaggaatagttaccccagacagagagtccgaatcatcgcttgttggacatcatcgaaagggatctctaatcgaaacgccagaatatctaactaaaacaacacacatgagacctaaccaaagttcgcctatcaactctggacgccctagcttagaagtaccggcccatacctaccgatcctctgtggatctagattcatctcgcccgggctctcccgatgtacgatccaaacgacgacacagtggttacactgcggctatcggcatggacttgttacctaatgttagtcgccctagctcgccaagtcgtaatcccttctcgaaagtccgaagcattttccgtgagcgcagccgagagcgcgaggaaataacccaagacgatgtggaccggataatcagcccaatagaaccaacaaacaccagtaacatgacttcaataacagaagagtcaattccaatacgaaagcgtcaaaggtccaaaagtgccactcgggatctcacgaccagagccacctttgaaagtcacaagtctcatcgcagtgtcggaagcatgaagttgcgaccagaagatcaacttggtcttcgaactatattcaaaggaggcgcaaggctcgatggcatgatccggggaggtgttaacaaggtgacggatctcatctggagaaaagactctgatacctctgactcatccgacgacgaggttgatcgggcgtcccgacggggtagagcacaaatgtcagcccctatttcccctgaaggcaccgcatcgccgaatgaagttccacgtggggccaagaactatctggacataatgccgagcttcaagtcagcctcagaaatgtcctctcagactactgagctatcatatccaggacatttccttacgcaaccacccagcaggtcaccacgtttcgaccaactcaaaccgcccaggattgacatccgtaaagcctcgccgattactactgataatgagcaagacagttcacgagttgtttcagactcagaagtatccgaacctggtcgttggccacgcctaccaggccagccgctggacggaccacggaaatcatcgaaagagttacagaacatacttgccattgcaccacggaggcgaaacaaacctcctgcgcctgagtatcaacacttgtccataccgactcgagacttcaccaatcaacctatcagcatatctcgccgagaagttgcgcgtctgcgtacactggtgttgtgctctggcatcaaggctatggaaattacccgccgtgccaatgatccacatcccttgttcgcactagagaacaagacaacaggtctaccatggacggatatgagtcgcttcgcaccagacgaacaagtcagtctctgcgtccctcaaacagaggtcttccccacaacagcgcgtatcctatccgagagcatcgatggctcagtgcagaaattcgaaacctccgcgtccgaattctcctctaagagagtcccagcagtcgacagccaaattagttcattgcacaataaactggcattagacctcatggatatgacgcatcgcgctacggacgaggcggatgaagtggggaatgatattgtggatacccagaggctgaaggtcaagactgtcacagatgccatggataagatgcttcgaacgaggcgtaggagatttagatgggtccgcagagctgggtggttggcactcgagtggatgcttgtcggctttatgtggtatgtctggttagtcgttgtgcttaccaggatcttgataggggggttcagggctgtagtgggcgtgggtaggtggttgttttggctttga

SEQ ID NO: 10813 - protein, 1242 aa, Muscodor strobelii
  misc_feature: SGI Peptide ID NO. 563449
  misc_feature (95)..(1242): NCBI GI: 171694846 Blast Desc: protein product [Podospora anserina] gi|170947665|emb|CAP59827.1| protein product [Podospora anserina]
  misc_feature (219)..(1218): NCBI GI: 116182658 Blast Desc: CHGG_01957 [Chaetomium globosum CBS 148.51] gi|88186254|gb|EAQ93722.1| CHGG_01957 [Chaetomium globosum CBS 148.51]
  misc_feature (56)..(1242): NCBI GI: 256735462 Blast Desc: NECHADRAFT_30551 [Nectria haematococca mpVI 77-13-4]
  misc_feature (200)..(1242): NCBI GI: 85114777 Blast Desc: NCU00929 [Neurospora crassa OR74A] gi|28926548|gb|EAA35519.1| NCU00929 [Neurospora crassa OR74A] gi|38567285|emb|CAE76574.1| [Neurospora crassa]
  misc_feature (95)..(1242): NCBI GI: 261358703 Blast Desc: conserved [Verticillium albo-atrum VaMs.102]
  misc_feature (192)..(1242): NCBI GI: 46107612 Blast Desc: FG00689.1 [Gibberella zeae PH-1]
  misc_feature (25)..(1213): NCBI GI: 156057249 Blast Desc: SS1G_04355 [Sclerotinia sclerotiorum 1980] gi|154702141|gb|EDO01880.1| SS1G_04355 [Sclerotinia sclerotiorum 1980]
  misc_feature (201)..(1215): NCBI GI: 154295909 Blast Desc: BC1G_13324 [Botryotinia fuckeliana B05.10] gi|150843874|gb|EDN19067.1| BC1G_13324 [Botryotinia fuckeliana B05.10]
  misc_feature (209)..(495): NCBI GI: 39950008 Blast Desc: MGG_01172 [Magnaporthe grisea 70-15] gi|145021038|gb|EDK05167.1| MGG_01172 [Magnaporthe grisea 70-15]
  misc_feature (724)..(1242): NCBI GI: 240110294 Blast Desc: CPC735_063260 [Coccidioides posadasii C735 delta SOWgp]
  misc_feature: Useful for introducing or modulating the production of volatile compounds
MTDQNANIHTQSATARPMPKSALPRSSASYGSGSYGSNNAESSTAVNDVPDSSIDSVAAVRSGSQSPQDAASSDPLSPRYREQGRSYELRPDRRRSRKSRPSSGFLLPDSAANARSAPSPASREENRRTSRIPIDTRKGKSPLRHSEDADRLGSSASGDSPGSREMDGLYAANVPNGRHDAPGDRPKSQAAASRRTSRIPSVRPTSAPLDVDSTQIVSMALNLSESRRLASRRNVSNPVPPRLAQLPDNTAGGNLKQHLQQQRRTSRTVSPQALRTMTPRIVSTPTMSSPLHSTFDNEGNYTYHFSSSTLNRAQRAKEYLELMAQYRRLLLFVPPLKQQPSSRPSTSGPLTSPGPNSSPLDALATQNNRVLGRPYNPLQYIRNRKIRTRERRTIDGEEQGFTDVSRVTDWVDEVATVAATSNSTENSTLPPYAGADENFGQQYPSNIPRPASANKPKRPRFDWSIEPADMLADAYWLEQDDNKYLIENRHYSKIFTFRPTTKAPEPKSALSSTVSKTTPEAEHGFPDLMPSQSTKVDGDATRTRDRARQKLQDLKGLHHKHSSSLHSHHDYLRFRLGSSPDTSDSETDWRRRGRGGTISASGQDLLEKQMRELLEKETREQSERSAGEADVNYFKPMPEGIVTPDRESESSLVGHHRKGSLIETPEYLTKTTHMRPNQSSPINSGRPSLEVPAHTYRSSVDLDSSRPGSPDVRSKRRHSGYTAAIGMDLLPNVSRPSSPSRNPFSKVRSIFRERSREREEITQDDVDRIISPIEPTNTSNMTSITEESIPIRKRQRSKSATRDLTTRATFESHKSHRSVGSMKLRPEDQLGLRTIFKGGARLDGMIRGGVNKVTDLIWRKDSDTSDSSDDEVDRASRRGRAQMSAPISPEGTASPNEVPRGAKNYLDIMPSFKSASEMSSQTTELSYPGHFLTQPPSRSPRFDQLKPPRIDIRKASPITTDNEQDSSRVVSDSEVSEPGRWPRLPGQPLDGPRKSSKELQNILAIAPRRRNKPPAPEYQHLSIPTRDFTNQPISISRREVARLRTLVLCSGIKAMEITRRANDPHPLFALENKTTGLPWTDMSRFAPDEQVSLCVPQTEVFPTTARILSESIDGSVQKFETSASEFSSKRVPAVDSQISSLHNKLALDLMDMTHRATDEADEVGNDIVDTQRLKVKTVTDAMDKMLRTRRRRFRWVRRAGWLALEWMLVGFMWYVWLVVVLTRILIGGFRAVVGVGRWLFWL

SEQ ID NO: 10814 - DNA, 2229 bp, Muscodor strobelii
  misc_feature: SGI cDNA ID NO. 563450
  misc_feature: Encodes the peptide sequence at SEQ ID NO 10815
atggcggagactccgtttaccccttactggaaggctctcgagcctccagctggccccaactcctggattttcttcgctgtgaccaaaattgaagatgactatcagcccgtcgccgccgtttccagtatcggtgggtttcaagaagagtcgctacatgggacgcctcttactgtctgctgtcagcgcatcgttacaatcttctccgatcctaccaatcacactgccattcgcggcgaggtcgctctcgccgaggcttattatgctagacgtgagatgagcaaggacccggaccgtctgataccagtagagcttctagaattatcccggaggcaccccggggatcctcgtcgatttcgatcatgggaccgcaccagcattgtgccgtttccgttcatctcggctgcacttcttcaaggtgtagcgtttgatccgcgcctgggtcgtggtgcaccggctcgcgtagaacctctagctaccgtgtatcgtgacagcgacctggaatgggggatggttgttgtagatatcacaaatctgcagagggtgcgatacggaatcgttgggtttcccgtagccatggccaagtttgtcccgtcgcgggaagctgaagggaggcccttcaatctcagtgccagcttttacttcgaagaggggcctttgagagtgatggatgatgtgcgccgcaggaaaactttatctgcggctgagtatatggagaaattcaactaccatgctgcagatcattacggtacatcgagcgatttcaaggatgtgcagtatttgacttcgataccactagtggacagcgcagccttgagtgttgtatggccatctgctgatggtattggcgcgcgtcggcctgacaaacctataccgccccaaagcctaagcatgcaacaagaacatatcatcaggaacctaattcaggaaacactgcaatccgaggacattgataaggtggcctttgataatttccgccatctttccgggtttacatctcttattcaacaaattctccaagaatgtcgcgatactcttataaatacccgtgctgttggccgtctgcttcgccttatctatactcgtgatgttagccatctcggcctggagcttctggatggcctgtcagccaataccgtgttgacagctgtaaactacaatacagagacaagcgagatcatcaaatcgttgagtctttgtgtagatagcattcggggcacacctgaagagctgtccagggcgctatctcaggcaacacctttagaagaaatatgtctacttcagaacccagattgcgaaagcgatgctttgagcgcgcaggttctcattgcgttagctacacagactgatgttctatgccggactaaagtagttttcgcaggcgcgttctcatccgccttgcgcaagaagttttggctcgacagcagtctaaaggtgttacctcatcaagcatatccattgcaacaaattatgttccgtcatcagaaacgtgagggccgctccgtcaaattcgaatacaactacatttacctaggggatgggctcctcagacccgaaagcttcgccgccggtttcctcctctggctatccacattagagccgaaatcgaattattggtttgaggagcaagccccattcctcatattctccagcgctccggcgaaattaaccctcaacctgttttctaccgcccaagtgacgcccatactctgcgagaactttgccctgccagcctacaagccagacgacagtgccagctcgccacgagtacgagacttagtacctggagcctggacggtcctggtatcacgagacttgcagtctggcccacgtggcactacgactcgcccaattcgctatgcttttattcggatacgtcgactcaagcccatcgaagtagaagaccctccaagctctcctccaagctccgaagagctcgaggtactcggcttaaaggaattcctatccattgtagcgcctgaatcagacccttctctcgttgatatctgcctacataaagcggccagagcaatagcttccgtagatagtggtgacgagtcattggtatcgggaattgagcctctgtcggttttgagtcagacagatgcagcggcaatgctgctagagtgtctcgaagacgcaaaaacacccaacagccaatataggaaggcgatgaaaggggatcatgagaattggagttggtacccagagctttcggattccacttactaa

SEQ ID NO: 10815 - protein, 742 aa, Muscodor strobelii
  misc_feature: SGI Peptide ID NO. 563450
  misc_feature (6)..(715): NCBI GI: 171684557 Blast Desc: protein product [Podospora anserina] gi|170942239|emb|CAP67891.1| protein product [Podospora anserina]
  misc_feature (22)..(737): NCBI GI: 171677881 Blast Desc: protein product [Podospora anserina] gi|170937009|emb|CAP61667.1| protein product [Podospora anserina]
  misc_feature (24)..(664): NCBI GI: 256725318 Blast Desc: expressed protein [Nectria haematococca mpVI 77-13-4]
  misc_feature (112)..(734): NCBI GI: 116203523 Blast Desc: CHGG_09645 [Chaetomium globosum CBS 148.51] gi|88175773|gb|EAQ83241.1| CHGG_09645 [Chaetomium globosum CBS 148.51]
  misc_feature (63)..(444): NCBI GI: 115402763 Blast Desc: [Aspergillus terreus NIH2624] gi|114189304|gb|EAU31004.1| [Aspergillus terreus NIH2624]
  misc_feature (292)..(664): NCBI GI: 261361600 Blast Desc: [Verticillium albo-atrum VaMs.102]
  misc_feature (63)..(632): NCBI GI: 255941424 Blast Desc: Pc16g11800 [Penicillium chrysogenum Wisconsin 54-1255] gi|211586104|emb|CAP93850.1| Pc16g11800 [Penicillium chrysogenum Wisconsin 54-1255]
  misc_feature (24)..(188): NCBI GI: 261361600 Blast Desc: [Verticillium albo-atrum VaMs.102]
MAETPFTPYWKALEPPAGPNSWIFFAVTKIEDDYQPVAAVSSIGGFQEESLHGTPLTVCCQRIVTIFSDPTNHTAIRGEVALAEAYYARREMSKDPDRLIPVELLELSRRHPGDPRRFRSWDRTSIVPFPFISAALLQGVAFDPRLGRGAPARVEPLATVYRDSDLEWGMVVVDITNLQRVRYGIVGFPVAMAKFVPSREAEGRPFNLSASFYFEEGPLRVMDDVRRRKTLSAAEYMEKFNYHAADHYGTSSDFKDVQYLTSIPLVDSAALSVVWPSADGIGARRPDKPIPPQSLSMQQEHIIRNLIQETLQSEDIDKVAFDNFRHLSGFTSLIQQILQECRDTLINTRAVGRLLRLIYTRDVSHLGLELLDGLSANTVLTAVNYNTETSEIIKSLSLCVDSIRGTPEELSRALSQATPLEEICLLQNPDCESDALSAQVLIALATQTDVLCRTKVVFAGAFSSALRKKFWLDSSLKVLPHQAYPLQQIMFRHQKREGRSVKFEYNYIYLGDGLLRPESFAAGFLLWLSTLEPKSNYWFEEQAPFLIFSSAPAKLTLNLFSTAQVTPILCENFALPAYKPDDSASSPRVRDLVPGAWTVLVSRDLQSGPRGTTTRPIRYAFIRIRRLKPIEVEDPPSSPPSSEELEVLGLKEFLSIVAPESDPSLVDICLHKAARAIASVDSGDESLVSGIEPLSVLSQTDAAAMLLECLEDAKTPNSQYRKAMKGDHENWSWYPELSDSTY

SEQ ID NO: 10816 - DNA, 5447 bp, Muscodor strobelii
  misc_feature: SGI EST ID NO. CUFF.25696.0
  misc_feature: Variant of the nucleotide sequence at SEQ ID NO 10814
aaacacccaacagccaatataggaaggcgatgaaaggggatcatgagaattggagttggtacccagagctttcggattccacttactaacactacctatcatcccacaatgggacgttcatgtagccctataaggcaggtaccttatgtgtctacgaaagcctacccgacgaaagaataaacgcaagaatcgccatcgctattccgaccttggtagggtcttggaatggcccattgtacaagcaatgaggaatgtaatatactttgtaacacgcaaacatctttctgcgtatttgcagtccgtttcaagccaggtccattggagtcttgactactgtgggtgcgatctttctgccactgtctttcgtcacatcattactggccttgcaaattgaatcatttactccaagcagttggacaccccggcaagtggcgctgggtttatcgttattattataaattcccagtatcttttacattactctcttacgtacacggaggcgctgcgagtcttagaggaactcgggcggattgaagagggattggaagagtgaaaaactgtctttcaggatactagctagatacgaagttgcgatatagcgatagagtggccttcggtagtcttgaaagcagttaagcgttaaaaacacagctgcttaagcatacgtaaggcagatatggagcaacattgaggtagcgattaactcatgcatgcactttctttgtaaccataacgccacatgtgcacccctaagcttaggccatcaaatcaacaactaggccattatcaataccacctactacccggtcatgaattcaaacacagtagagcagcgctatccggaaaagtattcgattacaaaacctaatccaaagcaatctatgactctcataagaaagacaaggaacgtaaggggtatctatcttcaaaacgctcttatccacctttccacctgtcacctatgtatctacacacacaccaatccaaacaacggcctcttatgtactgccatcacaccatatacacgccctcctagacttgcgattcacatcactcatcaaagccaaaacaaccacctacccacgcccactacagccctgaacccccctatcaagatcctggtaagcacaacgactaaccagacataccacataaagccgacaagcatccactcgagtgccaaccacccagctctgcggacccatctaaatctcctacgcctcgttcgaagcatcttatccatggcatctgtgacagtcttgaccttcagcctctgggtatccacaatatcattccccacttcatccgcctcgtccgtagcgcgatgcgtcatatccatgaggtctaatgccagtttattgtgcaatgaactaatttggctgtcgactgctgggactctcttagaggagaattcggacgcggaggtttcgaatttctgcactgagccatcgatgctctcggataggatacgcgctgttgtggggaagacctctgtttgagggacgcagagactgacttgttcgtctggtgcgaagcgactcatatccgtccatggtagacctgttgtcttgttctctagtgcgaacaagggatgtggatcattggcacggcgggtaatttccatagccttgatgccagagcacaacaccagtgtacgcagacgcgcaacttctcggcgagatatgctgataggttgattggtgaagtctcgagtcggtatggacaagtgttgatactcaggcgcaggaggtttgtttcgcctccgtggtgcaatggcaagtatgttctgtaactctttcgatgatttccgtggtccgtccagcggctggcctggtaggcgtggccaacgaccaggttcggatacttctgagtctgaaacaactcgtgaactgtcttgctcattatcagtagtaatcggcgaggctttacggatgtcaatcctgggcggtttgagttggtcgaaacgtggtgacctgctgggtggttgcgtaaggaaatgtcctggatatgatagctcagtagtctgagaggacatttctgaggctgacttgaagctcggcattatgtccagatagttcttggccccacgtggaacttcattcggcgatgcggtgccttcaggggaaataggggctgacatttgtgctctaccccgtcgggacgcccgatcaacctcgtcgtcggatgagtcagaggtatcagagtcttttctccagatgagatccgtcaccttgttaacacctccccggatcatgccatcgagccttgcgcctcctttgaatatagttcgaagaccaagttgatcttctggtcgcaacttcatgcttccgacactgcgatgagacttgtgactttcaaaggtggctctggtcgtgagatcccgagtggcacttttggacctttgacgctttcgtattggaattgactcttctgttattgaagtcatgttactggtgtttgttggttctattgggctgattatccggtccacatcgtcttgggttatttcctcgcgctctcggctgcgctcacggaaaatgcttcggactttcgagaagggattacgacttggcgagctagggcgactaacattaggtaacaagtccatgccgatagccgcagtgtaaccactgtgtcgtcgtttggatcgtacatcgggagagcccgggcgagatgaatctagatccacagaggatcggtaggtatgggccggtacttctaagctagggcgtccagagttgataggcgaactttggttaggtctcatgtgtgttgttttagttagatattctggcgtttcgattagagatccctttcgatgatgtccaacaagcgatgattcggactctctgtctggggtaactattccttcaggcatcggtttgaaatagttaacatctgcttcaccagccgatctctccgactgctcacgggtttctttctccagtagttctcgcatttgcttctctagcagatcctggccacttgcactgatggtcccaccacgacctcttctccgccaatcagtctcgctatccgaggtatcgggagatgagcctaatctgaaccgcaagtagtcgtggtgagaatgaagcgagctgctgtgcttgtgatgtaggcctttcaagtcctgaagcttctgacgagctcgatccctcgtgcgagttgcgtctccatcaactttggtagattgagagggcatcagatctgggaagccgtgctcagcttcaggagtcgttttggacacggtggaagaaagggcagatttgggctccggtgccttggtggttgggcggaaggtgaatatcttggaatagtgacggttctctatcaggtatttgttatcgtcttgctccaaccaatatgcgtccgcgagcatatctgcaggttctatactccaatcaaatcttggccgtttcggtttgttcgctgaagcaggtctcggaatattcgacgggtactgttgtccgaaattctcatctgctcctgcatatggcggcaacgtcgaattctcagtagagttggaagtagcagctactgttgccacctcatcgacccaatctgtcactctggaaacgtcggtaaatccctgctcttcgccatcgatcgttcttcgctcacgagtccgaatcttccgatttcgaatatactgtagtggattgtagggtcggccaagaactcgattattttgagttgcaagagcgtccaaaggtgacgaattggggcctggtgaggttagaggaccggaagtggacggcctggagctcggctgctgtttgagaggagggacgaataagagaagtcgtcggtattgagccatcaactcgagatattctttggctctctgcgctcggttgagagttgaagatgagaaatgataagtgtagttgccttcattatcgaacgtcgaatgtagagggctgctcatggtcggcgtggacacaattcttggggtcatggtgcgaagggcctggggtgagacggtacgcgaagtccgccgctgttgctgcaagtgctgcttgagattccctccggcagtgttgtcaggaagctgggcaagacgcggcggcacggggtttgatacattcctcctcgatgccaaccgtctggactcgctcagattaagagccatagatacgatctgggtcgaatccacatccaggggtgccgaggtaggtcgcacagacggtattctggatgttcgtctactagcagccgcctggctcttcggccggtcacccggggcatcatgacgtccgtttggcacgttcgctgcatatagtccatccatctcacgagagcctggactatcaccggacgcagatgaccctaaccgatccgcatcctcagagtgccttagcggactctttcccttgcgcgtgtcgataggtattcgagatgtccgtctgttctcctccctggaagctggactcggtgcagaacgagcgtttgcggcagagtcgggcagcaggaagccactgcttggtcgagacttgcgcgagcgccgtctatcagggcgtagttcgtagctgcgaccctgttctctgtatctgggcgagagaggatcggagcttgcggcgtcttgcggactttgggagcccgatcgaacagcagctacactgtctatggaggagtcgggaacgtcgttcacagcagtgctagattcggcattgttgcttccgtagctcccgctcccatagctggcggatgatcggggcagggcgctctttggcatcgggcgcgcagtggcgctctgggtatggatgttcgcattctggtctgtcatagcgagcgacagcttgcggagctcggcgagactagaaatagcccgataaatcccagctatatgtatcgaggtggaggttcgaaggaggtcggcgtagacattatggataggttaattgctgaggggggatgttgtttggatatcgagagataaggaatgacgcaagtgattcagttggcgaaggcggtggtgattagtcggctcaatagtgcgagtaggatgtaatagtgtagtgtagtcaggaatagtcagaaataggtaaatgtgctcttcaaacgacacctaggcggcattatctacgtaataaatgacaaccttgctggtccggccatcaaaggtattccatccaaggtagctccggcgcagttaggtgcgatgcgatgcgatgcgatgctgtcgattcagggacaggacacggaggcgagaagggaggaaccctcgagagggaacacaaagaagcttccaggggacttctacgagctgggcaagtcccgtgcagttggcagttgcgtcgctggtggcttggcacacatgtgaaaggctaaagcttacttaatgccgacagcgcccaccccggtaagtgccgtggggcagatactgtaggtagcgcatgtgtcttgggcctcataattatctctttagtcaatgcgattaagtaggc

SEQ ID NO: 10817 - DNA, 1689 bp, Muscodor strobelii
  misc_feature: SGI cDNA ID NO. 563451
  misc_feature: Elevated expression when VOC is produced
  misc_feature: Encodes the peptide sequence at SEQ ID NO 10818
atgccgtccttcaagaagtatctcgcggccctgtcccttcaactcgccatcagtgccgcgagcccaacatgctattccggcaaagagcccaagctcggcgccgtggcatcggaaagctcggtatgctctcacatcggaattgaccttctcaaagccggtggtaacgccgcagatgccatggtcggaaccgtgttctgtattggtgtcattggcatgtatcacagtggtataggaggcggtggtttcatgttggtgcgtgggagcaatggctcgtatgagttcattgatttccgcgagactgcgccggctgctgcgtttgaggatatgtataataataatacggacgccagtttatatggaggattggcgagtggcgtacccggtgagctccgtggcatagagtacctccacaagaactatggcaaactcccatgggccaaagtcatggcccctgccatcaaagtcgctcgatatggtttcaaagtgacagaggatttggtcaagtacatggactcactatccgacgactcgttcctcacggacgaccctgcatgggcgattgatttcgcgcctaatggttaccgcgttaagcttggcgagacgataacgcgtaagcggtacgcagacacgttggaggtcatcgccgctgagggtcctgacgcattttacacgggagctattgcaagcgcgacgatagcagctttgacaaaagccaatggaacaatgacactagacgacctgaagaactacactgtggctattcgcaaacccgccgagatcacatatcgaggacacaagttgacggcatgcagtgcgccgtccggtggtatcgtggctgctagcgctctcaagatcgtagatggatatgaaggcttcggcgatcccgcagcgatcaacctgacaacccaccgtctggacgaagcaatgagattcgcatatggacagcgttctgagctaggagatccgctgttcgtggagggacttgacaagtaccaggagcagatgatttccgatgcgacagccgccgaagtccggtccaagatctccgacttcaagacgcagaacgtttcatactacgatcctgctggattggagagtctggaaacacccggtactagtcacgttgtgacagctgataagagcggcatggctattagtttgacgacgacgatcaacttgatcttcggctcccagctcatggtccctgagacgggtgtcatcatgaatgatgagatgaacgacttctctatcccaggtagcagcaatgcattcggatacatcccaagtcccgcaaacttcatccgaccgggcaagcgacccctatcttccatctcgcctacaatcgtcgagacgccagagggtaaactgtatctcgtcatcggttcagcgggcgggagtcgcatcatcacagcgacgatccagaatgtgcaccacgttctcgaccagaatatgacgacgcccgaggcgctggctagcccgagactgcacgatcagctcagtcctaatcaggtctcgtttgagtacgcgtatgataatagtacggttgcttatatgcagtcgcttggacataatgttacatgggtggcgcctggtcagagcacggcgcagggtctacggttgttaagtaatggcacttttgaggcggctggtgagcctagacaagtgaactctggagggtttgctgtttag

SEQ ID NO: 10818 - protein, 562 aa, Muscodor strobelii
  misc_feature: SGI Peptide ID NO. 563451
  misc_feature (47)..(556): Pfam Id: PF01019 Pfam Desc: Gamma-glutamyltranspeptidase
  misc_feature (29)..(562): NCBI GI: 189193717 Blast Desc: gamma-glutamyltranspeptidase 1 precursor [Pyrenophora tritici-repentis Pt-1C-BFP] gi|187978761|gb|EDU45387.1| gamma-glutamyltranspeptidase 1 precursor [Pyrenophora Pt-1C-BFP]
  misc_feature (18)..(562): NCBI GI: 238482179 Blast Desc: gamma-glutamyltranspeptidase [Aspergillus flavus NRRL3357] gi|220700378|gb|EED56716.1| gamma-glutamyltranspeptidase [Aspergillus flavus NRRL3357]
  misc_feature (31)..(562): NCBI GI: 255954433 Blast Desc: Pc21g09300 [Penicillium chrysogenum Wisconsin 54-1255] gi|211589680|emb|CAP95827.1| Pc21g09300 [Penicillium chrysogenum Wisconsin 54-1255]
  misc_feature (28)..(562): NCBI GI: 121711391 Blast Desc: gamma-glutamyltranspeptidase [Aspergillus clavatus NRRL 1] gi|119401462|gb|EAW11885.1| gamma-glutamyltranspeptidase [Aspergillus clavatus NRRL 1]
  misc_feature (2)..(559): NCBI GI: 145605166 Blast Desc: MGG_02134 [Magnaporthe grisea 70-15] gi|145013022|gb|EDJ97663.1| MGG_02134 [Magnaporthe grisea 70-15]
  misc_feature (24)..(562): NCBI GI: 240108926 Blast Desc: gamma-glutamyltranspeptidase family protein [Coccidioides posadasii C735 delta SOWgp]
  misc_feature (25)..(562): NCBI GI: 119181283 Blast Desc: CIMG_05765 [Coccidioides immitis RS]
  misc_feature (29)..(562): NCBI GI: 115395802 Blast Desc: conserved [Aspergillus terreus NIH2624] gi|114193109|gb|EAU34809.1| conserved [Aspergillus terreus NIH2624]
  misc_feature (28)..(562): NCBI GI: 145248041 Blast Desc: An13g01300 [Aspergillus niger] gi|134081018|emb|CAK41530.1| protein product [Aspergillus niger]
  misc_feature (32)..(561): NCBI GI: 46134003 Blast Desc: FG09141.1 [Gibberella zeae PH-1]
  misc_feature (29)..(554): SWISSPROT Homolog: EC 2.3.2.2 Gamma-glutamyltransferase
  misc_feature: Useful for introducing or modulating the production of volatile compounds
MPSFKKYLAALSLQLAISAASPTCYSGKEPKLGAVASESSVCSHIGIDLLKAGGNAADAMVGTVFCIGVIGMYHSGIGGGGFMLVRGSNGSYEFIDFRETAPAAAFEDMYNNNTDASLYGGLASGVPGELRGIEYLHKNYGKLPWAKVMAPAIKVARYGFKVTEDLVKYMDSLSDDSFLTDDPAWAIDFAPNGYRVKLGETITRKRYADTLEVIAAEGPDAFYTGAIASATIAALTKANGTMTLDDLKNYTVAIRKPAEITYRGHKLTACSAPSGGIVAASALKIVDGYEGFGDPAAINLTTHRLDEAMRFAYGQRSELGDPLFVEGLDKYQEQMISDATAAEVRSKISDFKTQNVSYYDPAGLESLETPGTSHVVTADKSGMAISLTTTINLIFGSQLMVPETGVIMNDEMNDFSIPGSSNAFGYIPSPANFIRPGKRPLSSISPTIVETPEGKLYLVIGSAGGSRIITATIQNVHHVLDQNMTTPEALASPRLHDQLSPNQVSFEYAYDNSTVAYMQSLGHNVTWVAPGQSTAQGLRLLSNGTFEAAGEPRQVNSGGFAV

SEQ ID NO: 10819 - DNA, 2362 bp, Muscodor strobelii
  misc_feature: SGI EST ID NO. CUFF.25657.0
  misc_feature: Variant of the nucleotide sequence at SEQ ID NO 10817
tgacgttccccaacatacacccctgtcggatgcccgttgctatggaatattccatatctcttggcgaaggatctagggccactagtgagagattgcgatcgcgatagttgagcttgattcaaaataagatcagtaatcccctgtgacgtgtgggcgtgagcgttttccgcgatattcatgattcttgaattggcaaatcgtcgctgctgaggttaaggaaacgatcttgccagttcgtctgtcaatttctctttgggtcgtaccgcctctctatctcaaccggcgagcgcagtctcccgtcaagcaaaccccgaagatgccgtccttcaagaagtatctcgcggccctgtcccttcaactcgccatcagtgccgcgagcccaacatgctattccggcaaagagcccaagctcggcgccgtggcatcggaaagctcggtatgctctcacatcggaattgaccttctcaaagccggtggtaacgccgcagatgccatggtcggaaccgtgttctgtattggtgtcattggcatgtatcacagtggtataggaggcggtggtttcatgttggtgcgtgggagcaatggctcgtatgagttcattgatttccgcgagactgcgccggctgctgcgtttgaggatatgtataataataatacggacgccagtttatatggaggattggcgagtggcgtacccggtgagctccgtggcatagagtacctccacaagaactatggcaaactcccatgggccaaagtcatggcccctgccatcaaagtcgctcgatatggtttcaaagtgacagaggatttggtcaagtacatggactcactatccgacgactcgttcctcacggacgaccctgcatgggcgattgatttcgcgcctaatggttaccgcgttaagcttggcgagacgataacgcgtaagcggtacgcagacacgttggaggtcatcgccgctgagggtcctgacgcattttacacgggagctattgcaagcgcgacgatagcagctttgacaaaagccaatggaacaatgacactagacgacctgaagaactacactgtggctattcgcaaacccgccgagatcacatatcgaggacacaagttgacggcatgcagtgcgccgtccggtggtatcgtggctgctagcgctctcaagatcgtagatggatatgaaggcttcggcgatcccgcagcgatcaacctgacaacccaccgtctggacgaagcaatgagattcgcatatggacagcgttctgagctaggagatccgctgttcgtggagggacttgacaagtaccaggagcagatgatttccgatgcgacagccgccgaagtccggtccaagatctccgacttcaagacgcagaacgtttcatactacgatcctgctggattggagagtctggaaacacccggtactagtcacgttgtgacagctgataagagcggcatggctattagtttgacgacgacgatcaacttgatcttcggctcccagctcatggtccctgagacgggtgtcatcatgaatgatgagatgaacgacttctctatcccaggtagcagcaatgcattcggatacatcccaagtcccgcaaacttcatccgaccgggcaagcgacccctatcttccatctcgcctacaatcgtcgagacgccagagggtaaactgtatctcgtcatcggttcagcgggcgggagtcgcatcatcacagcgacgatccagaatgtgcaccacgttctcgaccagaatatgacgacgcccgaggcgctggctagcccgagactgcacgatcagctcagtcctaatcaggtctcgtttgagtacgcgtatgataatagtacggttgcttatatgcagtcgcttggacataatgttacatgggtggcgcctggtcagagcacggcgcagggtctacggttgttaagtaatggcacttttgaggcggctggtgagcctagacaagtgaactctggagggtttgctgtttagattttatgaatcatctgcttggcgggacgttgcaatgtctttggtttgtctatgtagctaatactaattcacctttcgaatcacttgatacaagctgacataagcctttccgcgtactacggtcattcgtgtcgataaatgtatatataggttttgtcggtttgagcggttgctgagttgagcaggaaccttgtctgcggtctcagatccgcacggcagtggacagcgtgtcgaatgatttctaggccatgatctaatcgccatcgcaagagtttcacggacagtccattatcttgcccaacaagataggcgtaaaacccagcagtattgggtcaagactacttgcggatagtggac

SEQ ID NO: 10820 - DNA, 2253 bp, Muscodor strobelii
  misc_feature: SGI cDNA ID NO. 563452
  misc_feature: Encodes the peptide sequence at SEQ ID NO 10821
atgaatgtgacgtcttggggtgaagtcctacatggcccctcgatcccattcctgaatggtgttgttgtcactatgtcaaaacaaatcatcaatgacatagccgctactttccacgacacttttgctatcagcaagccgcaaaaggacgacaactcaaaaccatcgggtcaacatcatgtgagcccgaacactcaagatacatcggatgaccgtctgcggaatctaactatcgccgagaatttcgtgtacagtcctctgccaacctcaagcacacgatggatgcgcttgatccggctgttaccggggaccactcgcgatggcatctgctgtgagatgaacatcgtcaacctgaccgagtgcgaagacgcgtacgaggccctcagctatgtttgggaaccccgaggatgctcgaccgaggtgacgcccatcctggtcaataatcgatcactcaacatcggccataatctccgctctgctctgtttcacatgcgcctcgatacagatcagccacgcactctatggatcgatgcactgtgtatagatcaatcgaatatcgcggagcgcagtcaacaggtcgcgtttatgggagatatctaccgctccgcttggcgcactgtcgtctggctcggcgagagtatcaaagccactcccgttgccttcgaggctctgaccgagctctccgccgaggcggcggatcgcaaacaagagttatccgaccgattggacgaggatgaattcgtgtcgggggtaagtcactacatcagagaacccatccccagcccactcttcgcaaagtaccaaaaggatggcagtattgttcatctgggagcgtacgactggtggaagcgagcctggacaagtcaagaactgttactgtctcgtcaggccctcgtgatgaagggtcaatactcgctcccgtgggagacactctgtagtggcgtaaattacggcattgctatcggtatttggagccccgtcactctcgggatgatcatagaacccgtaataatgccgtatctgtcgctttgggcgatgcatcgtcgacggcagcggctcctcgcgcatggagctgaatccgaagcgcagcaattgttgcagaatcttgttgcctgtcgattccgaggggccgccaataaacaggacaagatttacgcggtcttaccgttgcaaattgcgacaggagatagtcatgggcacacctccctagacatcgtgcccgactattccacaccgttccaagaagtgttctgcgacacggctcgccgcctcatcatcacgtcgaagtctctcgatgttctcggagcttgcctaccccacaaggatgaagggcttccgagctgggttccagactggacacggggaacatcgggacttgctatcttgccactcacaaggaacgtcttgagtgaaccccgtagcacgcatgccgctcgtcactccgacgcagaacctgtgttcgaagacggaggtaagactctagttctccgcggctccagaatcactagtattgcggcgcaggcctctgctctcggaagattgatggatgtggcctccgaggtggcctctggtcacgccccgtcaaccataccccagggcacaaccttagtcgatcggtttgaaaggtttggcgcaaaggtcaagttggcattgctgatgtatgagtatttcatgtctatcgtcccgcaactcgagatcttcgcggagtgggatctgtttgcacgcgaggaatcgccacgaaatccctgcgactcaggcgatggaagatacgatccattggccgtctactggcagaccctcagcaccggtaccttcttgcctcaaggtggtaatagtacgggtgagaaagaggaacggcacaaacgtgcaacagccgacgccttctacagctggcgtgcgtgtctcaagactgcgcgtcatatgcaccggtggaaagttgatcgttttaccaggccactttccttcataggctatgcctgggcaacgtggaacaagtatagcgagttcgagcgcctgctggagaatgcgtatggtcgccgactggcgaggttagccaatggatatctggcgttggtgcctgcacacgcaaaggccggtgatcagattgttcttattcaaggcggggctgtgccacttgttctgcgagctggtgcagataaaaacacgaataccctcgttggggaggcatatgttcatggcatgatgaatggggaggcctatgaaccatcacgcgatgtcgaaatacgcgttacataa

SEQ ID NO: 10821 - protein, 750 aa, Muscodor strobelii
  misc_feature: SGI Peptide ID NO. 563452
  misc_feature (124)..(289): Pfam Id: PF06985 Pfam Desc: Heterokaryon incompatibility protein (HET)
  misc_feature (124)..(271): Pfam Id: PF06985 Pfam Desc: Heterokaryon incompatibility protein (HET)
  misc_feature (152)..(714): NCBI GI: 256729019 Blast Desc: NECHADRAFT_79878 [Nectria haematococca mpVI 77-13-4]
  misc_feature (116)..(602): NCBI GI: 116194324 Blast Desc: CHGG_03760 [Chaetomium globosum CBS 148.51] gi|88179673|gb|EAQ87141.1| CHGG_03760 [Chaetomium globosum CBS 148.51]
  misc_feature (51)..(750): NCBI GI: 171678763 Blast Desc: protein product [Podospora anserina] gi|170937451|emb|CAP62109.1| protein product [Podospora anserina]
  misc_feature (89)..(743): NCBI GI: 154292443 Blast Desc: BC1G_14540 [Botryotinia fuckeliana B05.10] gi|150846126|gb|EDN21319.1| BC1G_14540 [Botryotinia fuckeliana B05.10]
  misc_feature (29)..(737): NCBI GI: 256721874 Blast Desc: NECHADRAFT_88090 [Nectria haematococca mpVI 77-13-4]
  misc_feature (94)..(465): NCBI GI: 239612306 Blast Desc: conserved [Ajellomyces dermatitidis ER-3]
  misc_feature (94)..(465): NCBI GI: 261202540 Blast Desc: conserved [Ajellomyces dermatitidis SLH14081] gi|239590581|gb|EEQ73162.1| conserved [Ajellomyces dermatitidis SLH14081]
  misc_feature (61)..(465): NCBI GI: 256724619 Blast Desc: NECHADRAFT_95927 [Nectria haematococca mpVI 77-13-4]
  misc_feature (116)..(714): NCBI GI: 156061881 Blast Desc: SS1G_03086 [Sclerotinia sclerotiorum 1980] gi|154700487|gb|EDO00226.1| SS1G_03086 [Sclerotinia sclerotiorum 1980]
  misc_feature (37)..(455): NCBI GI: 256724927 Blast Desc: NECHADRAFT_77119 [Nectria haematococca mpVI 77-13-4]
MNVTSWGEVLHGPSIPFLNGVVVTMSKQIINDIAATFHDTFAISKPQKDDNSKPSGQHHVSPNTQDTSDDRLRNLTIAENFVYSPLPTSSTRWMRLIRLLPGTTRDGICCEMNIVNLTECEDAYEALSYVWEPRGCSTEVTPILVNNRSLNIGHNLRSALFHMRLDTDQPRTLWIDALCIDQSNIAERSQQVAFMGDIYRSAWRTVVWLGESIKATPVAFEALTELSAEAADRKQELSDRLDEDEFVSGVSHYIREPIPSPLFAKYQKDGSIVHLGAYDWWKRAWTSQELLLSRQALVMKGQYSLPWETLCSGVNYGIAIGIWSPVTLGMIIEPVIMPYLSLWAMHRRRQRLLAHGAESEAQQLLQNLVACRFRGAANKQDKIYAVLPLQIATGDSHGHTSLDIVPDYSTPFQEVFCDTARRLIITSKSLDVLGACLPHKDEGLPSWVPDWTRGTSGLAILPLTRNVLSEPRSTHAARHSDAEPVFEDGGKTLVLRGSRITSIAAQASALGRLMDVASEVASGHAPSTIPQGTTLVDRFERFGAKVKLALLMYEYFMSIVPQLEIFAEWDLFAREESPRNPCDSGDGRYDPLAVYWQTLSTGTFLPQGGNSTGEKEERHKRATADAFYSWRACLKTARHMHRWKVDRFTRPLSFIGYAWATWNKYSEFERLLENAYGRRLARLANGYLALVPAHAKAGDQIVLIQGGAVPLVLRAGADKNTNTLVGEAYVHGMMNGEAYEPSRDVEIRVT

SEQ ID NO: 10822 - DNA, 2652 bp, Muscodor strobelii
  misc_feature: SGI EST ID NO. CUFF.25692.1
  misc_feature: Variant of the nucleotide sequence at SEQ ID NO 10820
gtcccgacaacactcgcccctttaccgtagacatcattggcattttggagggaaatttatagtatttatctcctacgttgagagtgcgttccaattgactctctttcacaaccatgaatgtgacgtcttggggtgaagtcctacatggcccctcgatcccatgtacgtacatgtatgggaatggcatgcataaggccgatttaaccctttcaattcagtacattaggtaggtagccttgaacaccgtgacatgcctaccttcaatttgcattctagccccccgtttccaaatctcagtcctgaatggtgttgttgtcactatgtcaaaacaaatcatcaatgacatagccgctactttccacgacacttttgctatcagcaagccgcaaaaggacgacaactcaaaaccatcgggtcaacatcatgtgagcccgaacactcaagatacatcggatgaccgtctgcggaatctaactatcgccgagaatttcgtgtacagtcctctgccaacctcaagcacacgatggatgcgcttgatccggctgttaccggggaccactcgcgatggcatctgctgtgagatgaacatcgtcaacctgaccgagtgcgaagacgcgtacgaggccctcagctatgtttgggaaccccgaggatgctcgaccgaggtgacgcccatcctggtcaataatcgatcactcaacatcggccataatctccgctctgctctgtttcacatgcgcctcgatacagatcagccacgcactctatggatcgatgcactgtgtatagatcaatcgaatatcgcggagcgcagtcaacaggtcgcgtttatgggagatatctaccgctccgcttggcgcactgtcgtctggctcggcgagagtatcaaagccactcccgttgccttcgaggctctgaccgagctctccgccgaggcggcggatcgcaaacaagagttatccgaccgattggacgaggatgaattcgtgtcgggggtaagtcactacatcagagaacccatccccagcccactcttcgcaaagtaccaaaaggatggcagtattgttcatctgggagcgtacgactggtggaagcgagcctggacaagtcaagaactgttactgtctcgtcaggccctcgtgatgaagggtcaatactcgctcccgtgggagacactctgtagtggcgtaaattacggcattgctatcggtatttggagccccgtcactctcgggatgatcatagaacccgtaataatgccgtatctgtcgctttgggcgatgcatcgtcgacggcagcggctcctcgcgcatggagctgaatccgaagcgcagcaattgttgcagaatcttgttgcctgtcgattccgaggggccgccaataaacaggacaagatttacgcggtcttaccgttgcaaattgcgacaggagatagtcatgggcacacctccctagacatcgtgcccgactattccacaccgttccaagaagtgttctgcgacacggctcgccgcctcatcatcacgtcgaagtctctcgatgttctcggagcttgcctaccccacaaggatgaagggcttccgagctgggttccagactggacacggggaacatcgggacttgctatcttgccactcacaaggaacgtcttgagtgaaccccgtagcacgcatgccgctcgtcactccgacgcagaacctgtgttcgaagacggaggtaagactctagttctccgcggctccagaatcactagtattgcggcgcaggcctctgctctcggaagattgatggatgtggcctccgaggtggcctctggtcacgccccgtcaaccataccccagggcacaaccttagtcgatcggtttgaaaggtttggcgcaaaggtcaagttggcattgctgatgtatgagtatttcatgtctatcgtcccgcaactcgagatcttcgcggagtgggatctgtttgcacgcgaggaatcgccacgaaatccctgcgactcaggcgatggaagatacgatccattggccgtctactggcagaccctcagcaccggtaccttcttgcctcaaggtggtaatagtacgggtgagaaagaggaacggcacaaacgtgcaacagccgacgccttctacagctggcgtgcgtgtctcaagactgcgcgtcatatgcaccggtggaaagttgatcgttttaccaggccactttccttcataggctatgcctgggcaacgtggaacaagtatagcgagttcgagcgcctgctggagaatgcgtatggtcgccgactggcgaggttagccaatggatatctggcgttggtgcctgcacacgcaaaggccggtgatcagattgttcttattcaaggcggggctgtgccacttgttctgcgagctggtgcagataaaaacacgaataccctcgttggggaggcatatgttcatggcatgatgaatggggaggcctatgaaccatcacgcgatgtcgaaatacgcgttacataaccggagacggtgacctcatagcttgttttaatccgcgtccagatcggcacaggcactgcttaacaatgtgtcaggtgacgatagaaacgtatccgagaagcatattccttgcatcatgccttgcaaagatttgctctgcactatcatctgc

SEQ ID NO: 10823 - DNA, 2049 bp, Muscodor strobelii
  misc_feature: SGI cDNA ID NO. 563453
  misc_feature: Reduced expression when VOC is produced
  misc_feature: Encodes the peptide sequence at SEQ ID NO 10824
atgctgcgcaactcgttgcgatctgtccgggtagggagcaggcccgtccgccctgctgccgcccgccaatggcaagtcgcaagagccaatggcctcgcacagaggcgatgcttcgccgacgacaagaagccaactctcgatgactcgagacccgtgaagctcccctctaccgagacgaacaccgctgcctcgagcgagccccgcgtccccgtcgtcgaggccaaggtcgtcgacggcaccatcgaccccaagaatgtccccttgacaccgcccgaacccgaagctgtagctgccacctccactcccgccgaacctcctctaccacccccaacgcctattaagaagaagggcttcttccgccgcctgcgcaactatgtcatgactctcatcttccttggagccgtcacgtttggtggaggtgtatggtattcgcgcatcaacgacaatttccacgacttctttaccgagtatgtgcccttcggcgagcaggctgtgctctacttcgaggagatggagttcaggaaacgctatccccgcaacgtcgagggcggcccacgggtcaaggacacgggcgcccaggtcaagatctctccccagagcggtgcctcctggcgtgtcgcagacagtggtgctcccgcaggtcgccagtctagtgccatgagcgacgtcgccgccagcaagaaggctgctgccgaaaacaagcccgtggctgatgtcaagcctgctccccggccagaggctcccgctgcccccgctcccaaacccgacgagaaggtcgccgcagctgcaccagctgcaccgcctgctgaggaacctaagcccgagaagaagagatcacgctcgaggtcccgatcgacctccaaacccaagaagaccgaaccctcattcaaggagcccgaagtcgacgaaccttcccgatttcctcctcccaggcccatcgacctccttgccgtcagagataacgccgagcccgtcgtcgctgctcttgtccacatgctcaacgacatcatcctcgtcgtcaacgccgacaactccgacgagcgcttctcccgaaccatctacaaggccaagaacgagctcgccaacgtgggcgcccagatccgcgagatcaaggccaaggtcgagaaggatgccgccggacaggtcgagtccaaggtcaaggagttcgagatggctgccaacgaactggtcaaccgcgtggagaccgtcatgaacgcccaggaaagccagtggcgcgtcgagttcgaggaagagatgaagcgcatccaagctacctacgactcaagactcaagaccgagatcgagcaggagaagcaggtccacgaggagaagctcaagaacaacctcctcgaacaagctgttgagctgaagcgacaattcctccaagacatcaaatcgcaagtcgagtcggagcgcgaaggtcgtctcggtaaactggagcagctcggctctgccgtcaaggagttggagtccctgaccacgggttggaacaacgtcgtcgacagcaatcttcgaacacagcaactccacgtcgcagtcgaggctgtccgtgcgaacttagaggaccaagaagtcccccgacctttcgtccgtgagctcgtagcgctcaaggaaatcgcctccgacgacgcagtagtcaacgctgccatcggatccatcaatcccatagcctaccagcgcgggatccctacatcagcccagctcatggaccggttccgacgcgtggcctttgaagtccggaaggcgtctctacttcccgaggatgccggagttgctagtcatgcctccagctatctactcagcaaggtcatgttccagaagcaggggctcagagatggcgatgatgttgagagcatactcggtcgaacacagacgtatcttgaggaagggaacctggatgctgccgctagggagatgaatggactgcagggctgggccaagacgctgagtcgggattggcttggtgaggttagacgcgtgcttgaggtgcggcaggcacttgatgtcatcgctacggaagctagactccagagtttaagagtcgcttaa

SEQ ID NO: 10824 - protein, 682 aa, Muscodor strobelii
  misc_feature: SGI Peptide ID NO. 563453
  misc_feature (1)..(681): NCBI GI: 85115071 Blast Desc: NCU00894 [Neurospora crassa OR74A] gi|28926604|gb|EAA35574.1| conserved [Neurospora crassa OR74A] gi|38636469|emb|CAE82004.1| conserved [Neurospora crassa]
  misc_feature (1)..(681): NCBI GI: 256735460 Blast Desc: [Nectria haematococca mpVI 77-13-4]
  misc_feature (1)..(681): NCBI GI: 116182664 Blast Desc: CHGG_01960 [Chaetomium globosum CBS 148.51] gi|88186257|gb|EAQ93725.1| CHGG_01960 [Chaetomium globosum CBS 148.51]
  misc_feature (1)..(681): NCBI GI: 46107606 Blast Desc: FG00686.1 [Gibberella zeae PH-1]
  misc_feature (1)..(681): NCBI GI: 171694840 Blast Desc: protein product [Podospora anserina] gi|170947662|emb|CAP59824.1| protein product [Podospora anserina]
  misc_feature (1)..(681): NCBI GI: 145614040 Blast Desc: MGG_11278 [Magnaporthe grisea 70-15] gi|145021022|gb|EDK05151.1| MGG_11278 [Magnaporthe grisea 70-15]
  misc_feature (1)..(668): NCBI GI: 156035891 Blast Desc: SS1G_13150 [Sclerotinia sclerotiorum 1980] gi|154698554|gb|EDN98292.1| SS1G_13150 [Sclerotinia sclerotiorum 1980]
  misc_feature (1)..(681): NCBI GI: 121706986 Blast Desc: conserved [Aspergillus clavatus NRRL 1] gi|119399844|gb|EAW10270.1| conserved [Aspergillus clavatus NRRL 1]
  misc_feature (175)..(681): NCBI GI: 154312635 Blast Desc: BC1G_05920 [Botryotinia fuckeliana B05.10] gi|150850021|gb|EDN25214.1| BC1G_05920 [Botryotinia fuckeliana B05.10]
  misc_feature (1)..(681): NCBI GI: 67526771 Blast Desc: AN3843.2 [Aspergillus nidulans FGSC A4] gi|40739918|gb|EAA59108.1| AN3843.2 [Aspergillus nidulans FGSC A4] gi|259481594|tpe|CBF75260.1| TPA: conserved [Aspergillus FGSC
  misc_feature: Useful for introducing or modulating the production of volatile compounds
MLRNSLRSVRVGSRPVRPAAARQWQVARANGLAQRRCFADDKKPTLDDSRPVKLPSTETNTAASSEPRVPVVEAKVVDGTIDPKNVPLTPPEPEAVAATSTPAEPPLPPPTPIKKKGFFRRLRNYVMTLIFLGAVTFGGGVWYSRINDNFHDFFTEYVPFGEQAVLYFEEMEFRKRYPRNVEGGPRVKDTGAQVKISPQSGASWRVADSGAPAGRQSSAMSDVAASKKAAAENKPVADVKPAPRPEAPAAPAPKPDEKVAAAAPAAPPAEEPKPEKKRSRSRSRSTSKPKKTEPSFKEPEVDEPSRFPPPRPIDLLAVRDNAEPVVAALVHMLNDIILVVNADNSDERFSRTIYKAKNELANVGAQIREIKAKVEKDAAGQVESKVKEFEMAANELVNRVETVMNAQESQWRVEFEEEMKRIQATYDSRLKTEIEQEKQVHEEKLKNNLLEQAVELKRQFLQDIKSQVESEREGRLGKLEQLGSAVKELESLTTGWNNVVDSNLRTQQLHVAVEAVRANLEDQEVPRPFVRELVALKEIASDDAVVNAAIGSINPIAYQRGIPTSAQLMDRFRRVAFEVRKASLLPEDAGVASHASSYLLSKVMFQKQGLRDGDDVESILGRTQTYLEEGNLDAAAREMNGLQGWAKTLSRDWLGEVRRVLEVRQALDVIATEARLQSLRVA

SEQ ID NO: 10825 - DNA, 2391 bp, Muscodor strobelii
  misc_feature: SGI EST ID NO. CUFF.25669.0
  misc_feature: Variant of the nucleotide sequence at SEQ ID NO 10823
ccggaggtgtcattaattttgactcgtgcatgcagctgccgggtaactgctggcgtgcaacaacagctcagaaaagcctcccggaggttttcacgccagtgcataatcctcgcaagcgcgaccatcaacaaccgcaagacgtccggccatgctgcgcaactcgttgcgatctgtccgggtagggagcaggcccgtccgccctgctgccgcccgccaatggcaagtcgcaagagccaatggcctcgcacagaggcgatgcttcgccgacgacaagaagccaactctcgatgactcgagacccgtgaagctcccctctaccgagacgaacaccgctgcctcgagcgagccccgcgtccccgtcgtcgaggccaaggtcgtcgacggcaccatcgaccccaagaatgtccccttgacaccgcccgaacccgaagctgtagctgccacctccactcccgccgaacctcctctaccacccccaacgcctattaagaagaagggcttcttccgccgcctgcgcaactatgtcatgactctcatcttccttggagccgtcacgtttggtggaggtgtatggtattcgcgcatcaacgacaatttccacgacttctttaccgagtatgtgcccttcggcgagcaggctgtgctctacttcgaggagatggagttcaggaaacgctatccccgcaacgtcgagggcggcccacgggtcaaggacacgggcgcccaggtcaagatctctccccagagcggtgcctcctggcgtgtcgcagacagtggtgctcccgcaggtcgccagtctagtgccatgagcgacgtcgccgccagcaagaaggctgctgccgaaaacaagcccgtggctgatgtcaagcctgctccccggccagaggctcccgctgcccccgctcccaaacccgacgagaaggtcgccgcagctgcaccagctgcaccgcctgctgaggaacctaagcccgagaagaagagatcacgctcgaggtcccgatcgacctccaaacccaagaagaccgaaccctcattcaaggagcccgaagtcgacgaaccttcccgatttcctcctcccaggcccatcgacctccttgccgtcagagataacgccgagcccgtcgtcgctgctcttgtccacatgctcaacgacatcatcctcgtcgtcaacgccgacaactccgacgagcgcttctcccgaaccatctacaaggccaagaacgagctcgccaacgtgggcgcccagatccgcgagatcaaggccaaggtcgagaaggatgccgccggacaggtcgagtccaaggtcaaggagttcgagatggctgccaacgaactggtcaaccgcgtggagaccgtcatgaacgcccaggaaagccagtggcgcgtcgagttcgaggaagagatgaagcgcatccaagctacctacgactcaagactcaagaccgagatcgagcaggagaagcaggtccacgaggagaagctcaagaacaacctcctcgaacaagctgttgagctgaagcgacaattcctccaagacatcaaatcgcaagtcgagtcggagcgcgaaggtcgtctcggtaaactggagcagctcggctctgccgtcaaggagttggagtccctgaccacgggttggaacaacgtcgtcgacagcaatcttcgaacacagcaactccacgtcgcagtcgaggctgtccgtgcgaacttagaggaccaagaagtcccccgacctttcgtccgtgagctcgtagcgctcaaggaaatcgcctccgacgacgcagtagtcaacgctgccatcggatccatcaatcccatagcctaccagcgcgggatccctacatcagcccagctcatggaccggttccgacgcgtggcctttgaagtccggaaggcgtctctacttcccgaggatgccggagttgctagtcatgcctccagctatctactcagcaaggtcatgttccagaagcaggggctcagagatggcgatgatgttgagagcatactcggtcgaacacagacgtatcttgaggaagggaacctggatgctgccgctagggagatgaatggactgcagggctgggccaagacgctgagtcgggattggcttggtgaggttagacgcgtgcttgaggtgcggcaggcacttgatgtcatcgctacggaagctagactccagagtttaagagtcgcttaatttgcacgtggagcttggcggatagttcttagagtgaaaggatatacaatagatcgcatggatggatggcactcgtctcttttgtttttcactctacatgtatattttatctgccctagggtgtgtgtatcagatagaaaatagagttgtgcttttactaatctgtgagatttcgaatgaagagctgattaatg

SEQ ID NO: 10826 - DNA, 2028 bp, Muscodor strobelii
  misc_feature: SGI cDNA ID NO. 563454
  misc_feature: Encodes the peptide sequence at SEQ ID NO 10827
atggatacgggacaagatgcctctgcccagagtggtcagtatccggtccacgtaggcctttggacaaattggtcacgaggccgagttttgggctctaccctaactctcagtcgacgagatgctgacctgcttattgcatttacggctttctatgttgccttcattgctacgcgcgtctggaggatcatttgcttcatagtccaccagatttactcgacagcggatccacgcgacgcggtctatcaccaacgccagtccattttgcggaactctgcatctcctgaagacggtattcggatgctcctctgcctggcatgggtgaatcgacgttccaagggacggatgcgcccactcccagtagccatcataggagctctctgcatcgtggtatttaccattgcaggtggcttttcctctcaaatctcaactgctgtcggatctgaagtcttaattgagccgtccaactgcgggtgggcacaattctctcccgacgtcacggggcctttgtacttctccacccttactagtgtagctaccataatcaacaacgccgccaattacgcgcagcaatgttattccaacgacgacagcgggttgcttgattgtaatcggtttgctgtcaagaaaatagaaaaaagcgtcaatagtcatgccagctgccctttcaaatcacatgtgtgtcgaaatgagtccgcgaacctgctcattgactctggctacctcgacagccatgaggttcttggtcttaatgcccctccagatgagagaatactgttcaggaatgttcttcattgcgctccattagcgacagcctcattctcacaggagagaaactcgtcgatcggagaatatacgttctatacttatggaagatatctattccaatccaacgagagttacgactacttacatgcggctcccggtatacaaacacaatatgcagccgtggaatccagcgacatattggcagcattcacagattacacattgagctcatatgcatcattcatcggaaaccaaacaacgtcgtctgcgtcagattttgtacctatcgatgatattgctagagacgatgccgacatttttctcttctttctatctgggaatggagttatattttcgcaatactcagacgacgagtggtatcacttaaacaagtcctcgtctagtattttcattgacaataccaccacggcctcgccggagctctatgttccaacgaatcccgcttcacctcttggctgcactaaccagtatcagttttgtaatgccgcgtatcaaggcacaagtggatgtggtccgctagcaagcttgcgagatgcagcagcaaaagcagcgcccatttttgatactacttatgccgaatttcaaaacaacccctttcataatgaaataggagctagatttctgtattttgtcaatgtttacttctccgactcatttccgtctgtttacgagaccaatttaaagctggaatccgcaggactgacatctcggagcaatctgattgcaggcttgcaaggaccgatggcatcaaaccagtggcagaaagatgtctcccattggtgggatatatccatggctattcaccagacagcatctctcaatctagcatattttcctaataactcagacttgttggcaatacgcaataactacactgctccagagtttaaaaagctatgtagtaatcagaaaatgcgcactacggcatatgcttctttcagcttattcggcctcctcttcacggctgttgtcggactacttgcagtactgacttcgttccttatagagcctatatacggctggtttcactttataaaaggcaacaacaaatacccacatttagagtggacagcgaattctatgctgcagctacagcgccttgctcacgaagagcttggatttggcacatggtctgaagggactaagacacttcctgccaccatgcctgatcagctccttgcctctctggacatatcagatccagcgcatccagtcctctgtcggcaaccgattgctgattga

SEQ ID NO: 10827 - protein, 675 aa, Muscodor strobelii
  misc_feature: SGI Peptide ID NO. 563454
  misc_feature (11)..(666): NCBI GI: 169615058 Blast Desc: SNOG_10683 [Phaeosphaeria nodorum SN15] gi|111060957|gb|EAT82077.1| SNOG_10683 [Phaeosphaeria nodorum SN15]
  misc_feature (16)..(672): NCBI GI: 189194015 Blast Desc: conserved [Pyrenophora tritici-repentis Pt-1C-BFP] gi|187978910|gb|EDU45536.1| conserved [Pyrenophora tritici-repentis Pt-1C-BFP]
  misc_feature (16)..(671): NCBI GI: 115399382 Blast Desc: [Aspergillus terreus NIH2624] gi|114192163|gb|EAU33863.1| [Aspergillus terreus NIH2624]
  misc_feature (16)..(664): NCBI GI: 119474227 Blast Desc: NFIA_004500 [Neosartorya fischeri NRRL 181] gi|119407142|gb|EAW17092.1| conserved [Neosartorya fischeri NRRL 181]
  misc_feature (16)..(664): NCBI GI: 70986226 Blast Desc: conserved [Aspergillus fumigatus Af293] gi|66846236|gb|EAL86569.1| conserved [Aspergillus fumigatus Af293]
  misc_feature (16)..(664): NCBI GI: 159128250 Blast Desc: conserved [Aspergillus fumigatus A1163]
  misc_feature (16)..(659): NCBI GI: 169772941 Blast Desc: [Aspergillus oryzae RIB40] gi|83768800|dbj|BAE58937.1| protein product [Aspergillus oryzae]
  misc_feature (16)..(636): NCBI GI: 121699395 Blast Desc: ACLA_082720 [Aspergillus clavatus NRRL 1] gi|119396149|gb|EAW06581.1| ACLA_082720 [Aspergillus clavatus NRRL 1]
  misc_feature (16)..(667): NCBI GI: 256723662 Blast Desc: NECHADRAFT_86728 [Nectria haematococca mpVI 77-13-4]
  misc_feature (16)..(635): NCBI GI: 169618215 Blast Desc: SNOG_12297 [Phaeosphaeria nodorum SN15] gi|160703576|gb|EAT80110.2| SNOG_12297 [Phaeosphaeria nodorum SN15]
MDTGQDASAQSGQYPVHVGLWTNWSRGRVLGSTLTLSRRDADLLIAFTAFYVAFIATRVWRIICFIVHQIYSTADPRDAVYHQRQSILRNSASPEDGIRMLLCLAWVNRRSKGRMRPLPVAIIGALCIVVFTIAGGFSSQISTAVGSEVLIEPSNCGWAQFSPDVTGPLYFSTLTSVATIINNAANYAQQCYSNDDSGLLDCNRFAVKKIEKSVNSHASCPFKSHVCRNESANLLIDSGYLDSHEVLGLNAPPDERILFRNVLHCAPLATASFSQERNSSIGEYTFYTYGRYLFQSNESYDYLHAAPGIQTQYAAVESSDILAAFTDYTLSSYASFIGNQTTSSASDFVPIDDIARDDADIFLFFLSGNGVIFSQYSDDEWYHLNKSSSSIFIDNTTTASPELYVPTNPASPLGCTNQYQFCNAAYQGTSGCGPLASLRDAAAKAAPIFDTTYAEFQNNPFHNEIGARFLYFVNVYFSDSFPSVYETNLKLESAGLTSRSNLIAGLQGPMASNQWQKDVSHWWDISMAIHQTASLNLAYFPNNSDLLAIRNNYTAPEFKKLCSNQKMRTTAYASFSLFGLLFTAVVGLLAVLTSFLIEPIYGWFHFIKGNNKYPHLEWTANSMLQLQRLAHEELGFGTWSEGTKTLPATMPDQLLASLDISDPAHPVLCRQPIAD

SEQ ID NO: 10828 - DNA, 389 bp, Muscodor strobelii
  misc_feature: SGI EST ID NO. CUFF.25681.0
  misc_feature: Variant of the nucleotide sequence at SEQ ID NO 10826
cttatggaagatatctattccaatccaacgagagttacgactacttacatgcggctcccggtatacaaacacaatatgcagccgtggaatccagcgacatattggcagcattcacagattacacattgagctcatatgcatcattcatcggaaaccaaacaacgtcgtctgcgtcagattttgtacctatcgatgatattgctagagacgatgccgacatttttctcttctttctatctgggaatggagttatattttcgcaatactcagacgacgagtggtatcacttaaacaagtcctcgtctagtattttcattgacaataccaccacggcctcgccggagctctatgttccaacgaatcccgcttcacctcttggctgcactaac

SEQ ID NO: 10829 - DNA, 456 bp, Muscodor strobelii
  misc_feature: SGI cDNA ID NO. 563455
  misc_feature: Encodes the peptide sequence at SEQ ID NO 10830
atgcacaaagctaccaaaccactccaaaccggcaagcccgccgtgcataactctccagagccacaagatttcccagccccagtcacgcaccgcatgatgtacgcccaagaaatgctctcaaactacaaaaaggcttgcgaagggtgcaatttcgtaatattcccagagaacaccaccgccccggcagaacccacgactcgccgtggacgccttgcgaaacgtatccaagcaccgtttcgcgaagcctacaccatctacaaagatctcaagctcatgatgcggacaaggcgagcgatcaaaaagtcactcgccgacgaaaactacgagtactggactcttattgcgtatgttctgcagggagatgactccgatgtgtatcggacgcagattgttaagggctcccttccctatgatcatggagatcctttgcgtaggcggctgcgtggtcatttgtga

SEQ ID NO: 10830 - protein, 151 aa, Muscodor strobelii
  misc_feature: SGI Peptide ID NO. 563455
MHKATKPLQTGKPAVHNSPEPQDFPAPVTHRMMYAQEMLSNYKKACEGCNFVIFPENTTAPAEPTTRRGRLAKRIQAPFREAYTIYKDLKLMMRTRRAIKKSLADENYEYWTLIAYVLQGDDSDVYRTQIVKGSLPYDHGDPLRRRLRGHL

SEQ ID NO: 10831 - DNA, 254 bp, Muscodor strobelii
  misc_feature: SGI EST ID NO. CUFF.25689.0
  misc_feature: Variant of the nucleotide sequence at SEQ ID NO 10829
gttcccaatgacatacaccattgaaaccttcttagcctagatatccccagggagagatcctcaactcagccagacataccgccctcaccatgcacaaagctaccaaaccactccaaaccggcaagcccgccgtgcataactctccagagccacaagatttcccagccccagtcacgcaccgcatgatgtacgcccaagaaatgctctcaaactacaaaaaggcttgcgaagggtgcaatttcgtaatattccca

SEQ ID NO: 10832 - DNA, 669 bp, Muscodor strobelii
  misc_feature: SGI cDNA ID NO. 563456
  misc_feature: Reduced expression when VOC is produced
  misc_feature: Encodes the peptide sequence at SEQ ID NO 10833
atggcttctcgggcaggccctgccgccggtcgcggaatgaactcgcgcttcgctcagttcaagctggtgttattaggagaatctgctgtgggaaagagttcgatagttctgagatttgttaaggatcaattcgactcgtacagggaatcaaccatcggcgctgcttttctcacacagaccatctcccttgatgagaacaccaccgtcaagttcgagatctgggataccgccggccaggagagatacaagtctctcgcccccatgtactaccgcaatgccaactgcgccgtcgtcgtctacgatatcactcaatccgcgtcgctggacaaggcaaaggcctgggtgaaggagctgcagcgacaagccaacgagaatatcatcatcgccttggctggcaacaaactggatctggtgacggagcagcccgacaagcgtgccgtccccatcgccgaggctgaggcgtacgctaacgaagccggtctgttgttcttcgagacgtctgccaagacggccgagaatgtccgtgaactgtttacagcgatagctaagaagcttcccttggaccaggtcggcccccgccatacccgaccgggccaacgaccgggaggcgtcagcctgggatcggcggagaacagagatacacagcaggccggcaactgcagctgctag

SEQ ID NO: 10833 - protein, 222 aa, Muscodor strobelii
  misc_feature: SGI Peptide ID NO. 563456
  misc_feature (21)..(136): Pfam Id: PF08477 Pfam Desc: Miro-like protein
  misc_feature (21)..(187): Pfam Id: PF00071 Pfam Desc: Ras family
  misc_feature (1)..(222): NCBI GI: 145614042 Blast Desc: RAB GTPase Ypt5 [Magnaporthe grisea 70-15] gi|145021023|gb|EDK05152.1| RAB GTPase Ypt5 [Magnaporthe grisea 70-15]
  misc_feature (1)..(222): NCBI GI: 85115075 Blast Desc: Rab5-like protein ypt5 [Neurospora crassa OR74A] gi|28926605|gb|EAA35575.1| Rab5-like protein ypt5 [Neurospora crassa OR74A] gi|38636468|emb|CAE82003.1| GTP-binding protein
  misc_feature (1)..(222): NCBI GI: 171694842 Blast Desc: protein product [Podospora anserina] gi|170947663|emb|CAP59825.1| protein product [Podospora anserina]
  misc_feature (12)..(222): NCBI GI: 169596668 Blast Desc: SNOG_01101 [Phaeosphaeria nodorum SN15] gi|111071476|gb|EAT92596.1| SNOG_01101 [Phaeosphaeria nodorum SN15]
  misc_feature (1)..(222): NCBI GI: 212537727 Blast Desc: RAB GTPase Ypt5, [Penicillium marneffei ATCC 18224] gi|210068761|gb|EEA22852.1| RAB GTPase Ypt5, [Penicillium marneffei ATCC 18224]
  misc_feature (1)..(222): NCBI GI: 242808404 Blast Desc: RAB GTPase Ypt5, [Talaromyces stipitatus ATCC 10500] gi|218715780|gb|EED15202.1| RAB GTPase Ypt5, [Talaromyces stipitatus ATCC 10500]
  misc_feature (1)..(222): NCBI GI: 119180268 Blast Desc: ras-related protein [Coccidioides immitis RS] gi|240110296|gb|EER28455.1| Ras-related protein ypt5, [Coccidioides posadasii C735 delta SOWgp]
  misc_feature (1)..(222): NCBI GI: 70994486 Blast Desc: RAB GTPase Ypt5 [Aspergillus fumigatus Af293] gi|119500926|ref|XP_001267220.1| RAB GTPase Ypt5, [Neosartorya fischeri NRRL 181] gi|66849656|gb|EAL89984.1| RAB GTPase Ypt5,
  misc_feature (1)..(222): NCBI GI: 156035889 Blast Desc: SS1G_13149 [Sclerotinia sclerotiorum 1980] gi|154698553|gb|EDN98291.1| SS1G_13149 [Sclerotinia sclerotiorum 1980]
  misc_feature (17)..(222): NCBI GI: 67526769 Blast Desc: AN3842.2 [Aspergillus nidulans FGSC A4] gi|40739917|gb|EAA59107.1| conserved [Aspergillus nidulans FGSC A4] gi|259481595|tpe|CBF75261.1| TPA: RAB GTPase Ypt5, nidulans
  misc_feature: Useful for introducing or modulating the production of volatile compounds
MASRAGPAAGRGMNSRFAQFKLVLLGESAVGKSSIVLRFVKDQFDSYRESTIGAAFLTQTISLDENTTVKFEIWDTAGQERYKSLAPMYYRNANCAVVVYDITQSASLDKAKAWVKELQRQANENIIIALAGNKLDLVTEQPDKRAVPIAEAEAYANEAGLLFFETSAKTAENVRELFTAIAKKLPLDQVGPRHTRPGQRPGGVSLGSAENRDTQQAGNCSC

SEQ ID NO: 10834 - DNA, 1664 bp, Muscodor strobelii
  misc_feature: SGI EST ID NO. CUFF.25985.3
  misc_feature: Variant of the nucleotide sequence at SEQ ID NO 10832
gccactcgcagcatcgggacccatttattcagcagcaacctgagcttcacgctgcatcacctcacaggtctgccgacctccgatccattacagcaaggcacctaagcaacaccaggcagtcgccaaatcatcaacttcgaccacacctccctcacattcacatcaccaccatctgcgtcgccactcctccagctatccaccatcgccgccagcctaccttggcctgttcaacttatccctgggattcccctacgcatcccctgaacacccggcaatcctctcctttccgataagatacggcgccctgctcgacctccgtcatccgcccacctcgcccggactgctttgtgtcactccctcgacatccacctcgagcgccgccacccgctcgtctgcatttcctgaaccacatacacacccgtctatagcatggcttctcgggcaggccctgccgccggtcgcggaatgaactcgcgcttcgctcagttcaagctggtgttattaggagaatctgctgtgggaaagagttcgatagttctgagatttgttaaggatcaattcgactcgtacagggaatcaaccatcggcgctgcttttctcacacagaccatctcccttgatgagaacaccaccgtcaagttcgagatctgggataccgccggccaggagagatacaagtctctcgcccccatgtactaccgcaatgccaactgcgccgtcgtcgtctacgatatcactcaatccgcgtcgctggacaaggcaaaggcctgggtgaaggagctgcagcgacaagccaacgagaatatcatcatcgccttggctggcaacaaactggatctggtgacggagcagcccgacaagcgtgccgtccccatcgccgaggctgaggcgtacgctaacgaagccggtctgttgttcttcgagacgtctgccaagacggccgagaatgtccgtgaactgtttacagcgatagctaagaagcttcccttggaccaggtcggcccccgccatacccgaccgggccaacgaccgggaggcgtcagcctgggatcggcggagaacagagatacacagcaggccggcaactgcagctgctagaggaggtggggatgaactgtattggcgggtttggaaagctacagacccaaacgccgctactacgtcatttgtctgcgccacgactcgactttcctacatgtaggctgccaaatacgagacagctcgtcacagtcgaaggtgacagccagactgtctgtgtctcaccaactttggccatgcatttgatatatccgcggcaaaagcagagagagaggtttgcattgcgagtaattaggggagaatggtgtatattgatttgactttggtgtttctctctctggggctgaacgggcatacgtttgtttaataagctgcgtttcttgacgacgattctctccccggctgccctgtggaatcgtgttttgtcattacctagaggtgaggagcgtacaaaggattcaatcagacggcataccacgaaccactataacgtggtcgaaaccttgactaatatgatagagcaataattgttcaatttaaatgagaaacctccgtgtcatgatggacaatacgtgacgtttcgattgaattagcgggcataaataaaatacatgtcacgtcagact

SEQ ID NO: 10835 - DNA, 2106 bp, Muscodor strobelii
  misc_feature: SGI cDNA ID NO. 563457
  misc_feature: Reduced expression when VOC is produced
  misc_feature: Encodes the peptide sequence at SEQ ID NO 10836
atgacactaccctaccgggacattaatgtccacgtcgcacccgaatcttacacctttacctcgccctcttctcccaatgctcccgccctcgttatcgaccgccccaccggcgacgtgcggctcagcgataccgcctccttcaacaccaagcgcgttgcccgtgtctctagtatagccggtattttgggtcttatccgacttagactagacaagtatgccatcgtcatcaccaaagcccaacccgtcggccgcctcaaggggcacatggtctacaaggtcatctctaccgacttcctacccatgcgcgagcgccagatccgcgaccccgacgaggaccagttcttggctatcctgaagacattcatcatgaccggccccatgtatttctcctactcgcttgacctcaccaacagcttccagcgacaagcctctgccgagaactccaccccgctctggatgcgcgccgacgatcgcttctggtggaacaagttcgtgtccaccgacctgaccgacttccgcaagatgggaaaccgatcgcaacaaggaccccagcctgccgtcgacccttacattctgcccttgatttggggcacattagagatacgcccgactaaactcaagagcaccccattgaccatcgccctgattacccgcaagtcgagattccgagctggcacgagatacttcacccgagggctcgacgaagaaggtcacgccgccaactacaacgaaaccgaacagatagtcgttctgaacgacaccggcggcggcttgggaggctacgcggggagtgccgatatgcaaagcggcaaatacggaaagacagacggcaaggagatgcaaatcatgtcatacgtccaaaccagaggaagcatacccgtctactgggccgaaatcaacgccctcaagtacacacccaagcttcaagtgcgcggtatcgagaccgccttccccgcagcgaagaagcatttcgacgagcagatccgcatatacggcgacaactacctcatcaacctcgtcaaccagaaaggtcgcgagaaacctgtcaaggaagcctacgagaaaatggtcgagatgctcatctcctccaaatcagaatctgtctcctccgatcggctgaccgacgagaaattccatgtcatcgaaccccaggctacgaaacaggagtttgatcgcctgcattatatatactttgactaccaccacgagactaagggtatgaggatggatagagcgatgttgctggtcgagagattacacgacgcacttgttgcgcagcagtattttcgcggtgtcgatatgcctgctaactctggtctggagactaggaatttccagaccagtgtggtgaggacgaattgcatggattcgctggatcggacgaatgtcgtgcagagcatgctcgcgaggtggacgctggatcggatatttgtggacttgggtttactgcagcgaggcgagagtttttcgaccgcagacccggcgtttgagtttctgtttaggaacttatgggcggataatgcggatacggtctccaaggcatactccgggactggagctatgaagacggacgtcacgcgactggggaaacggaccagacagggtgcgctacaggacgggaaggtggcgattggacgatattacctcaacaacttcagagatgggccacgacaggatgcttatgacctattcttgggcgcgtatgagcccgccgctgataatattgggtcgaatttggtatttgtggatcgacgaccggtgttgatccagagtattccttacatactcgctttcagcgtgttctttgtcctggtgggcttatttacgagacgactgccggattcgacggtgctgccgatgaggatctttattctgttttggcttgcggctgcgggttggagtctgaattttattttgaagaatgggatgctttatgttaattggccgaagctcaatccgagaccttgggcgaccgagggctatcaggagagtattggcaagattcggaaggatcctgttattggtagcttggtcgcgaagcatgaacgcggtctgagtacggcgaggtatcttaatgctgaggagggcaagaagaggattgaatga

SEQ ID NO: 10836 - protein, 701 aa, Muscodor strobelii
  misc_feature: SGI Peptide ID NO. 563457
  misc_feature (58)..(412): Pfam Id: PF02383 Pfam Desc: SacI homology domain
  misc_feature (58)..(358): Pfam Id: PF02383 Pfam Desc: SacI homology domain
  misc_feature (2)..(701): NCBI GI: 115397971 Blast Desc: conserved [Aspergillus terreus NIH2624] gi|114192768|gb|EAU34468.1| conserved [Aspergillus terreus NIH2624]
  misc_feature (2)..(701): NCBI GI: 226286033 Blast Desc: phosphoinositide phosphatase (Sac1) [Paracoccidioides brasiliensis Pb01]
  misc_feature (2)..(701): NCBI GI: 226291515 Blast Desc: phosphoinositide phosphatase (Sac1) [Paracoccidioides brasiliensis Pb18]
  misc_feature (2)..(701): NCBI GI: 225556793 Blast Desc: inositol/phosphatidylinositol phosphatase [Ajellomyces capsulatus G186AR]
  misc_feature (2)..(701): NCBI GI: 154275610 Blast Desc: conserved [Ajellomyces capsulatus NAm1] gi|150415096|gb|EDN10458.1| conserved [Ajellomyces capsulatus NAm1]
  misc_feature (3)..(701): NCBI GI: 255936339 Blast Desc: Pc13g07670 [Penicillium chrysogenum Wisconsin 54-1255] gi|211583816|emb|CAP91836.1| Pc13g07670 [Penicillium chrysogenum Wisconsin 54-1255]
  misc_feature (3)..(701): NCBI GI: 238843257 Blast Desc: recessive suppressor of secretory defect [Microsporum canis CBS 113480]
  misc_feature (2)..(648): NCBI GI: 159125066 Blast Desc: phosphoinositide phosphatase (Sac1), [Aspergillus fumigatus A1163]
  misc_feature (2)..(648): NCBI GI: 70994484 Blast Desc: phosphoinositide phosphatase (Sac1) [Aspergillus fumigatus Af293] gi|66849655|gb|EAL89983.1| phosphoinositide phosphatase (Sac1), [Aspergillus fumigatus Af293]
  misc_feature (3)..(701): NCBI GI: 169596666 Blast Desc: SNOG_01100 [Phaeosphaeria nodorum SN15] gi|160701364|gb|EAT92595.2| SNOG_01100 [Phaeosphaeria nodorum SN15]
  misc_feature (72)..(565): SWISSPROT Homolog: EC 3.1.3.36 Phosphoinositide 5-phosphatase
  misc_feature: Useful for introducing or modulating the production of volatile compounds
MTLPYRDINVHVAPESYTFTSPSSPNAPALVIDRPTGDVRLSDTASFNTKRVARVSSIAGILGLIRLRLDKYAIVITKAQPVGRLKGHMVYKVISTDFLPMRERQIRDPDEDQFLAILKTFIMTGPMYFSYSLDLTNSFQRQASAENSTPLWMRADDRFWWNKFVSTDLTDFRKMGNRSQQGPQPAVDPYILPLIWGTLEIRPTKLKSTPLTIALITRKSRFRAGTRYFTRGLDEEGHAANYNETEQIVVLNDTGGGLGGYAGSADMQSGKYGKTDGKEMQIMSYVQTRGSIPVYWAEINALKYTPKLQVRGIETAFPAAKKHFDEQIRIYGDNYLINLVNQKGREKPVKEAYEKMVEMLISSKSESVSSDRLTDEKFHVIEPQATKQEFDRLHYIYFDYHHETKGMRMDRAMLLVERLHDALVAQQYFRGVDMPANSGLETRNFQTSVVRTNCMDSLDRTNVVQSMLARWTLDRIFVDLGLLQRGESFSTADPAFEFLFRNLWADNADTVSKAYSGTGAMKTDVTRLGKRTRQGALQDGKVAIGRYYLNNFRDGPRQDAYDLFLGAYEPAADNIGSNLVFVDRRPVLIQSIPYILAFSVFFVLVGLFTRRLPDSTVLPMRIFILFWLAAAGWSLNFILKNGMLYVNWPKLNPRPWATEGYQESIGKIRKDPVIGSLVAKHERGLSTARYLNAEEGKKRIE

SEQ ID NO: 10837 - DNA, 4679 bp, Muscodor strobelii
  misc_feature: SGI EST ID NO. CUFF.25701.0
  misc_feature: Variant of the nucleotide sequence at SEQ ID NO 10835
tctaactggcgcatttccatttcacgatatttcgggtcgggttctgagcctgggttttgtacgcttaggaccattgttcaacacagcgggtgtctttcgtgatcgtttcctggcatctggggactttctagttacctagcgcctcggaactcttcttcacattccttcatcgccgtttgatcgcttctcgtcctcttgcccagtcctcactatccacttggaccccccttacaataataccatcaacctatttcgtgatatagcttcgacacaaactctgctgctcactcgcccatcatgacactaccctaccgggacattaatgtccacgtcgcacccgaatcttacacctttacctcgccctcttctcccaatgctcccgccctcgttatcgaccgccccaccggcgacgtgcggctcagcgataccgcctccttcaacaccaagcgcgttgcccgtgtctctagtatagccggtattttgggtcttatccgacttagactagacaagtatgccatcgtcatcaccaaagcccaacccgtcggccgcctcaaggggcacatggtctacaaggtcatctctaccgacttcctacccatgcgcgagcgccagatccgcgaccccgacgaggaccagttcttggctatcctgaagacattcatcatgaccggccccatgtatttctcctactcgcttgacctcaccaacagcttccagcgacaagcctctgccgagaactccaccccgctctggatgcgcgccgacgatcgcttctggtggaacaagttcgtgtccaccgacctgaccgacttccgcaagatgggaaaccgatcgcaacaaggaccccagcctgccgtcgacccttacattctgcccttgatttggggcacattagagatacgcccgactaaactcaagagcaccccattgaccatcgccctgattacccgcaagtcgagattccgagctggcacgagatacttcacccgagggctcgacgaagaaggtcacgccgccaactacaacgaaaccgaacagatagtcgttctgaacgacaccggcggcggcttgggaggctacgcggggagtgccgatatgcaaagcggcaaatacggaaagacagacggcaaggagatgcaaatcatgtcatacgtccaaaccagaggaagcatacccgtctactgggccgaaatcaacgccctcaagtacacacccaagcttcaagtgcgcggtatcgagaccgccttccccgcagcgaagaagcatttcgacgagcagatccgcatatacggcgacaactacctcatcaacctcgtcaaccagaaaggtcgcgagaaacctgtcaaggaagcctacgagaaaatggtcgagatgctcatctcctccaaatcagaatctgtctcctccgatcggctgaccgacgagaaattccatgtcatcgaaccccaggctacgaaacaggagtttgatcgcctgcattatatatactttgactaccaccacgagactaagggtatgaggatggatagagcgatgttgctggtcgagagattacacgacgcacttgttgcgcagcagtattttcgcggtgtcgatatgcctgctaactctggtctggagactaggaatttccagaccagtgtggtgaggacgaattgcatggattcgctggatcggacgaatgtcgtgcagagcatgctcgcgaggtggacgctggatcggatatttgtggacttgggtttactgcagcgaggcgagagtttttcgaccgcagacccggcgtttgagtttctgtttaggaacttatgggcggataatgcggatacggtctccaaggcatactccgggactggagctatgaagacggacgtcacgcgactggggaaacggaccagacagggtgcgctacaggacgggaaggtggcgattggacgatattacctcaacaacttcagagatgggccacgacaggatgcttatgacctattcttgggcgcgtatgagcccgccgctgataatattgggtcgaatttggtatttgtggatcgacgaccggtgttgatccagagtattccttacatactcgctttcagcgtgttctttgtcctggtgggcttatttacgagacgactgccggattcgacggtgctgccgatgaggatctttattctgttttggcttgcggctgcgggttggagtctgaattttattttgaagaatgggatgctttatgttaattggccgaagctcaatccgagaccttgggcgaccgagggctatcaggagagtattggcaagattcggaaggatcctgttattggtagcttggtcgcgaagcatgaacgcggtctgagtacggcgaggtatcttaatgctgaggagggcaagaagaggattgaatgatgtggctgctgtctttgtttccaccactcaattgtttgaggacgggggtcgtattgatgctcacttcagtgtagaacgcttcggcacggggagatatacatcagtaataatgagatcccagtgtgtatgactgagcgaggagggtgagagataagtagaatagaaatagatggtgtaatgttgtaaacggtatttttcctacctttaactccccgggcgcgatttgtgtttgatctaatggtggatggtggtcatataaacattcgtgatatcgacaaggacatttcgattaatcctgccctgcaataacagagtaacggcagtgctggtttgggacatttcgcggttgagtgcaagactcctgaataatgtacatatctatcttaacccagcgccatttttgtacatcgtatcacagctcactatcgggctccaaaatccgcaaaagcgctccaacgaggtgtagacttcccgtgaccaatactagaaccctttcatcgcttcctccttgctgcagagcctgagctcgttccctaatctctgacacggcatctgtgacgttactcgttatgctggttgtagtgtctgaacaggtagggtgtgatctgagagcctctgccgcggtgttctgcgctgataaatccggctccgaagtagcatcaggagatgatggagaggggtggagatcgttcctggtgaatatcgcgtgctcaaatggcggcctatctttcaatgtagtagatgaagggatgtgtgtcaggagggtgcgcacgagatggccggagtcccgatcttgttggttgaacagtagaattgttttgctcgttgtggaataggaggatgtgagcttggatgtgtagaatgatgatacttcgatcaaggactcggctgtgtgagcgccgtctattagatatgttatgttactttggatcgggtcgttttgtgtttcgcaccggccacgcagatgggcctgttttaggtgtgctgtgaaggattgggagatggtggacagtgagtggacggttgacgagttgggctgggaagggggtttggtggaggagagagcttggagatgggcgagagcggcgtggacggcgaggctttgattgtatttctggaatgaaccttctagactccctgcgaccttcatatctgttgccacaccgccccaggattgcacatcttcgtcttcaacttccacgagtgttgctcccttttcccctgctcgccgccttaagacgcccatcgtcttctcatcacccaacttcctcgtatagcatggtcgcccaggcttcatgataccagccttatgccatgcgatctcaggtagtgtggcacctaacataccgacgtggtctataccgagttgtgtgattacacacgaggttatagactggggtgggaggatgttggtactgtcgtattctccgcctatcccacattctatcacagcggacgtcacgccttcgctcaggaatgcgcgaaaggcgacaatggttaagaaacggaaaaagaatggttttgttgctgggccactgagagtttcttctgagatttcctcgacggtgtcatcaggtgatgagctagatttccgggcttgatattcagcgcgtgctgcatcggtgcaggaatcccaggcttggaagaaatatttcgtgaacagatctttagagataggcactccgtctatagcgattcgctcgcgcacggagacgaggtggggcgaagtgtatgtcccgacttttccagcagctcgactgttcgtcaaaagagctgtgaggtatgcacatacgcttccctttccttttgttccggctacgtgtatgcattttagttttgagagatcctcttgtgagatgccggctctttgggcccaggccagcatttccggaatcgcgagaccgttgagatcgacttttgcgccattggagggcgatggggttgtgaacagtgatgttatggctttgtttgattggagtgctgcaagatgcgagagcgcatcgtcatatgttctggccatggttgatgagtttcggtgcgcagagaatttggtgagtgtgagtgtgaatgtgattgtggtgagaggtcgcggttcatgagctgcgcggagtaagccggtgagatgcaagaggtgagagcgagtggccatgagcttcgcttggctgacccgagtgagtgagtcttatatacttggaccccccaattggatcatgatatgagttatgtcaccttcatttagatttgataatggccgcgaaatcgcatgttggtttgct

SEQ ID NO: 10838 - DNA, 1737 bp, Muscodor strobelii
  misc_feature: SGI cDNA ID NO. 563458
  misc_feature: Encodes the peptide sequence at SEQ ID NO 10839
atggccactcgctctcacctcttgcatctcaccggcttactccgcgcagctcatgaaccgcgacctctcaccacaatcacattcacactcacactcaccaaattctctgcgcaccgaaactcatcaaccatggccagaacatatgacgatgcgctctcgcatcttgcagcactccaatcaaacaaagccataacatcactgttcacaaccccatcgccctccaatggcgcaaaagtcgatctcaacggtctcgcgattccggaaatgctggcctgggcccaaagagccggcatctcacaagaggatctctcaaaactaaaatgcatacacgtagccggaacaaaaggaaagggaagcgtatgtgcatacctcacagctcttttgacgaacagtcgagctgctggaaaagtcgggacatacacttcgccccacctcgtctccgtgcgcgagcgaatcgctatagacggagtgcctatctctaaagatctgttcacgaaatatttcttccaagcctgggattcctgcaccgatgcagcacgcgctgaatatcaagcccggaaatctagctcatcacctgatgacaccgtcgaggaaatctcagaagaaactctcagtggcccagcaacaaaaccattctttttccgtttcttaaccattgtcgcctttcgcgcattcctgagcgaaggcgtgacgtccgctgtgatagaatgtgggataggcggagaatacgacagtaccaacatcctcccaccccagtctataacctcgtgtgtaatcacacaactcggtatagaccacgtcggtatgttaggtgccacactacctgagatcgcatggcataaggctggtatcatgaagcctgggcgaccatgctatacgaggaagttgggtgatgagaagacgatgggcgtcttaaggcggcgagcaggggaaaagggagcaacactcgtggaagttgaagacgaagatgtgcaatcctggggcggtgtggcaacagatatgaaggtcgcagggagtctagaaggttcattccagaaatacaatcaaagcctcgccgtccacgccgctctcgcccatctccaagctctctcctccaccaaacccccttcccagcccaactcgtcaaccgtccactcactgtccaccatctcccaatccttcacagcacacctaaaacaggcccatctgcgtggccggtgcgaaacacaaaacgacccgatccaaagtaacataacatatctaatagacggcgctcacacagccgagtccttgatcgaagtatcatcattctacacatccaagctcacatcctcctattccacaacgagcaaaacaattctactgttcaaccaacaagatcgggactccggccatctcgtgcgcaccctcctgacacacatcccttcatctactacattgaaagataggccgccatttgagcacgcgatattcaccaggaacgatctccacccctctccatcatctcctgatgctacttcggagccggatttatcagcgcagaacaccgcggcagaggctctcagatcacaccctacctgttcagacactacaaccagcataacgagtaacgtcacagatgccgtgtcagagattagggaacgagctcaggctctgcagcaaggaggaagcgatgaaagggttctagtattggtcacgggaagtctacacctcgttggagcgcttttgcggattttggagcccgatagtgagctgtga

SEQ ID NO: 10839 - protein, 578 aa, Muscodor strobelii
  misc_feature: SGI Peptide ID NO. 563458
  misc_feature (47)..(570): NCBI GI: 171694838 Blast Desc: protein product [Podospora anserina] gi|170947661|emb|CAP59823.1| protein product [Podospora anserina]
  misc_feature (46)..(549): NCBI GI: 85115067 Blast Desc: NCU00893 [Neurospora crassa OR74A] gi|28926603|gb|EAA35573.1| conserved [Neurospora crassa OR74A] gi|38636470|emb|CAE82005.1| related to folylpolyglutamate crassa]
  misc_feature (42)..(577): NCBI GI: 154297118 Blast Desc: BC1G_12218 [Botryotinia fuckeliana B05.10] gi|150843047|gb|EDN18240.1| BC1G_12218 [Botryotinia fuckeliana B05.10]
  misc_feature (42)..(573): NCBI GI: 156057135 Blast Desc: SS1G_04298 [Sclerotinia sclerotiorum 1980] gi|154702084|gb|EDO01823.1| SS1G_04298 [Sclerotinia sclerotiorum 1980]
  misc_feature (36)..(437): NCBI GI: 256735458 Blast Desc: [Nectria haematococca mpVI 77-13-4]
  misc_feature (35)..(418): NCBI GI: 46107604 Blast Desc: FG00685.1 [Gibberella zeae PH-1]
  misc_feature (44)..(573): NCBI GI: 242808397 Blast Desc: tetrahydrofolylpolyglutamate synthase (Met7), [Talaromyces stipitatus ATCC 10500] gi|218715778|gb|EED15200.1| tetrahydrofolylpolyglutamate synthase (Met7), [Talaromyces ATCC
  misc_feature (39)..(573): NCBI GI: 119180272 Blast Desc: folylpolyglutamate synthase [Coccidioides immitis RS]
  misc_feature (44)..(573): NCBI GI: 261205988 Blast Desc: folylpolyglutamate synthase [Ajellomyces dermatitidis SLH14081] gi|239592790|gb|EEQ75371.1| folylpolyglutamate synthase [Ajellomyces dermatitidis SLH14081]
  misc_feature (44)..(573): NCBI GI: 239611050 Blast Desc: folylpolyglutamate synthase [Ajellomyces dermatitidis ER-3]
  misc_feature (44)..(573): SWISSPROT Homolog: EC 6.3.2.17 Tetrahydrofolate synthase
MATRSHLLHLTGLLRAAHEPRPLTTITFTLTLTKFSAHRNSSTMARTYDDALSHLAALQSNKAITSLFTTPSPSNGAKVDLNGLAIPEMLAWAQRAGISQEDLSKLKCIHVAGTKGKGSVCAYLTALLTNSRAAGKVGTYTSPHLVSVRERIAIDGVPISKDLFTKYFFQAWDSCTDAARAEYQARKSSSSPDDTVEEISEETLSGPATKPFFFRFLTIVAFRAFLSEGVTSAVIECGIGGEYDSTNILPPQSITSCVITQLGIDHVGMLGATLPEIAWHKAGIMKPGRPCYTRKLGDEKTMGVLRRRAGEKGATLVEVEDEDVQSWGGVATDMKVAGSLEGSFQKYNQSLAVHAALAHLQALSSTKPPSQPNSSTVHSLSTISQSFTAHLKQAHLRGRCETQNDPIQSNITYLIDGAHTAESLIEVSSFYTSKLTSSYSTTSKTILLFNQQDRDSGHLVRTLLTHIPSSTTLKDRPPFEHAIFTRNDLHPSPSSPDATSEPDLSAQNTAAEALRSHPTCSDTTTSITSNVTDAVSEIRERAQALQQGGSDERVLVLVTGSLHLVGALLRILEPDSEL

SEQ ID NO: 10840 - DNA, 1461 bp, Muscodor strobelii
  misc_feature: SGI cDNA ID NO. 563459
  misc_feature: Encodes the peptide sequence at SEQ ID NO 10841
atgaatgctccagagagtacttatgaggatgccattgctatattacgcgcaagaaggcggcagaaaagaccaggtactagcgcgtcgacaaccaagaatcatgatagaatccctgacgcgaaggggaagctggatttgcgcggcaccccaagcatccaaggcatgcgcgaatggctacaattgatagggcattcaccaaacgatgtagatagattgaacgtggttcatgtcgcggggacaaagggaaaaggaagcacatgtgccttcgtagagtccatcctgcgaacgtatggggagagaacaggcttcccgaacaagacaggtctttacacatcacctcatctcatacatcccgaggagagaattcggatcaacttccaacctcttgcacgaacacttttcacgaagtactttttcgaggtatgggataagctctcccatctgaaccctcctccacgctttcttcagctatactgtttattcgcaacacacgtcttcatccgcgaaggcgtcgatgcagcgatctacgaaacgcatcatggaggtgaatacgatgcgaccaatttcctctgccagcccgtcgcaacgattgtgactccactaggcatggatcatatcagccagcttggcccgacattgaataacatcgcatggcataaagctggcattctcaaaccgggtgcacttgcattctcggctatccaagaatcaggtccgacggatgtaataaggaatcgcgcagcggagaaacaagttgatatgagctttgtctcagagtcaccagagctaccaaaaaacgcgatgcaattaaaacctgatgtccaacgagccaattgctctctcgcgcttgcggctgtacgcggattcctcgacaagacaacagcgtctaataaggcaggccgtcttcaacctgaagacattgaaaaggcgatcagtcggttctcttggcctggtaggttccaatacatatgtcaagacaacgtgcattggtttttagacggtgcacacaatgaaatgagtgtggtgaaggccgctgagtggttcatagaaggttccgaaatggtacaaaaatcatcaataagagtactggttttcgcgcaggtttcggaagagcgtgatacagtcgatgtcttcaggcaactggcactagccttacagaaaacaccgttcgatcatgttatactcgcctcatacgagaagagagaacctcttgaagactcagctgaaagtactcttgtccagccgattgactcgtccaagcaagaaaaacataatgcccaaatgaaaatctttgcgacactatggcgtcaactccaaccggattctactattcatcttagatcaagccccgagagtgcgatggacagtgcaagagaaattgccatgaaatccgggggcatgagagccttggtcactggtagtcttttccttatgggtagtgcgctacgctacctagcgtag

SEQ ID NO: 10841 - protein, 486 aa, Muscodor strobelii
  misc_feature: SGI Peptide ID NO. 563459
  misc_feature (7)..(485): NCBI GI: 212527468 Blast Desc: tetrahydrofolylpolyglutamate synthase, [Penicillium marneffei ATCC 18224] gi|210073289|gb|EEA27376.1| tetrahydrofolylpolyglutamate synthase, [Penicillium marneffei
  misc_feature (7)..(485): NCBI GI: 242783804 Blast Desc: tetrahydrofolylpolyglutamate synthase, [Talaromyces stipitatus ATCC 10500] gi|218720406|gb|EED19825.1| tetrahydrofolylpolyglutamate synthase, [Talaromyces stipitatus
  misc_feature (7)..(485): NCBI GI: 225556213 Blast Desc: folylpolyglutamate synthase [Ajellomyces capsulatus G186AR]
  misc_feature (7)..(485): NCBI GI: 261192400 Blast Desc: folylpolyglutamate synthase [Ajellomyces dermatitidis SLH14081] gi|239589482|gb|EEQ72125.1| folylpolyglutamate synthase [Ajellomyces dermatitidis SLH14081]
  misc_feature (7)..(485): NCBI GI: 240276707 Blast Desc: folylpolyglutamate synthase [Ajellomyces capsulatus H143]
  misc_feature (7)..(485): NCBI GI: 239615198 Blast Desc: folylpolyglutamate synthase [Ajellomyces dermatitidis ER-3]
  misc_feature (7)..(485): NCBI GI: 145231934 Blast Desc: An02g02950 [Aspergillus niger] gi|134056344|emb|CAK47579.1| protein product [Aspergillus niger]
  misc_feature (51)..(347): NCBI GI: 256726235 Blast Desc: NECHADRAFT_4290 [Nectria haematococca mpVI 77-13-4]
  misc_feature (7)..(402): NCBI GI: 70991971 Blast Desc: tetrahydrofolylpolyglutamate synthase [Aspergillus fumigatus Af293] gi|66848467|gb|EAL88796.1| tetrahydrofolylpolyglutamate synthase, [Aspergillus fumigatus
  misc_feature (55)..(402): NCBI GI: 119484122 Blast Desc: folylpolyglutamate synthase [Neosartorya fischeri NRRL 181] gi|119410120|gb|EAW20067.1| folylpolyglutamate synthase [Neosartorya fischeri NRRL 181]
  misc_feature (1)..(485): SWISSPROT Homolog: EC 6.3.2.17 Tetrahydrofolate synthase
MNAPESTYEDAIAILRARRRQKRPGTSASTTKNHDRIPDAKGKLDLRGTPSIQGMREWLQLIGHSPNDVDRLNVVHVAGTKGKGSTCAFVESILRTYGERTGFPNKTGLYTSPHLIHPEERIRINFQPLARTLFTKYFFEVWDKLSHLNPPPRFLQLYCLFATHVFIREGVDAAIYETHHGGEYDATNFLCQPVATIVTPLGMDHISQLGPTLNNIAWHKAGILKPGALAFSAIQESGPTDVIRNRAAEKQVDMSFVSESPELPKNAMQLKPDVQRANCSLALAAVRGFLDKTTASNKAGRLQPEDIEKAISRFSWPGRFQYICQDNVHWFLDGAHNEMSVVKAAEWFIEGSEMVQKSSIRVLVFAQVSEERDTVDVFRQLALALQKTPFDHVILASYEKREPLEDSAESTLVQPIDSSKQEKHNAQMKIFATLWRQLQPDSTIHLRSSPESAMDSAREIAMKSGGMRALVTGSLFLMGSALRYLA

SEQ ID NO: 10842 - DNA, 1667 bp, Muscodor strobelii
  misc_feature: SGI EST ID NO. CUFF.25705.1
  misc_feature: Variant of the nucleotide sequence at SEQ ID NO 10840
ggtcgattgagcattccctatattaaaaaaatcttcctcgcctacggcaccgtcacacacctcacttctgaatttccggagtcgctggaagacgttctgatgcagcggggccttagagcgctcgggactgctaggcaaaccatgaatgctccagagagtacttatgaggatgccattgctatattacgcgcaagaaggcggcagaaaagaccaggtactagcgcgtcgacaaccaagaatcatgatagaatccctgacgcgaaggggaagctggatttgcgcggcaccccaagcatccaaggcatgcgcgaatggctacaattgatagggcattcaccaaacgatgtagatagattgaacgtggttcatgtcgcggggacaaagggaaaaggaagcacatgtgccttcgtagagtccatcctgcgaacgtatggggagagaacaggcttcccgaacaagacaggtctttacacatcacctcatctcatacatcccgaggagagaattcggatcaacttccaacctcttgcacgaacacttttcacgaagtactttttcgaggtatgggataagctctcccatctgaaccctcctccacgctttcttcagctatactgtttattcgcaacacacgtcttcatccgcgaaggcgtcgatgcagcgatctacgaaacgcatcatggaggtgaatacgatgcgaccaatttcctctgccagcccgtcgcaacgattgtgactccactaggcatggatcatatcagccagcttggcccgacattgaataacatcgcatggcataaagctggcattctcaaaccgggtgcacttgcattctcggctatccaagaatcaggtccgacggatgtaataaggaatcgcgcagcggagaaacaagttgatatgagctttgtctcagagtcaccagagctaccaaaaaacgcgatgcaattaaaacctgatgtccaacgagccaattgctctctcgcgcttgcggctgtacgcggattcctcgacaagacaacagcgtctaataaggcaggccgtcttcaacctgaagacattgaaaaggcgatcagtcggttctcttggcctggtaggttccaatacatatgtcaagacaacgtgcattggtttttagacggtgcacacaatgaaatgagtgtggtgaaggccgctgagtggttcatagaaggttccgaaatggtacaaaaatcatcaataagagtactggttttcgcgcaggtttcggaagagcgtgatacagtcgatgtcttcaggcaactggcactagccttacagaaaacaccgttcgatcatgttatactcgcctcatacgagaagagagaacctcttgaagactcagctgaaagtactcttgtccagccgattgactcgtccaagcaagaaaaacataatgcccaaatgaaaatctttgcgacactatggcgtcaactccaaccggattctactattcatcttagatcaagccccgagagtgcgatggacagtgcaagagaaattgccatgaaatccgggggcatgagagccttggtcactggtagtcttttccttatgggtagtgcgctacgctacctagcgtagacagagacatataaatttctccatatacatcgaacgagacttctcatcgccatagacctgtgaac

SEQ ID NO: 10843 - DNA, 1119 bp, Muscodor strobelii
  misc_feature: SGI cDNA ID NO. 563460
  misc_feature: Elevated expression when VOC is produced
  misc_feature: Encodes the peptide sequence at SEQ ID NO 10844
atgtcgaaaaaggatgctcgtccgatcatttctcatcaacccctaagagcgggcttcaagctactatacttcgggtctatcagtgttcgtttgccgttgtggctcactgtctcgctcatcccatcgctgcggcctcacccaacatggacattcaaacaagttctgatgactcgtttgatatacgctgcaatagatatggaggctcgcatcggcattacgaagactgtcgcgctcgataaagagatcaccaagaatcccaacttccaagtcattgagccatatgcttcggacctctacaagggagcagtggcgggtggtcacaatgccaaacctactgcagccggtggcacgtggtacccacggctcccagagaaagacatcatatccaagaccatagtcctctatcttcatggaggggctttcattaagggagacagtagaccaagcttctccggattcatgagcaagaccctcttagaatatgggaaggtagacgcattattctcagtcgagtatcgactttctggtcatgctatgctcaaccctttccctgcagcgatacaggacgctctcacagcttatctgtacatttgcaaaagcctccaagttccaactgaccagattgtcttggttggggacagcgcaggtggcaatcttgccattgctttgctacggtacatccaggagcatggatccgacctcaaattatcgcctccaggttgctgtgtcctattctccccctgggttgcgccgtttgatctcggcatcaagagaagtccaaattttcgtggtgattggctcccaccatcggctttaagatggggagctcattcttatggagcaagcctatgtagccctgcaacccatcgatttgtgacccccctcggtaaccctttcgtggccgggaccccaatttctgtcagctatggagagtttgaagtctttgatcagaacattatgcagtgggcatatgagatgaaggaaaagaaccatattcagatgagccgtgaggctggtgttccccatgatacgtctcttgttggcgaattccttggcttcaagcaaagcgcaatagagttagcagcgaaagcaggaaagttcattgtcgaaaccaaatag

SEQ ID NO: 10844 - protein, 372 aa, Muscodor strobelii
  misc_feature: SGI Peptide ID NO. 563460
  misc_feature (133)..(346): Pfam Id: PF07859 Pfam Desc: alpha/beta hydrolase fold
  misc_feature (181)..(279): Pfam Id: PF07859 Pfam Desc: alpha/beta hydrolase fold
  misc_feature (9)..(372): NCBI GI: 169619948 Blast Desc: SNOG_13174 [Phaeosphaeria nodorum SN15] gi|111058381|gb|EAT79501.1| SNOG_13174 [Phaeosphaeria nodorum SN15]
  misc_feature (10)..(370): NCBI GI: 189201383 Blast Desc: alpha/beta hydrolase fold-3 domain containing protein [Pyrenophora tritici-repentis Pt-1C-BFP] gi|187984127|gb|EDU49615.1| alpha/beta hydrolase fold-3 domain
  misc_feature (29)..(372): NCBI GI: 154299472 Blast Desc: BC1G_10998 [Botryotinia fuckeliana B05.10] gi|150857340|gb|EDN32532.1| BC1G_10998 [Botryotinia fuckeliana B05.10]
  misc_feature (35)..(353): NCBI GI: 46139569 Blast Desc: FG11299.1 [Gibberella zeae PH-1]
  misc_feature (41)..(368): NCBI GI: 145231321 Blast Desc: An02g00070 [Aspergillus niger] gi|134056047|emb|CAK96222.1| protein product [Aspergillus niger]
  misc_feature (39)..(372): NCBI GI: 255953197 Blast Desc: Pc21g02870 [Penicillium chrysogenum Wisconsin 54-1255] gi|211589062|emb|CAP95184.1| Pc21g02870 [Penicillium chrysogenum Wisconsin 54-1255]
  misc_feature (26)..(368): NCBI GI: 255946570 Blast Desc: Pc22g00020 [Penicillium chrysogenum Wisconsin 54-1255] gi|211591069|emb|CAP97290.1| Pc22g00020 [Penicillium chrysogenum Wisconsin 54-1255]
  misc_feature (37)..(371): NCBI GI: 116200945 Blast Desc: CHGG_08357 [Chaetomium globosum CBS 148.51] gi|88176875|gb|EAQ84343.1| CHGG_08357 [Chaetomium globosum CBS 148.51]
  misc_feature (29)..(367): NCBI GI: 156042101 Blast Desc: SS1G_11601 [Sclerotinia sclerotiorum 1980] gi|154695984|gb|EDN95722.1| SS1G_11601 [Sclerotinia sclerotiorum 1980]
  misc_feature (6)..(370): NCBI GI: 156040848 Blast Desc: SS1G_11402 [Sclerotinia sclerotiorum 1980] gi|154695786|gb|EDN95524.1| SS1G_11402 [Sclerotinia sclerotiorum 1980]
  misc_feature: Useful for introducing or modulating the production of volatile compounds
MSKKDARPIISHQPLRAGFKLLYFGSISVRLPLWLTVSLIPSLRPHPTWTFKQVLMTRLIYAAIDMEARIGITKTVALDKEITKNPNFQVIEPYASDLYKGAVAGGHNAKPTAAGGTWYPRLPEKDIISKTIVLYLHGGAFIKGDSRPSFSGFMSKTLLEYGKVDALFSVEYRLSGHAMLNPFPAAIQDALTAYLYICKSLQVPTDQIVLVGDSAGGNLAIALLRYIQEHGSDLKLSPPGCCVLFSPWVAPFDLGIKRSPNFRGDWLPPSALRWGAHSYGASLCSPATHRFVTPLGNPFVAGTPISVSYGEFEVFDQNIMQWAYEMKEKNHIQMSREAGVPHDTSLVGEFLGFKQSAIELAAKAGKFIVETK

SEQ ID NO: 10845 - DNA, 1545 bp, Muscodor strobelii
  misc_feature: SGI EST ID NO. CUFF.25805.2
  misc_feature: Variant of the nucleotide sequence at SEQ ID NO 10843
ctctaattaagcatcgcgtttggttcggagaaatatgtatgcggtgtctctggaatggtaccgttgtaggaagtaaccaacaatgtcatctttgcatcagctgtgatcacgacgcctcagtttagacacgcctgtttgtgcaaaaaaatatgtagaatagttctaacaagacatagatagtccgatgtatttaaagcgcattaaatccatcagaattctggtaatcgtcgctcaagagacacagtcttttggtattactggtccttgtcactgttattttcatcactaccagccaggactctgctatcaatcaatagcgaagatgtcgaaaaaggatgctcgtccgatcatttctcatcaacccctaagagcgggcttcaagctactatacttcgggtctatcagtgttcgtttgccgttgtggctcactgtctcgctcatcccatcgctgcggcctcacccaacatggacattcaaacaagttctgatgactcgtttgatatacgctgcaatagatatggaggctcgcatcggcattacgaagactgtcgcgctcgataaagagatcaccaagaatcccaacttccaagtcattgagccatatgcttcggacctctacaagggagcagtggcgggtggtcacaatgccaaacctactgcagccggtggcacgtggtacccacggctcccagagaaagacatcatatccaagaccatagtcctctatcttcatggaggggctttcattaagggagacagtagaccaagcttctccggattcatgagcaagaccctcttagaatatgggaaggtagacgcattattctcagtcgagtatcgactttctggtcatgctatgctcaaccctttccctgcagcgatacaggacgctctcacagcttatctgtacatttgcaaaagcctccaagttccaactgaccagattgtcttggttggggacagcgcaggtggcaatcttgccattgctttgctacggtacatccaggagcatggatccgacctcaaattatcgcctccaggttgctgtgtcctattctccccctgggttgcgccgtttgatctcggcatcaagagaagtccaaattttcgtggtgattggctcccaccatcggctttaagatggggagctcattcttatggagcaagcctatgtagccctgcaacccatcgatttgtgacccccctcggtaaccctttcgtggccgggaccccaatttctgtcagctatggagagtttgaagtctttgatcagaacattatgcagtgggcatatgagatgaaggaaaagaaccatattcagatgagccgtgaggctggtgttccccatgatacgtctcttgttggcgaattccttggcttcaagcaaagcgcaatagagttagcagcgaaagcaggaaagttcattgtcgaaaccaaatagcagaagaggcgcacagcatttgtatagctgacttgtctcagctgctgaagcaccaaaaattcaagatttagtatttagagttccttacgaagtcgtgaaaccgc

SEQ ID NO: 10846 - DNA, 996 bp, Muscodor strobelii
  misc_feature: SGI cDNA ID NO. 563461
  misc_feature: Reduced expression when VOC is produced
  misc_feature: Encodes the peptide sequence at SEQ ID NO 10847
atgggcaatgacaactctgagcgggtcacagattcgatgaaatggcccctgagcgaacaagttccagacttgactgggaaagttgcattggttacaggtgccaattcatctggcggaatgggctttcatatcgcatatcaaatggcttctaaaaatgccaaagtctatataggagctcgcactacctccaaagcccactccgcaatacaggaaataaagacagagaatccgaatatcgggaatcatcagcttgttccctttgttgctgacttgggcgacttaagagctgtacagacttctgctcaggctctgttgagatgcgaggagaggctagatgtgctagttcacaatgctgctgtaatctcaatgccgctagagataaactcagacggtgtatccgtctctttcgcaacgaaccacctaggtccctttatcttgaccaatactgtcatgccactcttgataaaggcagcaaataagactggcgatgcccgagttgtcatggtctccgcagcatcgttcaagctcttgccacaaggaatccggtttaactctctcgaaaacttcaacgctgagatggagcccactgcgcttggcggtgcagatttcacccgatacagtctatcaaagctcgcaaatatcctgtacgcgaggcagctccagaagaacttcgatgcagccggtgtcaatgtgaccgcaatggctcttcatccggggttgatcaagacggacggagtcgtcaactcgctacagccaagcaaggctcgtactcttgatgggaggctcgcaccagccgagggagctgtcactgcactctttgcagccactaaccctacagtgtttctacagagggacaaatacaagggcgtattcctcgtgcctcccgggtctgtagaagcgctcacgggagatgctaacagtgataatcttgcccgggaactatgggttacatcggagctagttatcgaagatattgtgggacaacagaatttatga

SEQ ID NO: 10847 - protein, 331 aa, Muscodor strobelii
  misc_feature: SGI Peptide ID NO. 563461
  misc_feature (27)..(186): Pfam Id: PF00106 Pfam Desc: short chain dehydrogenase
  misc_feature (27)..(174): Pfam Id: PF00106 Pfam Desc: short chain dehydrogenase
  misc_feature (14)..(325): NCBI GI: 212530372 Blast Desc: short-chain dehydrogenase, [Penicillium marneffei ATCC 18224] gi|210074741|gb|EEA28828.1| short-chain dehydrogenase, [Penicillium marneffei ATCC 18224]
  misc_feature (14)..(254): NCBI GI: 169763490 Blast Desc: [Aspergillus oryzae RIB40] gi|83770673|dbj|BAE60806.1| protein product [Aspergillus oryzae]
  misc_feature (15)..(318): NCBI GI: 238495096 Blast Desc: carbonyl reductase, [Aspergillus flavus NRRL3357] gi|220695434|gb|EED51777.1| carbonyl reductase, [Aspergillus flavus NRRL3357]
  misc_feature (19)..(328): NCBI GI: 119480111 Blast Desc: oxidoreductase, short-chain dehydrogenase/reductase family [Neosartorya fischeri NRRL 181] gi|119408238|gb|EAW18187.1| oxidoreductase, short-chain family
  misc_feature (22)..(318): NCBI GI: 256729987 Blast Desc: NECHADRAFT_26779 [Nectria haematococca mpVI 77-13-4]
  misc_feature (14)..(325): NCBI GI: 19075284 Blast Desc: short chain dehydrogenase [Schizosaccharomyces pombe] gi|74582607|sp|O74959.1|YJCD_SCHPO RecName: Full=Uncharacterized oxidoreductase C736.13 gi|3169083|emb|CAA19277.1| short chain ()
  misc_feature (19)..(319): NCBI GI: 159128997 Blast Desc: oxidoreductase, short-chain dehydrogenase/reductase family [Aspergillus fumigatus A1163]
  misc_feature (20)..(323): NCBI GI: 46117500 Blast Desc: FG04592.1 [Gibberella zeae PH-1]
  misc_feature (21)..(319): NCBI GI: 70989477 Blast Desc: oxidoreductase, short-chain dehydrogenase/reductase family [Aspergillus fumigatus Af293] gi|66847219|gb|EAL87550.1| oxidoreductase, short-chain dehydrogenase/reductase family Af293]
  misc_feature (20)..(319): NCBI GI: 242216971 Blast Desc: [Postia placenta Mad-698-R] gi|220726581|gb|EED80526.1| [Postia placenta Mad-698-R]
  misc_feature (28)..(278): SWISSPROT Homolog: EC 1.1.1.189 Prostaglandin-E(2) 9-reductase
  misc_feature (28)..(278): SWISSPROT Homolog: EC 1.1.1.197 15-hydroxyprostaglandin dehydrogenase (NADP(+))
  misc_feature (28)..(278): SWISSPROT Homolog: EC 1.1.1.184 Carbonyl reductase (NADPH)
  misc_feature: Useful for introducing or modulating the production of volatile compounds
MGNDNSERVTDSMKWPLSEQVPDLTGKVALVTGANSSGGMGFHIAYQMASKNAKVYIGARTTSKAHSAIQEIKTENPNIGNHQLVPFVADLGDLRAVQTSAQALLRCEERLDVLVHNAAVISMPLEINSDGVSVSFATNHLGPFILTNTVMPLLIKAANKTGDARVVMVSAASFKLLPQGIRFNSLENFNAEMEPTALGGADFTRYSLSKLANILYARQLQKNFDAAGVNVTAMALHPGLIKTDGVVNSLQPSKARTLDGRLAPAEGAVTALFAATNPTVFLQRDKYKGVFLVPPGSVEALTGDANSDNLARELWVTSELVIEDIVGQQNL

SEQ ID NO: 10848 - DNA, 278 bp, Muscodor strobelii
  misc_feature: SGI EST ID NO. CUFF.25720.0
  misc_feature: Variant of the nucleotide sequence at SEQ ID NO 10846
cgaggagaggctagatgtgctagttcacaatgctgctgtaatctcaatgccgctagagataaactcagacggtgtatccgtctctttcgcaacgaaccacctaggtccctttatcttgaccaatactgtcatgccactcttgataaaggcagcaaataagactggcgatgcccgagttgtcatggtctccgcagcatcgttcaagctcttgccacaaggaatccggtttaactctctcgaaaacttcaacgctgagatggagcccactgcgcttggcg

SEQ ID NO: 10849 - DNA, 1092 bp, Muscodor strobelii
  misc_feature: SGI cDNA ID NO. 563462
  misc_feature: Encodes the peptide sequence at SEQ ID NO 10850
atgtctgttacagacaagctgcccaagattgtcggcatttatgggttccagttttatgagggatcgaaggtgatcgcagatcttgttcctggcggagccaacaaatttcaacaaatgaacgagcaggataagctcagtcgtcgtgaatgtgccattgacgccattcggcaagactgtctagacaatgggagagttggagttgtttctgggcattttctgttctggtctgatggcaaggaaatgggacagccagtcatcacttcccgagatttggcaacctacacgcacattctatatcatgacattcccgcacatgtcattgcgcagaattggctgaaagacaccaagggcaagagtagatgccgtcaattggcctctgttgatcatctacagaaatggaaggctgctgagaaggatcaactacgtggtctctgccaggataatcgcatactgttcggcgtcctttcttgccgagagacactaattgacagagtttcgacgctcatacgggatttcaagtatcataacgaacactacattctacgtcgcgtggagcgtcaagtcgatgaggcgcgtgctgctaacggccccttggagactatgttggtaattgacggcgacaagaccctcgccagtgacgacactggtgagatgttctgcagaaagggaactcaacaagtaccatcccgcctgaagagtctattcgaaagtccgctcggatactcatatgcagcatttcgccaggtagcattgctgtacgaggagattactgagagccataactttcgcaagctctgctgcacggtagcagattcggttaaactacacccgaagtctcagttattattacggcgcgttaagagagatgatcatgttggcgcgattattgtgacctgtggcatacgccatatctggacagatgtacttacaaaggaaggcctatcaaacgtgccggcgattggcggtgggcgtatcgaggatggattcgtaaaggagagcatcgtctcgtgcctaagaaatgatcatcgcctccacgtcgtggcaattggcgatagtccgctggacctaccaatgctgaaggcagctaactag

SEQ ID NO: 10850 - protein, 363 aa, Muscodor strobelii
  misc_feature: SGI Peptide ID NO. 563462
  misc_feature (8)..(363): NCBI GI: 256721416 Blast Desc: NECHADRAFT_98111 [Nectria haematococca mpVI 77-13-4]
  misc_feature (8)..(363): NCBI GI: 242795774 Blast Desc: conserved [Talaromyces stipitatus ATCC 10500] gi|218719249|gb|EED18669.1| conserved [Talaromyces stipitatus ATCC 10500]
  misc_feature (8)..(363): NCBI GI: 46115638 Blast Desc: FG03661.1 [Gibberella zeae PH-1]
  misc_feature (5)..(363): NCBI GI: 115399014 Blast Desc: [Aspergillus terreus NIH2624] gi|114191979|gb|EAU33679.1| [Aspergillus terreus NIH2624]
  misc_feature (24)..(363): NCBI GI: 258573211 Blast Desc: conserved [Uncinocarpus reesii 1704] gi|237901053|gb|EEP75454.1| conserved [Uncinocarpus reesii 1704]
  misc_feature (8)..(363): NCBI GI: 116200355 Blast Desc: CHGG_08333 [Chaetomium globosum CBS 148.51] gi|88179612|gb|EAQ87080.1| CHGG_08333 [Chaetomium globosum CBS 148.51]
  misc_feature (8)..(363): NCBI GI: 255930883 Blast Desc: Pc12g00980 [Penicillium chrysogenum Wisconsin 54-1255] gi|211581617|emb|CAP79725.1| Pc12g00980 [Penicillium chrysogenum Wisconsin 54-1255]
  misc_feature (8)..(363): NCBI GI: 171681210 Blast Desc: protein product [Podospora anserina] gi|170940563|emb|CAP65791.1| protein product [Podospora anserina]
  misc_feature (15)..(363): NCBI GI: 189201707 Blast Desc: conserved [Pyrenophora tritici-repentis Pt-1C-BFP] gi|187984289|gb|EDU49777.1| conserved [Pyrenophora tritici-repentis Pt-1C-BFP]
  misc_feature (8)..(363): NCBI GI: 189211462 Blast Desc: conserved [Pyrenophora tritici-repentis Pt-1C-BFP] gi|187978154|gb|EDU44780.1| conserved [Pyrenophora tritici-repentis Pt-1C-BFP]
MSVTDKLPKIVGIYGFQFYEGSKVIADLVPGGANKFQQMNEQDKLSRRECAIDAIRQDCLDNGRVGVVSGHFLFWSDGKEMGQPVITSRDLATYTHILYHDIPAHVIAQNWLKDTKGKSRCRQLASVDHLQKWKAAEKDQLRGLCQDNRILFGVLSCRETLIDRVSTLIRDFKYHNEHYILRRVERQVDEARAANGPLETMLVIDGDKTLASDDTGEMFCRKGTQQVPSRLKSLFESPLGYSYAAFRQVALLYEEITESHNFRKLCCTVADSVKLHPKSQLLLRRVKRDDHVGAIIVTCGIRHIWTDVLTKEGLSNVPAIGGGRIEDGFVKESIVSCLRNDHRLHVVAIGDSPLDLPMLKAAN

SEQ ID NO: 10851 - DNA, 462 bp, Muscodor strobelii
  misc_feature: SGI cDNA ID NO. 563463
  misc_feature: Encodes the peptide sequence at SEQ ID NO 10852
atggcgtccaaagcgtcaaggaggataccacaccagtggcataatgcactaagtctatctcgccagccatcgtctgcttggcatcgagaacgcctgcgcgaggaactcgcggaataccgcgctgcgaagacgagtctggaaaagctcagcgaaactgctggcgtcttcttcacgctcagtcgagcagcttacgatggatttccaatacgtcgattgccctgctttgctacctctcatgttttggtctatggatacatgctaggcacatacacctcgcgccggctctttttccgcgtgattgttctgctttgcaaaacttcggcgccttctatggcgagagaggtggtgaatcaaaacaaggactccaaactgggagatgtcgctacgcgtcatggcattgaccagcggaagttcaagctgaacggcaggcgacttcgccgattctggccattgttcccgtag

SEQ ID NO: 10852 - protein, 153 aa, Muscodor strobelii
  misc_feature: SGI Peptide ID NO. 563463
  misc_feature (6)..(153): NCBI GI: 256720874 Blast Desc: NECHADRAFT_85609 [Nectria haematococca mpVI 77-13-4]
  misc_feature (12)..(153): NCBI GI: 256721415 Blast Desc: NECHADRAFT_55110 [Nectria haematococca mpVI 77-13-4]
  misc_feature (8)..(153): NCBI GI: 11288550 Blast Desc: NECHADRAFT_55110 [Nectria haematococca mpVI 77-13-4]
  misc_feature (12)..(153): NCBI GI: 189201705 Blast Desc: conserved [Pyrenophora tritici-repentis Pt-1C-BFP] gi|189211460|ref|XP_001942060.1| conserved [Pyrenophora tritici-repentis Pt-1C-BFP] gi|187978153|gb|EDU44779.1| conserved
  misc_feature (13)..(153): NCBI GI: 255930885 Blast Desc: Pc12g00990 [Penicillium chrysogenum Wisconsin 54-1255] gi|211581618|emb|CAP79726.1| Pc12g00990 [Penicillium chrysogenum Wisconsin 54-1255]
  misc_feature (12)..(139): NCBI GI: 169626240 Blast Desc: SNOG_16403 [Phaeosphaeria nodorum SN15] gi|111055108|gb|EAT76228.1| SNOG_16403 [Phaeosphaeria nodorum SN15]
  misc_feature (13)..(138): NCBI GI: 242795779 Blast Desc: conserved [Talaromyces stipitatus ATCC 10500] gi|218719250|gb|EED18670.1| conserved [Talaromyces stipitatus ATCC 10500]
  misc_feature (28)..(138): NCBI GI: 242792237 Blast Desc: TSTA_117060 [Talaromyces stipitatus ATCC 10500] gi|218718500|gb|EED17920.1| TSTA_117060 [Talaromyces stipitatus ATCC 10500]
MASKASRRIPHQWHNALSLSRQPSSAWHRERLREELAEYRAAKTSLEKLSETAGVFFTLSRAAYDGFPIRRLPCFATSHVLVYGYMLGTYTSRRLFFRVIVLLCKTSAPSMAREVVNQNKDSKLGDVATRHGIDQRKFKLNGRRLRRFWPLFP

SEQ ID NO: 10853 - DNA, 5277 bp, Muscodor strobelii
  misc_feature: SGI EST ID NO. CUFF.25726.0
  misc_feature: Variant of the nucleotide sequence at SEQ ID NO 10851
catttattgagtgctagattcttttcctattatgaaaagacacaggctgtcagcctagaacaggatgtcttgaaaagacaactcattttcgggaatgctgcaaattttcaggcgtacctgctgctctgctagatcatatctttcaaccacaacgagagcgaacgtattcgcgaggcgcagcatggcgaccgaagcatcccgcagctacaatgatgcgattgacgcactcaactccctccagactcccttcgcgatactcgaagcgcggaaaaaagccggtatccgacctgatgcgacattcattgcggagatgcgcatttacttgcagcgcatcggctacacaccctcagatctgacgcgactcaacatcctacacgtagcgggtaccaagggaaagggaagcacgtgcgcatttgccgcgtcaatactctcgcaatatcaaaaatcacacgggaacccacagaagatcggtctcttcaccagcccgcatttaattgccgttcgagagcggatacgtctcaatggcgcgccaatcagcgaagctcttttcgccaagtacttcttcgaagtttgggaccggctcggggctgctgaagagaaggaaggcccgttcacagttgacgagcgcattggtgtaccttcgccgccacggccaatctactttcgttatcttacattgatgagctatcacgtgttcttacaagagggcgttgacgctgcagtttatgagacgggtatcggaggtgaatttgacgcgacgaatattgcggaaaagccactggcaaccggtatcagcaccctcgccattgaccatgtctttgcgcttggtgacacggtcgagaaaattgcctggcataaagcggggattatgaagcccgaaagtacggcgttcaccattgaacaattgcctggcgcagcggaggtattgcaagatagggctaatgagaaaggcgtgaatctcaatgttttgggcattgatcctaggctcgaaggcgttcatgttcgaccgaatgccagctttcagaagaagaatgccactcttggaatcgcattagctgagacggcattacagaaactcgaccccgatttcaagatcgataggtccaagctcccgaaagaatttgttgatggtttagagcaagtggactggcgcggacgctgcgagttaaaagtggaagggcccatctcgtggtacatagatggagcacacacggttgatagtctggtaacggccacaaaatggtttgctggcgagtgtggcactcaagcaggacccaaggttctcgtattcaatcagcaaggccgtgaagaagccgtggatttcctcgcgggcatggtcacgagtttaaagacgtggaatcaaggcccaaatgacacattcgaacatgttgttttctgcacgaatgtcacgcattcggagacgggctataatcgagacttcgtcaacaaccaatacgaccctgaagctatcaaggctctcactgcacagcgcagctttgcagagaaatgggcggcccttgaacccaaagccaaaatcactgtgttgccgacgattgaagacgccatcaaccatgtccgcgcccttgagggatctttggttgacgaacaaaggatacaagcattcatcactggcagtctccatcttgttggaggagcattgtctatattagaaggcactgatgtaatatgaggtccgccaggtatacttggctcgggccactttctcaatacaggtaaaattctatcgtcacgaaggacgcaacaatacttcctgcgaatgtggctgtccgcaaagatagccgagcaacagcgggatgaatatcacctagggcaacccactgtgtcgtcgtagcataggccattaaccgaagcataaaccgcactaaagctcaatcagatacaagcaccaccacctgcacgtccgtcaatcgcgcgcctacccacatgtactcaccgtacgtacttagttgtcttattgagtattaggcttaacacattgtccctcaactcgaccacttcagaacaccctacgctaggatcagcaaccgtcaactactatcgtcaaccgataccggtgcaacaatggcgtccaaagcgtcaaggaggataccacaccagtggcataatgcactaagtctatctcgccagccatcgtctgcttggcatcgagaacgcctgcgcgaggaactcgcggaataccgcgctgcgaagacgagtctggaaaagctcagcgaaactgctggcgtcttcttcacgctcagtcgagcagcttacgatggatttccaatacgtcgattgccctgctttgctacctctcatgttttggtctatggatacatgctaggcacatacacctcgcgccggctctttttccgcgtgattgttctgctttgcaaaacttcggcgccttctatggcgagagaggtggtgaatcaaaacaaggactccaaactgggagatgtcgctacgcgtcatggcattgaccagcggaagttcaagctgaacggcaggcgacttcgccgattctggccattgttcccgtaggggcagatggctaagttgccaactcaagcgcaaggacacttttttgcgactcatcaatcagtctacagttgttttgctttaactctgttatgtctatcatcgatgtcatccctacatagtctgctagggaagatactgaaggcaaatagactgtgccagactgtgcaacgcacatccatggtcgtgtgcaatcgcctgtcgttttcgtaatggccgcggcgtttgcctcagatcacacaatccgggccatcttgattgtctttgtgtaaatatggcaataatgtggctcatgagtggtgtgcttttttgttatcatatatttcaagctcgcgtggcattattttacccaagatctcactatcatgaatcaccttgcctctgtcgtgaccgcctgccataacctagtatctcgttcgtgagtccgtcgacttccaacgatctcacaatgtctgttacagacaagctgcccaagattgtcggcatttatgggttccaggttctggaaagacgttcctgcttcatcagctggagaaagtgctcggacgagaagactttaagttttatgagggatcgaaggtgatcgcagatcttgttcctggcggagccaacaaatttcaacaaatgaacgagcaggataagctcagtcgtcgtgaatgtgccattgacgccattcggcaagactgtctagacaatgggagagttggagttgtttctgggcattttctgttctggtctgatggcaaggaaatgggacagccagtcatcacttcccgagatttggcaacctacacgcacattctatatcatgacattcccgcacatgtcattgcgcagaattggctgaaagacaccaagggcaagagtagatgccgtcaattggcctctgttgatcatctacagaaatggaaggctgctgagaaggatcaactacgtggtctctgccaggataatcgcatactgttcggcgtcctttcttgccgagagacactaattgacagagtttcgacgctcatacgggatttcaagtatcataacgaacactacattctacgtcgcgtggagcgtcaagtcgatgaggcgcgtgctgctaacggccccttggagactatgttggtaattgacggcgacaagaccctcgccagtgacgacactggtgagatgttctgcagaaagggaactcaacaagtaccatcccgcctgaagagtctattcgaaagtccgctcggatactcatatgcagcatttcgccaggtagcattgctgtacgaggagattactgagagccataactttcgcaagctctgctgcacggtagcagattcggttaaactacacccgaagtctcagttattattacggcgcgttaagagagatgatcatgttggcgcgattattgtgacctgtggcatacgccatatctggacagatgtacttacaaaggaaggcctatcaaacgtgccggcgattggcggtgggcgtatcgaggatggattcgtaaaggagagcatcgtctcgtgcctaagaaatgatcatcgcctccacgtcgtggcaattggcgatagtccgctggacctaccaatgctgaaggcagctaactaggccgtcgttgtggtcggtccgaagaacgcgaggagcaagtcaatggacaaagtcttacttaaagcaatagtcgacgacggcttacaggcgcatcaggcacttctaccaagcaatgtccctcccggactagacacctctaagcttccgataattcagatcaacgatgccaatttctttagctctatcctcccccggcgaaatgagggaagatctcagattcttcatgcgacagatcaaaacgtctctaagctactaatgacgccaatgcgcaacgcgaacattgaaggtccaaccctgcgaaaggcgcatcgtcgcgttggatggttccttggcaagcgaaatgctggtaaacctgatcggcttggaagagtatcagatcgcccatgttcaaggtcaccagacacatggttttcgactccaatatgaggaccgcacctcaattgtcgcgctgatgcgtggcggagagcctatggctttgggtgtgagtgacgctttgccaagcgctatgttcatacacgtgaaagatcccgaagacgtattgcttcagcatctcgatagagaaagagcggtcattctagttgacgcggtggtgaataccggaaagacgataactcaattcgtccaacatatccgagaaactcatcctactcttcgtattgtagttcttgccggcgtcgtccaatcgcagtgcacttcagatagcatccttgcggaagaactagcgtgtgatcacaacattgctctcgttgccctagtctgtcagataataagttcaatggtagcggtgttacggatactggtaatcggcttttcaacacaacccaccttctgtagcgacgcgaaactattacaacaaggattgagcagctctagcgtgtcgcatcaggagtggtgtcagacggcgggcgcgacacacaacacagattaactgaatggcgttgatagtctatttttaatctcagaaatacaatcccattcctaactcacctagtgctcaccatgttcgctttgtgacggctttggctaagtcgcgaaatcgcgaacccgattgaggattagcgataccggcatgaaaagacgcgtttcgacccaaaccggaaaggcttagacattggatccctacatgtagtaaag

SEQ ID NO: 10854 - DNA, 1509 bp, Muscodor strobelii
  misc_feature: SGI cDNA ID NO. 563464
  misc_feature: Reduced expression when VOC is produced
  misc_feature: Encodes the peptide sequence at SEQ ID NO 10855
atggcgaccgaagcatcccgcagctacaatgatgcgattgacgcactcaactccctccagactcccttcgcgatactcgaagcgcggaaaaaagccggtatccgacctgatgcgacattcattgcggagatgcgcatttacttgcagcgcatcggctacacaccctcagatctgacgcgactcaacatcctacacgtagcgggtaccaagggaaagggaagcacgtgcgcatttgccgcgtcaatactctcgcaatatcaaaaatcacacgggaacccacagaagatcggtctcttcaccagcccgcatttaattgccgttcgagagcggatacgtctcaatggcgcgccaatcagcgaagctcttttcgccaagtacttcttcgaagtttgggaccggctcggggctgctgaagagaaggaaggcccgttcacagttgacgagcgcattggtgtaccttcgccgccacggccaatctactttcgttatcttacattgatgagctatcacgtgttcttacaagagggcgttgacgctgcagtttatgagacgggtatcggaggtgaatttgacgcgacgaatattgcggaaaagccactggcaaccggtatcagcaccctcgccattgaccatgtctttgcgcttggtgacacggtcgagaaaattgcctggcataaagcggggattatgaagcccgaaagtacggcgttcaccattgaacaattgcctggcgcagcggaggtattgcaagatagggctaatgagaaaggcgtgaatctcaatgttttgggcattgatcctaggctcgaaggcgttcatgttcgaccgaatgccagctttcagaagaagaatgccactcttggaatcgcattagctgagacggcattacagaaactcgaccccgatttcaagatcgataggtccaagctcccgaaagaatttgttgatggtttagagcaagtggactggcgcggacgctgcgagttaaaagtggaagggcccatctcgtggtacatagatggagcacacacggttgatagtctggtaacggccacaaaatggtttgctggcgagtgtggcactcaagcaggacccaaggttctcgtattcaatcagcaaggccgtgaagaagccgtggatttcctcgcgggcatggtcacgagtttaaagacgtggaatcaaggcccaaatgacacattcgaacatgttgttttctgcacgaatgtcacgcattcggagacgggctataatcgagacttcgtcaacaaccaatacgaccctgaagctatcaaggctctcactgcacagcgcagctttgcagagaaatgggcggcccttgaacccaaagccaaaatcactgtgttgccgacgattgaagacgccatcaaccatgtccgcgcccttgagggatctttggttgacgaacaaaggatacaagcattcatcactggcagtctccatcttgttggaggagcattgtctatattagaaggcactgatgtaatatga

SEQ ID NO: 10855 - protein, 502 aa, Muscodor strobelii
  misc_feature: SGI Peptide ID NO. 563464
  misc_feature (1)..(502): NCBI GI: 67476459 Blast Desc: FOLE_NEUCR RecName: Full=Folylpolyglutamate synthase; AltName: Full=Folylpoly-gamma-glutamate synthetase; Short=FPGS; AltName: Full=Tetrahydrofolylpolyglutamate synthase; synthase
  misc_feature (1)..(502): NCBI GI: 2226061 Blast Desc: folylpolyglutamate synthetase [Neurospora crassa]
  misc_feature (1)..(502): NCBI GI: 116182668 Blast Desc: CHGG_01962 [Chaetomium globosum CBS 148.51] gi|88186259|gb|EAQ93727.1| CHGG_01962 [Chaetomium globosum CBS 148.51]
  misc_feature (5)..(502): NCBI GI: 256734751 Blast Desc: [Nectria haematococca mpVI 77-13-4]
  misc_feature (11)..(502): NCBI GI: 171694836 Blast Desc: protein product [Podospora anserina] gi|170947660|emb|CAP59822.1| protein product [Podospora anserina]
  misc_feature (5)..(502): NCBI GI: 46107602 Blast Desc: FG00684.1 [Gibberella zeae PH-1]
  misc_feature (1)..(450): NCBI GI: 164428669 Blast Desc: NCU00892 [Neurospora crassa OR74A] gi|157072236|gb|EAA35572.2| conserved [Neurospora crassa OR74A]
  misc_feature (1)..(502): NCBI GI: 261358710 Blast Desc: folylpolyglutamate synthase [Verticillium albo-atrum VaMs.102]
  misc_feature (7)..(502): NCBI GI: 154297120 Blast Desc: BC1G_12219 [Botryotinia fuckeliana B05.10] gi|150843048|gb|EDN18241.1| BC1G_12219 [Botryotinia fuckeliana B05.10]
  misc_feature (6)..(498): NCBI GI: 145614004 Blast Desc: MGG_11267 [Magnaporthe grisea 70-15] gi|145020998|gb|EDK05127.1| MGG_11267 [Magnaporthe grisea 70-15]
  misc_feature (1)..(502): SWISSPROT Homolog: EC 6.3.2.17 Tetrahydrofolate synthase
  misc_feature: Useful for introducing or modulating the production of volatile compounds
MATEASRSYNDAIDALNSLQTPFAILEARKKAGIRPDATFIAEMRIYLQRIGYTPSDLTRLNILHVAGTKGKGSTCAFAASILSQYQKSHGNPQKIGLFTSPHLIAVRERIRLNGAPISEALFAKYFFEVWDRLGAAEEKEGPFTVDERIGVPSPPRPIYFRYLTLMSYHVFLQEGVDAAVYETGIGGEFDATNIAEKPLATGISTLAIDHVFALGDTVEKIAWHKAGIMKPESTAFTIEQLPGAAEVLQDRANEKGVNLNVLGIDPRLEGVHVRPNASFQKKNATLGIALAETALQKLDPDFKIDRSKLPKEFVDGLEQVDWRGRCELKVEGPISWYIDGAHTVDSLVTATKWFAGECGTQAGPKVLVFNQQGREEAVDFLAGMVTSLKTWNQGPNDTFEHVVFCTNVTHSETGYNRDFVNNQYDPEAIKALTAQRSFAEKWAALEPKAKITVLPTIEDAINHVRALEGSLVDEQRIQAFITGSLHLVGGALSILEGTDVI

SEQ ID NO: 10856 - DNA, 5277 bp, Muscodor strobelii; identical to SEQ ID NO: 10853
  misc_feature: SGI EST ID NO. CUFF.25726.0
  misc_feature: Variant of the nucleotide sequence at SEQ ID NO 10854

SEQ ID NO: 10857 - DNA, 684 bp, Muscodor strobelii
  misc_feature: SGI cDNA ID NO. 563465
  misc_feature: Encodes the peptide sequence at SEQ ID NO 10858
atggtattgaggagcctcatattccgtccaccattgagatcatatctcaagacgccaagcttcagatccaagacaactccagctgaaaaagcgagccgtgaatcggaatccgcagctccgaaatatgcttatggccaaagaatttgcgtctaccatgctggcaccggtagaacgacgtttctggcatgcctgaagctctcaacaatcttcatttttgcattcttcggattcgtagtcacgccagcatattacgaaaaggaaggcttatccgtgaccgttgcgcgcacggctttctgtgccgtggtgcctttggcattcgtagcctggacaacgtcgcctttcgtgacgttcatccatatgcgtctcccaccatatgcgcgagcatcggaagaattattgcgccggtatatcaagactcttccgccacaaacagaacttgagattatgactatgagcatcatcgcgaaaccacgtatgagcgcagttcagttaggcgacttgagtctcgccagcaagaggataggcaacgtcaatatggtgcgagatacaaaggttgagaatacaaggaggaaatggtatatgtacccggctgttggtaacttctacactcaggacttgagcgggttatcaaagcttccttggatttggccatccattcgaagtcgcatcatcgctcaaagataa

SEQ ID NO: 10858 - protein, 227 aa, Muscodor strobelii
  misc_feature: SGI Peptide ID NO. 563465
  misc_feature (12)..(223): NCBI GI: 46134937 Blast Desc: FG09317.1 [Gibberella zeae PH-1]
  misc_feature (36)..(223): NCBI GI: 154297864 Blast Desc: BC1G_11906 [Botryotinia fuckeliana B05.10] gi|150858347|gb|EDN33539.1| BC1G_11906 [Botryotinia fuckeliana B05.10]
  misc_feature (38)..(223): NCBI GI: 156057645 Blast Desc: SS1G_04554 [Sclerotinia sclerotiorum 1980] gi|154702339|gb|EDO02078.1| SS1G_04554 [Sclerotinia sclerotiorum 1980]
  misc_feature (50)..(223): NCBI GI: 171687275 Blast Desc: protein product [Podospora anserina] gi|170943599|emb|CAP69251.1| protein product [Podospora anserina]
  misc_feature (14)..(223): NCBI GI: 119500872 Blast Desc: NFIA_107880 [Neosartorya fischeri NRRL 181] gi|119415358|gb|EAW25296.1| conserved [Neosartorya fischeri NRRL 181]
  misc_feature (39)..(185): NCBI GI: 38567129 Blast Desc: [Neurospora crassa]
  misc_feature (46)..(223): NCBI GI: 146323757 Blast Desc: conserved [Aspergillus fumigatus Af293] gi|129557551|gb|EAL89959.2| conserved [Aspergillus fumigatus Af293]
  misc_feature (46)..(223): NCBI GI: 159125090 Blast Desc: conserved [Aspergillus fumigatus A1163]
  misc_feature (46)..(167): NCBI GI: 121707068 Blast Desc: conserved [Aspergillus clavatus NRRL 1] gi|119399870|gb|EAW10296.1| conserved [Aspergillus clavatus NRRL 1]
  misc_feature (26)..(227): NCBI GI: 212543419 Blast Desc: conserved [Penicillium marneffei ATCC 18224] gi|210066771|gb|EEA20864.1| conserved [Penicillium marneffei ATCC 18224]
MVLRSLIFRPPLRSYLKTPSFRSKTTPAEKASRESESAAPKYAYGQRICVYHAGTGRTTFLACLKLSTIFIFAFFGFVVTPAYYEKEGLSVTVARTAFCAVVPLAFVAWTTSPFVTFIHMRLPPYARASEELLRRYIKTLPPQTELEIMTMSIIAKPRMSAVQLGDLSLASKRIGNVNMVRDTKVENTRRKWYMYPAVGNFYTQDLSGLSKLPWIWPSIRSRIIAQR

SEQ ID NO: 10859 - DNA, 1229 bp, Muscodor strobelii
  misc_feature: SGI EST ID NO. CUFF.25729.0
  misc_feature: Variant of the nucleotide sequence at SEQ ID NO 10857
tcaaaatccaagtcatttacaatatatagcaggcataactgggatcagggtcagaagacgttgaattgctggatgaatacatccgttctcatgaaatggtagcgacgacatccagagcatagagtagtggcacctggctgcagctgagggaataagatctttacgcgtgggtcacgtaccaacggattgactgatcgcacccccttcaccatcgaaatctttatctgggattaatctcatgtgttggaatgctgtgatatcacaatccgcaacatgctttttagagctataacgcgggctccaatgctgccggcggaaaagcggaccatggtattgaggagcctcatattccgtccaccattgagatcatatctcaagacgccaagcttcagatccaagacaactccagctgaaaaagcgagccgtgaatcggaatccgcagctccgaaatatgcttatggccaaagaatttgcgtctaccatgctggcaccggtagaacgacgtttctggcatgcctgaagctctcaacaatcttcatttttgcattcttcggattcgtagtcacgccagcatattacgaaaaggaaggcttatccgtgaccgttgcgcgcacggctttctgtgccgtggtgcctttggcattcgtagcctggacaacgtcgcctttcgtgacgttcatccatatgcgtctcccaccatatgcgcgagcatcggaagaattattgcgccggtatatcaagactcttccgccacaaacagaacttgagattatgactatgagcatcatcgcgaaaccacgtatgagcgcagttcagttaggcgacttgagtctcgccagcaagaggataggcaacgtcaatatggtgcgagatacaaaggttgagaatacaaggaggaaatggtatatgtacccggctgttggtaacttctacactcaggacttgagcgggttatcaaagcttccttggatttggccatccattcgaagtcgcatcatcgctcaaagataacaataattgcttgatttggcgatagctgtcgtgtatactatattgcaaagtgatgggcaaatatgtactgccgttcattccaaaggcgaagagcatcattggcgcggacacaagataatgaagaggggtcttgctgtaacatgaagcaacagttttgtaagattatgattagactacctaccaaaactctatcaaaatcatcatcaaggcaaatatta

SEQ ID NO: 10860 - DNA, 1455 bp, Muscodor strobelii
  misc_feature: SGI cDNA ID NO. 563466
  misc_feature: Reduced expression when VOC is produced
  misc_feature: Encodes the peptide sequence at SEQ ID NO 10861
atggatcgggaagctgaagtggccacgacccacgacaccaccgccgggtcttcgccgggagacgaagccccgaagaagaggatccgtaagtcacggagccgtggtctgagaaccaagacgggttgctactcaccggagacagtagcatcaagcacagaacttctaactgccgatctagcatcaacgcgatggttggaccttctcgctacagatgcggcggaagccgatggaggtttctcgcttgccctgagtccatctcgaaccacatccaatgatggctcaacaggaatgggcgaacatgatcgactccagatgccgctaccgaaatctgtacccacagcgccagtgcctgagagatattcctggcagttagatcacgatctgaacttgactagtcatgaggcggtgctcttccgtatttttgcggaaagagcagcattatggctgcggaatgtcgggttgatgaaagcaattcttgctcttgctgcgagacacaacgctatggtgcaagctagcttaggtcatctcggagccgatacaagtgatgcaatacaatactattatgagacgctccattacgttcagacagctttgaagtaccagagctacgctcactctgaagaactccttggcacggccattgtcatttcgacctatgagatgttagattcgtcggatagtaactggcaacgtcatttaaaaggcgtattctggattcagcggtctcaaaacgtcaacggcgcttcaggagggttacggcaagctgtgtggtgggcgtggctgagacaggactattgggccgctttccgagaacgtcggaggtgcttcagcttctggcggcctgtcaaagactacccagagctatcccaagacgagctagccgatcgttcaatctatctcctgtcgcaagtaatcaactattgcgcaaatcccgatgcatcatcctcggaccccaatatggttgctcgccgggctgacgccggcgagatactcatggacatgcttgaccgatggaagtcgttcttaggggacaaattcaaccccttgcccgctgccccgagaggttcaactgtattcgaaccaatgtggatacatcctccgcaatatggcgtcgctatccaagtgtatcattttgctcgaatcttagtgactctccatcgaccagctattacgggccttgaaggatacatgaagtcgcaaagggtcttatccgaggccgtggcagcgatatgtggcatcgccatggaattgaaggacgaagggtgccagatcctctcagctcaatgtttatttggagctggactttgtgcacaggacgaagtcaaaagatgcactattgtatctctgatagatgcatgcgaggcgagaaccagttggccaatggcccctctccgagcagatctgcaggcagaatgggccaaaaacggaggacgtgaaggttatattgccatgtag

SEQ ID NO: 10861 - protein, 484 aa, Muscodor strobelii
  misc_feature: SGI Peptide ID NO. 563466
  misc_feature (44)..(484): NCBI GI: 145605447 Blast Desc: MGG_09273 [Magnaporthe grisea 70-15] gi|145013273|gb|EDJ97914.1| MGG_09273 [Magnaporthe grisea 70-15]
  misc_feature (44)..(474): NCBI GI: 67523895 Blast Desc: AN2403.2 [Aspergillus nidulans FGSC A4] gi|40745358|gb|EAA64514.1| AN2403.2 [Aspergillus nidulans FGSC A4]
  misc_feature (44)..(483): NCBI GI: 259487807 Blast Desc: TPA: Zn(II)2Cys6 transcription factor (Eurofung) [Aspergillus nidulans FGSC A4]
  misc_feature (56)..(474): NCBI GI: 46127331 Blast Desc: FG08043.1 [Gibberella zeae PH-1]
  misc_feature (56)..(475): NCBI GI: 255945401 Blast Desc: Pc20g09740 [Penicillium chrysogenum Wisconsin 54-1255] gi|211588203|emb|CAP86303.1| Pc20g09740 [Penicillium chrysogenum Wisconsin 54-1255]
  misc_feature (23)..(435): NCBI GI: 238504078 Blast Desc: AFLA_051450 [Aspergillus flavus NRRL3357] gi|220690742|gb|EED47091.1| AFLA_051450 [Aspergillus flavus NRRL3357]
  misc_feature (43)..(431): NCBI GI: 67522861 Blast Desc: AN1887.2 [Aspergillus nidulans FGSC A4] gi|40745896|gb|EAA65052.1| AN1887.2 [Aspergillus nidulans FGSC A4]
  misc_feature (221)..(477): NCBI GI: 145604749 Blast Desc: MGG_13894 [Magnaporthe grisea 70-15] gi|145012690|gb|EDJ97344.1| MGG_13894 [Magnaporthe grisea 70-15]
  misc_feature (4)..(410): NCBI GI: 145241584 Blast Desc: An09g01200 [Aspergillus niger] gi|134077977|emb|CAK49042.1| protein product [Aspergillus niger]
  misc_feature (61)..(431): NCBI GI: 256723853 Blast Desc: NECHADRAFT_37111 [Nectria haematococca mpVI 77-13-4]
  misc_feature: Useful for introducing or modulating the production of volatile compounds
MDREAEVATTHDTTAGSSPGDEAPKKRIRKSRSRGLRTKTGCYSPETVASSTELLTADLASTRWLDLLATDAAEADGGFSLALSPSRTTSNDGSTGMGEHDRLQMPLPKSVPTAPVPERYSWQLDHDLNLTSHEAVLFRIFAERAALWLRNVGLMKAILALAARHNAMVQASLGHLGADTSDAIQYYYETLHYVQTALKYQSYAHSEELLGTAIVISTYEMLDSSDSNWQRHLKGVFWIQRSQNVNGASGGLRQAVWWAWLRQDYWAAFRERRRCFSFWRPVKDYPELSQDELADRSIYLLSQVINYCANPDASSSDPNMVARRADAGEILMDMLDRWKSFLGDKFNPLPAAPRGSTVFEPMWIHPPQYGVAIQVYHFARILVTLHRPAITGLEGYMKSQRVLSEAVAAICGIAMELKDEGCQILSAQCLFGAGLCAQDEVKRCTIVSLIDACEARTSWPMAPLRADLQAEWAKNGGREGYIAM

SEQ ID NO: 10862 - DNA, 2244 bp, Muscodor strobelii
  misc_feature: SGI EST ID NO. CUFF.25871.2
  misc_feature: Variant of the nucleotide sequence at SEQ ID NO 10860
tgcgtatcgtgaacttgcacaaatatctacagtagctgctacagaggctgctgtatccctgaaacgcataattcggtcgattaggagacgggtgtatggaaaaactgtcagcgatcggtgaccgcgagtcgcggccagcggggaactaggccaactaggtcacggctctgtcgtccagatcctcaatgctttctggagatgttttgataagctgaacctcgagtcgcgagtctccttcttgcttttactttaacttctacatatcagtgcggcatgcttggaggtggccttgcatccccgagcaggctatggatcgggaagctgaagtggccacgacccacgacaccaccgccgggtcttcgccgggagacgaagccccgaagaagaggatccgtaagtcacggagccgtggtctgagaaccaagacgggttgtttgacgtgtcggaagcgacacaaaaaatgtgacgagaaattgccgatatgcggtccatgctcgatatcaagtcgagagtgcatttatgctgatgggccaaaaacaaactctataccacatgccaagccaggttcaagtaatttgtcgatgattaaggagcaagcaaatgccgagccaatccttaacctccccagccgaccatccagtcacgtcacgcctcacatcacacctagccctcactctctcgtcgggtccgtagacgacgggctgtcgcaagcaagctcagttcacgcgcaatacccaatagaggtgccatatcaatatagctactcaccggagacagtagcatcaagcacagaacttctaactgccgatctagcatcaacgcgatggttggaccttctcgctacagatgcggcggaagccgatggaggtttctcgcttgccctgagtccatctcgaaccacatccaatgatggctcaacaggaatgggcgaacatgatcgactccagatgccgctaccgaaatctgtacccacagcgccagtgcctgagagatattcctggcagttagatcacgatctgaacttgactagtcatgaggcggtgctcttccgtatttttgcggaaagagcagcattatggttagacattttttgatccttcgaggcatttctcaacttatgcgacccggctagcactgcggaatgtcgggttgatgaaagcaattcttgctcttgctgcgagacacaacgctatggtgcaagctagcttaggtcatctcggagccgatacaagtgatgcaatacaatactattatgagacgctccattacgttcagacagctttgaagtaccagagctacgctcactctgaagaactccttggcacggccattgtcatttcgacctatgagatgttagattcgtcggatagtaactggcaacgtcatttaaaaggcgtattctggattcagcggtctcaaaacgtcaacggcgcttcaggagggttacggcaagctgtgtggtgggcgtggctgagacaggactattgggccgctttccgagaacgtcggaggtgcttcagcttctggcggcctgtcaaagactacccagagctatcccaagacgagctagccgatcgttcaatctatctcctgtcgcaagtaatcaactattgcgcaaatcccgatgcatcatcctcggaccccaatatggttgctcgccgggctgacgccggcgagatactcatggacatgcttgaccgatggaagtcgttcttaggggacaaattcaaccccttgcccgctgccccgagaggttcaactgtattcgaaccaatgtggatacatcctccgcaatatggcgtcgctatccaagtgtatcattttgctcgaatcttagtgactctccatcgaccagctattacgggccttgaaggatacatgaagtcgcaaagggtcttatccgaggccgtggcagcgatatgtggcatcgccatggaattgaaggacgaagggtgccagatcctctcagctcaatgtttatttggagctggactttgtgcacaggacgaagtcaaaagatgcactattgtatctctgatagatgcatgcgaggcgagaaccagttggccaatggcccctctccgagcagatctgcaggcagaatgggccaaaaacggaggacgtgaaggttatattgccatgtagctctcaaaggagagtttgtatcaacgaaatggacaaatttccgtatttgactcgcgaagaaacagaataggcgcatgaaaataaaaggaatgaggagaa

SEQ ID NO: 10863 - DNA, 861 bp, Muscodor strobelii
  misc_feature: SGI cDNA ID NO. 563467
  misc_feature: Encodes the peptide sequence at SEQ ID NO 10864
atggaatggaggaaggacaataagacttatcaaatcctctcggcggctgaaaaggggggttatggagtagttgcacctattgcatacaatattgagtgtatacttgcttttatcaaagcagcagaagcaaaaaggtcgcccctgatcattcaggttttcccatgggcgatcacattcagcaacgggctattgatccacgccgcggcccatgcggcaaagaatgcaagcgtgccggtgtccatacatctagaccatgcacaggacgaagaattgataaagaaagccgcggatacattgccttttgacagtatcatggtcgatatgagtcactatgagatggatgagaacctggcaaagacgaaagccttggtagcctactgccatgagcgtcatatcgctaccgaagccgagccgggccgcattgaaggtggagaagacggaattgccgatacggcggacttggaaggtgctttgacgactagcgaccaggtggaggactttgttgccacgggtattgatttcttggcgcctgcatttggcaatgtacacggcgagtatggtgcccggggtccggtgttggaatacgaccgtctggatatgattcggcagaagatcaacggtcgcgtaggcatcgttctgcacggtaccaatgattttcctgaaaacgtcatgatgaagtgcatcaagggtggtgtgtcgaaagtcaatgttaataagctcgtcttggataactaccttgtccacctcaagcagaaggctccaaccgcgtctctgacatcgttaatggaagatggcgtgaaggagatacaaaagcttgtggagtggcagatggatgtttgtggatcgacaggcaaagcctaa

SEQ ID NO: 10864 - protein, 286 aa, Muscodor strobelii
  misc_feature: SGI Peptide ID NO. 563467
  misc_feature (8)..(286): Pfam Id: PF01116 Pfam Desc: Fructose-bisphosphate aldolase class-II
  misc_feature (8)..(238): Pfam Id: PF01116 Pfam Desc: Fructose-bisphosphate aldolase class-II
  misc_feature (5)..(286): NCBI GI: 46127333 Blast Desc: FG08044.1 [Gibberella zeae PH-1]
  misc_feature (4)..(285): NCBI GI: 145604751 Blast Desc: MGG_13895 [Magnaporthe grisea 70-15] gi|145012691|gb|EDJ97345.1| MGG_13895 [Magnaporthe grisea 70-15]
  misc_feature (2)..(285): NCBI GI: 256723948 Blast Desc: NECHADRAFT_37148 [Nectria haematococca mpVI 77-13-4]
  misc_feature (1)..(286): NCBI GI: 255945403 Blast Desc: Pc20g09750 [Penicillium chrysogenum Wisconsin 54-1255] gi|211588204|emb|CAP86304.1| Pc20g09750 [Penicillium chrysogenum Wisconsin 54-1255]
  misc_feature (7)..(286): NCBI GI: 121713432 Blast Desc: fructose-bisphosphate aldolase, [Aspergillus clavatus NRRL 1] gi|119402480|gb|EAW12901.1| fructose-bisphosphate aldolase, [Aspergillus clavatus NRRL 1]
  misc_feature (1)..(285): NCBI GI: 67523757 Blast Desc: AN2334.2 [Aspergillus nidulans FGSC A4] gi|40745289|gb|EAA64445.1| AN2334.2 [Aspergillus nidulans FGSC A4] gi|259487730|tpe|CBF86628.1| TPA: similar to bisphosphate A4]
  misc_feature (7)..(286): NCBI GI: 119479265 Blast Desc: fructose-bisphosphate aldolase, [Neosartorya fischeri NRRL 181] gi|119407815|gb|EAW17764.1| fructose-bisphosphate aldolase, [Neosartorya fischeri NRRL 181]
  misc_feature (5)..(286): NCBI GI: 212536592 Blast Desc: fructose-bisphosphate aldolase, [Penicillium marneffei ATCC 18224] gi|212536594|ref|XP_002148453.1| fructose-bisphosphate aldolase, [Penicillium marneffei ATCC ATCC
  misc_feature (7)..(286): NCBI GI: 70997754 Blast Desc: fructose-bisphosphate aldolase [Aspergillus fumigatus Af293] gi|66851248|gb|EAL91574.1| fructose-bisphosphate aldolase, [Aspergillus fumigatus Af293] gi|159126653|gb|EDP51769.1| A1163]
  misc_feature (5)..(286): NCBI GI: 242796199 Blast Desc: fructose-bisphosphate aldolase, [Talaromyces stipitatus ATCC 10500] gi|218719337|gb|EED18757.1| fructose-bisphosphate aldolase, [Talaromyces stipitatus ATCC
  misc_feature (11)..(286): SWISSPROT Homolog: EC 4.1.2.13 Fructose-bisphosphate aldolase
MEWRKDNKTYQILSAAEKGGYGVVAPIAYNIECILAFIKAAEAKRSPLIIQVFPWAITFSNGLLIHAAAHAAKNASVPVSIHLDHAQDEELIKKAADTLPFDSIMVDMSHYEMDENLAKTKALVAYCHERHIATEAEPGRIEGGEDGIADTADLEGALTTSDQVEDFVATGIDFLAPAFGNVHGEYGARGPVLEYDRLDMIRQKINGRVGIVLHGTNDFPENVMMKCIKGGVSKVNVNKLVLDNYLVHLKQKAPTASLTSLMEDGVKEIQKLVEWQMDVCGSTGKA

SEQ ID NO: 10865 - DNA, 1869 bp, Muscodor strobelii
  misc_feature: SGI cDNA ID NO. 563468
  misc_feature: Encodes the peptide sequence at SEQ ID NO 10866
atgagtcaacgtagcctgtacgacttcataattgtgggaggagggacagctggtctggtcattgcggcacggctttcagagaatccagcccacaatatcctagttctggaagccgggtctgaccacaccgatgaccctagagtgaagacgccggctctcttcgaaacaacaaaggggactgaaatggactgggcattcgagtccgtgcctcaagatgcgctcaatgggcgcgtgattgctatgaatcagggcaaatgtctgggtggttcaagctctatcaatgctttcgtcttcgtccctcctgcgaagtgtcaggttgatgcctggaaggccctaggcaacgagggctgggactgggatcacctgcaaccctatttttcgagagcctattctcacccacctccagccactgaggccatggcgacgagcctcggcattgacaaatggattaaagtcaacaatgctgcaaaaggtcctgttcagacctctttccctggggaaccgagtcatcctgttcgccaactctgggcagagacttttgcggtacacgatcgtctaatgctcaacgatccattcattgaggcatcggtaggcgcattcagttgccttgccagtatccatccaggctcaaaggaacgcatctcctctgcgtcagcctactataacccggcaaggcaaagaaaaaatttatgcgttatgccacgttgcgaggtacagaagattatcttcgaaaacaccacggagctagccgacgttcccaagcaacagagaccactgtcggtaagggctcgaggtgtacagtatagacatggagacgaaacgctatcagccttcgcgatgagagaaattatactagccgccggcgctgtgcaatctcccaaaatcctcgagctttcagggattggcaacgcagacatattgcagaggctagacatcgagctcgtcctggatatgccgggcgtcggtgaaaatctccaagaccatatggttgcaagcattggtttcgaaactgtgaaagaggtccagaccctagacgcactaatgagacaagagcctgaagcggtagctcaggcgatggaagactatggtgcaagaaaagcaggcccactagctcatgtcggagtcatgtcatatgcctatctgcctattccgtctacgggtggcgttgacgcagttcaaaggcttctcgcaaaaagtcagcatgcgcccagaaaaggacagagcagagccggtgatctcgcttactacgatattgctaaagaggctcttttggatccgagcaagccatccgcaagctatctggccgttgcagcacaaagcatcccgcctgttgatgctactacgcgttcactgcaaggccccgttgctgggaatttcctcacaattggtgccatgctatcacacccactctcacgaggcacggtccatattcaatcacgcgacccatcagcgccccccagaattgatcctcgttttctttctgatccgattgatatggaggttctagcacaccacatgctacacatagagactatcgcaaattcctcccctctgaatagtatcctgaagcagcccctttctcgccgggacccagcgtctcatctgacgtatatcgacgaagccaaaagatatcttcgtgcaaacgcaaactcaatgtggcatatggcaggatcttgcgcgatgttacccaaggacaagggtggcgtcgttgacgttgacttgaaagtgcacggggtggtcaacctacgggttgttgattccagcgctatccctttgattagcacagcaaaccttcaggcgactgtatatgcgtttgcagagcgcgctgcaactctcatcaaagagacctgggaagaaaaacattattga

SEQ ID NO: 10866 - protein, 622 aa, Muscodor strobelii
  misc_feature: SGI Peptide ID NO. 563468
  misc_feature (462)..(609): Pfam Id: PF05199 Pfam Desc: GMC oxidoreductase
  misc_feature (7)..(343): Pfam Id: PF00732 Pfam Desc: GMC oxidoreductase
  misc_feature (8)..(41): Pfam Id: PF01266 Pfam Desc: FAD dependent oxidoreductase
  misc_feature (8)..(44): Pfam Id: PF00890 Pfam Desc: FAD binding domain
  misc_feature (7)..(129): Pfam Id: PF00732 Pfam Desc: GMC oxidoreductase
  misc_feature (212)..(343): Pfam Id: PF00732 Pfam Desc: GMC oxidoreductase
  misc_feature (8)..(41): Pfam Id: PF05834 Pfam Desc: Lycopene cyclase protein
  misc_feature (7)..(621): NCBI GI: 238508294 Blast Desc: glucose-methanol-choline (gmc) oxidoreductase, [Aspergillus flavus NRRL3357] gi|220688863|gb|EED45215.1| glucose-methanol-choline (gmc) oxidoreductase, [Aspergillus
  misc_feature (5)..(618): NCBI GI: 145248171 Blast Desc: An13g01960 [Aspergillus niger] gi|134081083|emb|CAK41595.1| protein product [Aspergillus niger]
  misc_feature (7)..(620): NCBI GI: 169784540 Blast Desc: [Aspergillus oryzae RIB40] gi|83775478|dbj|BAE65598.1| protein product [Aspergillus oryzae]
  misc_feature (8)..(614): NCBI GI: 154288082 Blast Desc: [Ajellomyces capsulatus NAm1] gi|150408477|gb|EDN04018.1| [Ajellomyces capsulatus NAm1]
  misc_feature (8)..(614): NCBI GI: 225560142 Blast Desc: glucose-methanol-choline oxidoreductase [Ajellomyces capsulatus G186AR]
  misc_feature (8)..(614): NCBI GI: 256726130 Blast Desc: NECHADRAFT_94455 [Nectria haematococca mpVI 77-13-4]
  misc_feature (8)..(614): NCBI GI: 145247064 Blast Desc: An12g07280 [Aspergillus niger] gi|134080508|emb|CAK46356.1| protein product [Aspergillus niger]
  misc_feature (5)..(617): NCBI GI: 171678515 Blast Desc: protein product [Podospora anserina] gi|170937327|emb|CAP61985.1| protein product [Podospora anserina]
  misc_feature (1)..(616): NCBI GI: 261356447 Blast Desc: choline dehydrogenase [Verticillium albo-atrum VaMs.102]
  misc_feature (6)..(615): NCBI GI: 145240585 Blast Desc: An08g08250 [Aspergillus niger] gi|134077462|emb|CAK40027.1| protein product [Aspergillus niger]
  misc_feature (5)..(614): SWISSPROT Homolog: EC 1.1.99.32 L-sorbose 1-dehydrogenase
MSQRSLYDFIIVGGGTAGLVIAARLSENPAHNILVLEAGSDHTDDPRVKTPALFETTKGTEMDWAFESVPQDALNGRVIAMNQGKCLGGSSSINAFVFVPPAKCQVDAWKALGNEGWDWDHLQPYFSRAYSHPPPATEAMATSLGIDKWIKVNNAAKGPVQTSFPGEPSHPVRQLWAETFAVHDRLMLNDPFIEASVGAFSCLASIHPGSKERISSASAYYNPARQRKNLCVMPRCEVQKIIFENTTELADVPKQQRPLSVRARGVQYRHGDETLSAFAMREIILAAGAVQSPKILELSGIGNADILQRLDIELVLDMPGVGENLQDHMVASIGFETVKEVQTLDALMRQEPEAVAQAMEDYGARKAGPLAHVGVMSYAYLPIPSTGGVDAVQRLLAKSQHAPRKGQSRAGDLAYYDIAKEALLDPSKPSASYLAVAAQSIPPVDATTRSLQGPVAGNFLTIGAMLSHPLSRGTVHIQSRDPSAPPRIDPRFLSDPIDMEVLAHHMLHIETIANSSPLNSILKQPLSRRDPASHLTYIDEAKRYLRANANSMWHMAGSCAMLPKDKGGVVDVDLKVHGVVNLRVVDSSAIPLISTANLQATVYAFAERAATLIKETWEEKHY

SEQ ID NO: 10867 - DNA, 1182 bp, Muscodor strobelii
  misc_feature: SGI cDNA ID NO. 563469
  misc_feature: Encodes the peptide sequence at SEQ ID NO 10868
atgtctttccgatttacccatctcgttattctgggtcttgcgaccgtgcggtccgcaacagctgatcaaaccacgaccctcgttcccggcaccacctgggagaagtgggaaggatggggcacgtcactggcatggtgggcgaaagccttcggcaaccaagtgcaattcgccgatattttctttactctcaataacacgacgtggtggatgacatacaaccttaatccctcggggtcaaatgatggatcaagcgacaaccttgagtcctggaactgggatgctcatgcaatatacatggcaaatgttgcccagtacgccaagaatcattggggcgtgacattcacttcagttgatgcgttcaatgagccctccgcagattactgggtcggtacaacaggtacccaagaaggctgccactttgatgtctcgacccagcaatctgtcatcatatacttgcgccaggagctgaactcacgcggtctcacttcgacatccatatcggcctcagacgaagaatatgtcgacatcgcgctgacgaccttcaacacactgaacagcacagctcgcagcgacattgctcgtataaatacgcacggttatcagggtacgagtggcaaccgtgcagggttatactccgccgtgtcctcggccggcaaagctctttgggttagtgaatatggagacagcgacgcgacgggtgctcagctagccaagtgtctattcctcgacatgacaactcttcatccaacaggctgggtttactggcaggttttggatgtgtcgggatggggtctcatcgtagcggacaacgacgcagtaacgactggggccgtgtcgcagaagtactatgttctggcccagtttacacgtcacatccggccaggcatgacaattgtcaacgcaggaagtgactatgccgtcgcagcctacgattcattgaaaaagacgctggtgattgtcgctgtcaattggggatcagcgcagtacctgaacttcgacctaagcaagttttcgcagggtggcgttaatggagccttggtccaacgatgggagacacagattggtaccagtgggtcacaatatgtggtgtatagcgacacctatcttagcgggactaagttttggtcttactttgggaccaatgttatacaaactttccttgtgcagaatgtagtactgtga

SEQ ID NO: 10868 - protein, 393 aa, Muscodor strobelii
  misc_feature: SGI Peptide ID NO. 563469
  misc_feature (53)..(393): NCBI GI: 242770731 Blast Desc: conserved [Talaromyces stipitatus ATCC 10500] gi|218725235|gb|EED24652.1| conserved [Talaromyces stipitatus ATCC 10500]
  misc_feature (53)..(393): NCBI GI: 212537309 Blast Desc: conserved [Penicillium marneffei ATCC 18224] gi|210068552|gb|EEA22643.1| conserved [Penicillium marneffei ATCC 18224]
  misc_feature (64)..(393): NCBI GI: 171679844 Blast Desc: protein product [Podospora anserina] gi|170939548|emb|CAP64775.1| protein product [Podospora anserina]
  misc_feature (64)..(393): NCBI GI: 85091519 Blast Desc: NCU09702 [Neurospora crassa OR74A] gi|28920334|gb|EAA29705.1| NCU09702 [Neurospora crassa OR74A]
  misc_feature (64)..(393): NCBI GI: 189209846 Blast Desc: endo-beta-1,6-galactanase [Pyrenophora tritici-repentis Pt-1C-BFP] gi|187977348|gb|EDU43974.1| endo-beta-1,6-galactanase [Pyrenophora tritici-repentis
  misc_feature (57)..(393): NCBI GI: 34482000 Blast Desc: endo-beta-1,6-galactanase [Trichoderma viride]
  misc_feature (47)..(393): NCBI GI: 281204199 Blast Desc: secreted endo-beta-1,6-galactanase [Polysphondylium pallidum PN500]
  misc_feature (64)..(393): NCBI GI: 254400942 Blast Desc: secreted endo-beta-1,6-galactanase [Streptomyces sviceus ATCC 29083] gi|197710423|gb|EDY54457.1| secreted endo-beta-1,6-galactanase [Streptomyces sviceus ATCC 29083]
  misc_feature (64)..(393): NCBI GI: 29831748 Blast Desc: secreted endo-beta-1,6-galactanase [Streptomyces avermitilis MA-4680] gi|29608865|dbj|BAC72917.1| secreted endo-beta-1,6-galactanase [Streptomyces avermitilis MA-4680]
  misc_feature (64)..(393): NCBI GI: 260649628 Blast Desc: secreted protein [Streptomyces scabiei 87.22]
MSFRFTHLVILGLATVRSATADQTTTLVPGTTWEKWEGWGTSLAWWAKAFGNQVQFADIFFTLNNTTWWMTYNLNPSGSNDGSSDNLESWNWDAHAIYMANVAQYAKNHWGVTFTSVDAFNEPSADYWVGTTGTQEGCHFDVSTQQSVIIYLRQELNSRGLTSTSISASDEEYVDIALTTFNTLNSTARSDIARINTHGYQGTSGNRAGLYSAVSSAGKALWVSEYGDSDATGAQLAKCLFLDMTTLHPTGWVYWQVLDVSGWGLIVADNDAVTTGAVSQKYYVLAQFTRHIRPGMTIVNAGSDYAVAAYDSLKKTLVIVAVNWGSAQYLNFDLSKFSQGGVNGALVQRWETQIGTSGSQYVVYSDTYLSGTKFWSYFGTNVIQTFLVQNVVL

SEQ ID NO: 10869 - DNA, 645 bp, Muscodor strobelii
  misc_feature: SGI cDNA ID NO. 563470
  misc_feature: Encodes the peptide sequence at SEQ ID NO 10870
atgtctgctgccggatttgttcatttcatcgacgatgccaacgcagtcagagtaaaggctgagcagatcctcatctacgatgatgattctaaggtcactatgactcagaatgatattcagttcggctgtaactcattccatgacaacgccctcccttccttggttgaagttacacttggccaaaagcgtttcgagggatacgccacacgtttagtagccctcgacggcaataagtcttacagcattacgcgagacagcgtcacaaccactgttggcacacaagtcatcaaggtcactagcctgaaagccccgaacaccatcactcctgatttcgcctctcccagctctacctccggctacagtaaacaagctcaggtggaggttgagcaacaggccttgggtcgattcgacgaatccaaaaaacgaaacccagtaggtcagcctcctgtcgacatgaacaatggtgctcaagtcgacgccaaatcgactaccctgcccctcgccacatcacggcgtgacgcattgcgcgacacttgggatgacttagtgcacatcgtcatgtgcattctgtcttggattgttctaggaccaatctacctcgcggtcctgctctactaccaccttgaccgacgtattcacggatag

SEQ ID NO: 10870 - protein, 214 aa, Muscodor strobelii
  misc_feature: SGI Peptide ID NO. 563470
MSAAGFVHFIDDANAVRVKAEQILIYDDDSKVTMTQNDIQFGCNSFHDNALPSLVEVTLGQKRFEGYATRLVALDGNKSYSITRDSVTTTVGTQVIKVTSLKAPNTITPDFASPSSTSGYSKQAQVEVEQQALGRFDESKKRNPVGQPPVDMNNGAQVDAKSTTLPLATSRRDALRDTWDDLVHIVMCILSWIVLGPIYLAVLLYYHLDRRIHG

SEQ ID NO: 10871 - DNA, 436 bp, Muscodor strobelii
  misc_feature: SGI EST ID NO. CUFF.25776.0
  misc_feature: Variant of the nucleotide sequence at SEQ ID NO 10869
gccaaatcgactaccctgcccctcgccacatcacggcgtgacgcattgcgcgacacttgggatgacttagtgcacatcgtcatgtgcattctgtcttggattgttctaggaccaatctacctcgcggtcctgctctactaccaccttgaccgacgtattcacggatagacacgtcagctaatatggccatgggacttacttaaagcgtattgtcgctgaagacgtcgagagcctaagaggtcgtcgttttttcactacatacaggatggcatttccgtaccaattattattacaacgaagaatgatccatcagaagagaagagcttagaggaaatgggaggtgtaattcgcaaagggcggagaacgggaaactgggttgggaaacaagaattgtagtttatgatgccctgtcagcctctgcacgaatatatttctt

SEQ ID NO: 10872 - DNA, 852 bp, Muscodor strobelii
  misc_feature: SGI cDNA ID NO. 563471
  misc_feature: Encodes the peptide sequence at SEQ ID NO 10873
atgtctccaagcgcagaacagacaacgagcagcagttgccctgtcgctgatgtttatccaagcactctcccacaagccggccacaactggcaaatcacgttagcccagaaggtcattgccatcactggtgcaaatcagggcattggtctaggtttggctgaagtttgccttgccaactcagcagcttgtgttttctctcttgacatctcgcaacctggtgatgactttggcaagctattaaagcgctaccctggtcgtcttgagtatatcaacacagatgccacttcggaagaaagcgtaaaggccgctttagacaaggtcgttgagtcaaagggacggtttgacggcctgatcgccaacgccggcgccacaaagcatcaacctgctcttgacttcactatggagcagtttgagaagctatataagctgaatgtcaacgggtcgtggatctgcgcaactgccgctgcacgcaaattcgtcgagctgaagactaagggatctatcgtttttaccgcctctatgacatcttaccgacctaaccgtgccgccccttcggctccatatggtggcactaaggctgctatccggaatatggcccatactctcgctatggagtgggctcagtacggcatccgcgtcaactccatctcccccggcttcgtcaagacagctcttacttactatgttgagacaagccccgactgggacacaaaaatgaaatactacggtggtatgcctcgcttggcactgccgcaagaattaggtggagcttacgtttacttgttgagtgataccgctacttacacaaccggtatcgatatccctattgctggtattgttggtgcttggtag

SEQ ID NO: 10873 - protein, 283 aa, Muscodor strobelii
  misc_feature: SGI Peptide ID NO. 563471
  misc_feature (37)..(207): Pfam Id: PF00106 Pfam Desc: short chain dehydrogenase
  misc_feature (8)..(283): NCBI GI: 67523893 Blast Desc: AN2402.2 [Aspergillus nidulans FGSC A4] gi|40745357|gb|EAA64513.1| AN2402.2 [Aspergillus nidulans FGSC A4] gi|259487806|tpe|CBF86770.1| TPA: conserved [Aspergillus FGSC
  misc_feature (21)..(283): NCBI GI: 46127337 Blast Desc: FG08046.1 [Gibberella zeae PH-1]
  misc_feature (21)..(283): NCBI GI: 39973177 Blast Desc: MGG_07883 [Magnaporthe grisea 70-15] gi|145012692|gb|EDJ97346.1| MGG_07883 [Magnaporthe grisea 70-15]
  misc_feature (19)..(283): NCBI GI: 169764657 Blast Desc: [Aspergillus oryzae RIB40] gi|83764654|dbj|BAE54798.1| protein product [Aspergillus oryzae]
  misc_feature (19)..(283): NCBI GI: 238504082 Blast Desc: short chain alcohol dehydrogenase, [Aspergillus flavus NRRL3357] gi|220690744|gb|EED47093.1| short chain alcohol dehydrogenase, [Aspergillus flavus NRRL3357]
  misc_feature (1)..(283): NCBI GI: 256720774 Blast Desc: [Nectria haematococca mpVI 77-13-4]
  misc_feature (7)..(283): NCBI GI: 169768770 Blast Desc: [Aspergillus oryzae RIB40] gi|83766713|dbj|BAE56853.1| protein product [Aspergillus oryzae]
  misc_feature (7)..(283): NCBI GI: 238498104 Blast Desc: short-chain dehydrogenase, [Aspergillus flavus NRRL3357] gi|220693561|gb|EED49906.1| short-chain dehydrogenase, [Aspergillus flavus NRRL3357]
  misc_feature (1)..(283): NCBI GI: 145241586 Blast Desc: An09g01210 [Aspergillus niger] gi|134077978|emb|CAK49043.1| protein product [Aspergillus niger]
  misc_feature (18)..(283): NCBI GI: 189201091 Blast Desc: 3-oxoacyl-(acyl-carrier-protein) reductase 2 [Pyrenophora tritici-repentis Pt-1C-BFP] gi|187983981|gb|EDU49469.1| 3-oxoacyl-(acyl-carrier-protein) 2
  misc_feature (31)..(278): SWISSPROT Homolog: EC 1.1.1.138 Mannitol 2-dehydrogenase (NADP(+))
MSPSAEQTTSSSCPVADVYPSTLPQAGHNWQITLAQKVIAITGANQGIGLGLAEVCLANSAACVFSLDISQPGDDFGKLLKRYPGRLEYINTDATSEESVKAALDKVVESKGRFDGLIANAGATKHQPALDFTMEQFEKLYKLNVNGSWICATAAARKFVELKTKGSIVFTASMTSYRPNRAAPSAPYGGTKAAIRNMAHTLAMEWAQYGIRVNSISPGFVKTALTYYVETSPDWDTKMKYYGGMPRLALPQELGGAYVYLLSDTATYTTGIDIPIAGIVGAW

SEQ ID NO: 10874 - DNA, 1296 bp, Muscodor strobelii
  misc_feature: SGI cDNA ID NO. 563472
  misc_feature: Encodes the peptide sequence at SEQ ID NO 10875
atggacgtcgaggctcttgacgcgatggacactaagatccaaagagatctcatcggctcctacgtaccagattctgacgaggaacgaaaacttgttcgaaagatcgatctctacctattaccaacaatatggttgatgtatctcttatcatacgttgacagaagcaacatcggaaatgcgaaggttgctggccttcaagatgacttgcacttgacatcgaaccaatattcgatcaccctcgtggtattctttgttggttatgtcatcttcgagattccctcaaacatggtactcgcccgaactcgcccttccatattccttcccactatcatgttcctctggggtgtcgttacaatcgtcattggatggattccgagctacaaagcgctggttggggtgcgcatactagttggtatccttgaagctggttttgcgcccggtgtgctacttctcctttcatcttggtataagagaaaagagcagagcaagcgattcgctgtctacatctctgcggccattctgtcgggagctttcggtggtctcttaggcggtgcaatcacatctggattagacggagcgcatggcatcgcgggttggcgttggctcttcattgtagagggtgcagcgactgctggatggtctatcatcgcgagcttcattttgcttgatttccctgccaatacgaagcgatttagcgaggccgagcgtagattggcagtgcagcgaattctcgctgatcaggctcgaactggtaccgaagacattccgaccccaacccacatccaggctctgaagatggcattatcaaactggagggtctggctcttcgttatcggttacatggcgatcgtcggctcttctactttatcctacttttatcccacactggtgaaaggtctcggttatagctcgaaggaggcacaatacttgacaattccaatttatgcggccgcgtttgtggtaaatggattcactggctacttcatggataagaagccagagtggcgtggttgggttctcggattctggatgacggtcgctatggcggcatctattgttactactgttgtctacgatttccatgcccgttatggcctgcttgtagtcattgccagtggtctttgggcgtcaaatggcctgtcgctctcatacgcctcctccacctttggcgatatgccggacgaagttcgtgcaattgcgctagcatttgtcaatgctacgggaaatctagcacagatttatggctcttatctgtttccctccgaggatgcccccaatatcgccaaggcttcgtag

SEQ ID NO: 10875 - protein, 431 aa, Muscodor strobelii
  misc_feature: SGI Peptide ID NO. 563472
  misc_feature (43)..(416): Pfam Id: PF07690 Pfam Desc: Major Facilitator Superfamily
  misc_feature (18)..(429): NCBI GI: 46127339 Blast Desc: FG08047.1 [Gibberella zeae PH-1]
  misc_feature (11)..(426): NCBI GI: 145604753 Blast Desc: MGG_07885 [Magnaporthe grisea 70-15] gi|145012694|gb|EDJ97348.1| MGG_07885 [Magnaporthe grisea 70-15]
  misc_feature (25)..(426): NCBI GI: 256720586 Blast Desc: NECHADRAFT_49824 [Nectria haematococca mpVI 77-13-4]
  misc_feature (1)..(426): NCBI GI: 238504080 Blast Desc: vitamin H transporter, [Aspergillus flavus NRRL3357] gi|220690743|gb|EED47092.1| vitamin H transporter, [Aspergillus flavus NRRL3357]
  misc_feature (6)..(426): NCBI GI: 67903898 Blast Desc: AN8936.2 [Aspergillus nidulans FGSC A4] gi|40744914|gb|EAA64070.1| AN8936.2 [Aspergillus nidulans FGSC A4] gi|259486621|tpe|CBF84619.1| TPA: conserved [Aspergillus FGSC
  misc_feature (1)..(426): NCBI GI: 169620056 Blast Desc: SNOG_13229 [Phaeosphaeria nodorum SN15] gi|111058436|gb|EAT79556.1| SNOG_13229 [Phaeosphaeria nodorum SN15]
  misc_feature (8)..(426): NCBI GI: 145229747 Blast Desc: An01g07570 [Aspergillus niger] gi|134055292|emb|CAK96182.1| protein product [Aspergillus niger]
  misc_feature (2)..(426): NCBI GI: 189201093 Blast Desc: pantothenate transporter liz1 [Pyrenophora tritici-repentis Pt-1C-BFP] gi|187983982|gb|EDU49470.1| pantothenate transporter liz1 [Pyrenophora tritici-repentis
  misc_feature (2)..(426): NCBI GI: 67523891 Blast Desc: AN2401.2 [Aspergillus nidulans FGSC A4] gi|40745356|gb|EAA64512.1| AN2401.2 [Aspergillus nidulans FGSC A4] gi|259487805|tpe|CBF86768.1| TPA: conserved [Aspergillus FGSC
  misc_feature (2)..(426): NCBI GI: 255939139 Blast Desc: Pc15g01140 [Penicillium chrysogenum Wisconsin 54-1255] gi|211584961|emb|CAP83000.1| Pc15g01140 [Penicillium chrysogenum Wisconsin 54-1255]
MDVEALDAMDTKIQRDLIGSYVPDSDEERKLVRKIDLYLLPTIWLMYLLSYVDRSNIGNAKVAGLQDDLHLTSNQYSITLVVFFVGYVIFEIPSNMVLARTRPSIFLPTIMFLWGVVTIVIGWIPSYKALVGVRILVGILEAGFAPGVLLLLSSWYKRKEQSKRFAVYISAAILSGAFGGLLGGAITSGLDGAHGIAGWRWLFIVEGAATAGWSIIASFILLDFPANTKRFSEAERRLAVQRILADQARTGTEDIPTPTHIQALKMALSNWRVWLFVIGYMAIVGSSTLSYFYPTLVKGLGYSSKEAQYLTIPIYAAAFVVNGFTGYFMDKKPEWRGWVLGFWMTVAMAASIVTTVVYDFHARYGLLVVIASGLWASNGLSLSYASSTFGDMPDEVRAIALAFVNATGNLAQIYGSYLFPSEDAPNIAKAS

SEQ ID NO: 10876 - DNA, 1791 bp, Muscodor strobelii
  misc_feature: SGI EST ID NO. CUFF.25811.1
  misc_feature: Variant of the nucleotide sequence at SEQ ID NO 10874
ctccaaacgtggatttgtgtggagtccccagatggggtagacgctaatcacgaactaggcttgagcacttggagaacaattacaccagatgcgatttggctgtctctgtccttgccgacaatccttgtcctgttgtgcggacttgaagccggaagtcggtagctccagcagtgattatggtggtttgcagacatcactttctcgcaatggctacaaagagcagtcgggaattcgaacattcagagaccatggacgtcgaggctcttgacgcgatggacactaagatccaaagagatctcatcggctcctacgtaccagattctgacgaggaacgaaaacttgttcgaaagatcgatctctacctattaccaacaatatggttgatgtatctcttatcatacgttgacagaagcaacatcggaaatgcgaaggttgctggccttcaagatgacttgcacttgacatcgaaccaatattcgatcaccctcgtggtattctttgttggttatgtcatcttcgagattccctcaaacatggtactcgcccgaactcgcccttccatattccttcccactatcatgttcctctggggtgtcgttacaatcgtcattggatggattccgagctacaaagcgctggttggggtgcgcatactagttggtatccttgaagctggttttgcgcccggtgtgctacttctcctttcatcttggtataagagaaaagagcagagcaagcgattcgctgtctacatctctgcggccattctgtcgggagctttcggtggtctcttaggcggtgcaatcacatctggattagacggagcgcatggcatcgcgggttggcgttggctcttcattgtagagggtgcagcgactgctggatggtctatcatcgcgagcttcattttgcttgatttccctgccaatacgaagcgatttagcgaggccgagcgtagattggcagtgcagcgaattctcgctgatcaggctcgaactggtaccgaagacattccgaccccaacccacatccaggctctgaagatggcattatcaaactggagggtctggctcttcgttatcggttacatggcgatcgtcggctcttctactttatcctacttttatcccacactggtgaaaggtctcggttatagctcgaaggaggcacaatacttgacaattccaatttatgcggccgcgtttgtggtaaatggattcactggctacttcatggataagaagccagagtggcgtggttgggttctcggattctggatgacggtcgctatggcggcatctattgttactactgttgtctacgatttccatgcccgttatggcctgcttgtagtcattgccagtggtctttgggcgtcaaatggcctgtcgctctcatacgcctcctccacctttggcgatatgccggacgaagttcgtgcaattgcgctagcatttgtcaatgctacgggaaatctagcacagatttatggctcttatctgtttccctccgaggatgcccccaagtatgtacttggattcggggtgatcagtgggttatgtttcagtggtatcgcatcatatatcgccttgcaaatactccttaagaggtggcctcaacgtctttatatcatttactttagaggaactacacaggagcatcccaacgctcgaaaatagagtactaaagataccaatcgaacgtacctaaaatacttaacgcgttcatagtatcgccaaggcttcgtagcaaaacctaacaccccgtgcattaggtggatgagaacgaaat

SEQ ID NO: 10877 - DNA, 6057 bp, Muscodor strobelii
  misc_feature: SGI cDNA ID NO. 563473
  misc_feature: Encodes the peptide sequence at SEQ ID NO 10878
atggatcctctttcgatctcggcttcggtcgcgggcatcgtcagtctggcgggaacagtattttcgctgatggctaaatatgtcaaaggggccaacaatgccactcaggaggcctcagagctactaagcgaggtgaaagaactatcacttctacttcatcatctgtctctagtgtctcaggagctggaagtcaatacagaggcagaaaagtgtctacctagaaatcgaactcatttaagatttcaccatatctatgattgtcagaaaatcttgaatcggcttgataaagggctcagacaatctacaggagggctcaaatctcggtctaaactcgtcagatttggtagccgtctcgcatggccattcacagctgacgagacaactgatatcattcagaccattcagcgccgcaagcagacaatcaacttggcgttaactgcggatacatacgcacaattagctcaatatttgtgtcggcaagaagaggccagcaagcagcatgatcagatagaagagcaattaggcgctattcaaaacactgtgaaagagatcttggaggtcgagaccaagatcttcctagatcaaaagagacaaagggttctcgatttctttgcctcattcgcgaatccatggcgcgactttgaacttatgcaaaacctgcgtcatccgtcgactggaatgtggttcactgattcggatgacttcaaagaatggagtacgattccaggctcgaaattgtgggttacagggattcctggggccggcaaatcagttcttgcaggcctaatcctccacgactgcttaaagctcagctcggaagatgaaagaaaagcaacgacatatttcttctgcacatataaaaataaagaaacgcactcggcaaggaacattatgtcatcgctagtatcacaacttgctagacaaaacgaggaatcgttccacttgttagagagctactatcatgaactagtttcgcaacaatcgttggcaacggaaccttctctccaaagactttcgacaatttttgaagacatgtgcgagaactttgatcaggtgtttgttgtggtagacgggcttgacgagtgcgataccaacggccctacagacactttgagtcacatttcgcttggcaagaggagtccttctatgagtatgctacttctcagccgcgacgaagtacagattcgtgacctacttgctttgaactttgcggaggtagagattgaagccaatacagatgatattcaactatatgttctctcagaactcgaaagcagaacagcgtcgagacggatcaggatacggaatcctgaattgaaagctgagattacccacaaacttgttcataatgcaaagggcatgtttcgatgggttgcttgtcagcttgactatctcggagaactccccaacgatcgagagcgacggagtgcgttatcgaagcttccgccaacattgccggccacgtacgaacgtattctgaccaaaattgaacgatcaggcgagacaattcgaagactagtgcagaagaccctacttctgattcgcgcttctcttacatcagtggaatctattcgtgtagccctttccattcgagaagattcaaatgaaattgtcgatgacgatatggtggacgaatacgatattctgctacggtgtagcagtcttattcgaaaatcggccaatggagaaaatctagaattttcccactacactgtccaggaatttctagagtctattaatcccgcgcacgaagcagtagggttctatcacgtgtccgaacagcaagcttttctagctcttggcgaaatttcccttcgctacttaatgctgaaagacttcgacaagagaccagtagccgacaagacgcaaattgaatactttccagggcggcctcgggaacgaccattttatagaagctttgcaggagccttgaggaccagcctcgaagtgctcgctgaaagcctagcgacaaatggtgttcataatgctagtccaatgatggatcttcttcgggatttttttggcgacgcaaaatccgcctgttttcaacaatgggtcatcaactacgtagccgcttggacaacagataaccgcgactgcatgatctcagaggatggaacacgatcctatccacgtaagcgaccattgatgtttggtcaaaatattgagtcttgcggcggtcatttgagagaagaacagggtttcttgactttcgtcgcagcaatcctgcgacccgacttctcccccctgcacatggcagcgatgttgggtctgccatatatgtgcgaacacctccttggatgtggagcaaaagtcaacctgaaaagccgcttcggaacgcctttgcattgcgcactcggcggcctctcggtgtttctcggcacaaaagaccatgttcgggagattctggtcacatccattagtgctgaattatggtcgccgatacgattatgccagactgccgaagttctattggcagctggtgcaagcgcagatccgcgcctctcaactccgtttcaacaaagaacgctcatggaactgatgtgtatgtcagcagcttcgttcaatggatttcagatagtccaagctctagtgcgggggggcttggttgtcggacataaagacgtaatggctatggaggaccgattgggtgctgagcttgattttggaccacgttcagtctactacatccgccatacctccattttagctttgctcaagtgtttcaagaccagtcacgatggtctcgaccccaaaaagatcatctattcgatgatatatgaatttgctcgaatccgccgaatggatctaagtatgctggctgtacctaaaaacatacatgaaatcccgtcacggggtcagcctccacaggatgttctcagatcaattatcgttacaaatgacatcgtcgccctcgagaagattctggaattgaacgaacctgcatatgtacaagacgctagattcacggtcgacagtgaggaatggactgcggtacacttagcctgcagctcaggctcgtcagacgtcctcgaactactactagcactcgacagcgaccctgaagcaacgactacgagagggacgaagccgatacatatgagtcaatcacgcttagatggaggtaacatcatccggattctcctgcgacataaagtgtctacaactgcgaagactcccaatcgtgatacaatttggcatttgtgtattcgagacggtgacatgcagacacttacagacctggtcgatctagcttcagataaatatgatgctctgcagacagtctcgggctcaggtcagactccaatatgtcttgctctcgataagcagatgaatagggctgtagatcttctattagatcactgcccaacccaggcattctggaaaggcaaggcccctatgtaccaagaagttgcacgatctggttcattgaggctcttgagacacctctcgagccttggaattagactagacgagtttgattatgcatcaggtagcccacttcatcatatacgtccaacctcgacatctgtatttgtcgaagagcttgtgaaatttttcccattttgctatagacagcgccaagacggacagatgcccttccaatcccttttggaccgaactacaatacaaaactctaaattgcaacctggtgtcttagaaaggctgcttcctgcttctgttgacactcataccgaggaaatggctggcatctggcctttgttgtgttcaggtattcttcgatacctccaaagaagtccaggaaacgttggctggatagtacaagctattcgccacgtcatcaataatggtttcgtatcctcctacgaaaaagcgtacggtagatcagcattcctctttcttgcaacagagatcgatgagcaatgctctacgcaattactcgggtgggctgcgaagcgccgaaatgaggaacttgataaacaatgttcagaacgacttcctcgctgggactgtctttcgcaaatgttactagcccttttcaccgtaatagaagatcgaacaggtgttgccgactacgatgtcgtcactcgactcctttctcatgccataatccatgatgatcagctcttaacaacgcggctacttgaagacggtgttgatattcaccgccgagccgatttattgtctccaatggaacttgcctgcgtaccggcggtgccagtgtcggaaaatcatttcaaaaatttactgtcgtacactgacaaaacaaagctgagccagcaaaatgagcatataaacggtgagaccatctttcacctgcttgggaacggtactcactgcgaattccgagcgcgttggaaattgcgacagatactagaagttggtgtccaagtcgatatcgatgcaaaagactctgactcccagactgggcttctcgcccacatctggcatgagagtttcaccaccgcggagatcttgcttgaatatggagccgatccgggtattaccaactattttggattcgatgctgcattatactcggttgcggcaaacagctctggttttctaattagactcgccgatcacgcaataactcacaatttcacaatcaactggggtcaaaaatggagatggcgtgacacgcctctctcaggaggtaatgcatttcaccttgcagcagctgaaggcgccctcgaatgcatgcagctttatctccaatcaaaatggctcacggatcttgaagcgctcgatgacgaccttcaaacaccgatgcactatgctgcttcatacgatcagcacaatgtagttcatttccttcatgtcaatgggtgcgacattggccgatgttctcatgatggatcatcaccaatgcacctagctgtcaagaaaggacatgttgggtgcactagagaattattgcgactgggagctaagctgcaatacgacgcgcatgggatgacaccattagaccatgcctacaaaagcaagaatctggagctgatcgacatccttcattccaaggagcaaaaagcggtccagaattccataatatccaaccctgacatgcagacatggatcagattagcagactcgttctgctctgcactcgaacaaggtaatcttgatgtttgcgaaaggtacctggctcgaggatttccagtcgataccgcaatatgggagccttggcgtgtcactccattaatgtttgcatttgtgaagagactgtcaccagattccatcggatttcttctcaaacgaggagcgtcggtatcagtcgtattcgaagggcccaagagttcagagttcgccactgttctagaagccgctgtagccatgggatgctataaccgcttattgcctttccttcttcgaaagtacttagccgagggcggtgagcttgagagcctcgcacgaacacctttgcatgttgccgttgagcaaggaaataatacagggcttggaatccttttgagcgagttgcgccgaatagcgtatcccgtgcagaaaatcattaacaagggtaatcctgaatatgaagatggaacagctctgcacatggcagcacatcacgacaacattgttgccgcaaaactcctgatggattatggcgcaaatctcgaatgtagggacgaagacggctacacccctttacacatagccgcaaatagaggatcgacagacgccacgaagcttctcgtgagacgaggcgcatgcatcaaagcagtgattccacttactcagcatacgcctttaatggtagcttgtgtaagtggttgcgttgatgtggtgaaatttctatcccagcttgatcaaactcacgatttggacttagacggcgacggtgtaactcagcttgttcttgacggacagaacaacgccactgatgagttacatatttttgccttgctgttctctaaaggcatgaatcttcaccagttgaacgactatgagatcagctcaatgttttggatcatgaaaagctctaatcattgggttctacgacaccttcttcgaagttatccagagtccataagaatacaagaaattcaatggtcctcgcggcttatcaccttattcatcgatttctcggtctag

SEQ ID NO: 10878 - protein, 2018 aa, Muscodor strobelii
  misc_feature: SGI Peptide ID NO. 563473
  misc_feature (1866)..(1898): Pfam Id: PF00023 Pfam Desc: Ankyrin repeat
  misc_feature (1833)..(1865): Pfam Id: PF00023 Pfam Desc: Ankyrin repeat
  misc_feature (994)..(1026): Pfam Id: PF00023 Pfam Desc: Ankyrin repeat
  misc_feature (745)..(777): Pfam Id: PF00023 Pfam Desc: Ankyrin repeat
  misc_feature (1606)..(1633): Pfam Id: PF00023 Pfam Desc: Ankyrin repeat
  misc_feature (1573)..(1605): Pfam Id: PF00023 Pfam Desc: Ankyrin repeat
  misc_feature (1)..(2007): NCBI GI: 256725010 Blast Desc: NECHADRAFT_77073 [Nectria haematococca mpVI 77-13-4]
  misc_feature (2)..(1243): NCBI GI: 256733205 Blast Desc: NECHADRAFT_37523 [Nectria haematococca mpVI 77-13-4]
  misc_feature (4)..(796): NCBI GI: 46127675 Blast Desc: FG08215.1 [Gibberella zeae PH-1]
  misc_feature (174)..(1891): NCBI GI: 46117298 Blast Desc: FG04491.1 [Gibberella zeae PH-1]
  misc_feature (178)..(792): NCBI GI: 256733666 Blast Desc: NECHADRAFT_36266 [Nectria haematococca mpVI 77-13-4]
  misc_feature (104)..(613): NCBI GI: 67902626 Blast Desc: AN8300.2 [Aspergillus nidulans FGSC A4] gi|40747709|gb|EAA66865.1| AN8300.2 [Aspergillus nidulans FGSC A4] gi|259484224|tpe|CBF80262.1| TPA: conserved [Aspergillus FGSC
  misc_feature (87)..(613): NCBI GI: 255951228 Blast Desc: Pc22g24930 [Penicillium chrysogenum Wisconsin 54-1255] gi|211593398|emb|CAP99781.1| Pc22g24930 [Penicillium chrysogenum Wisconsin 54-1255]
  misc_feature (157)..(631): NCBI GI: 171679183 Blast Desc: protein product [Podospora anserina] gi|170937663|emb|CAP62321.1| protein product [Podospora anserina]
  misc_feature (1)..(455): NCBI GI: 156040581 Blast Desc: SS1G_12307 [Sclerotinia sclerotiorum 1980] gi|154696363|gb|EDN96101.1| SS1G_12307 [Sclerotinia sclerotiorum 1980]
  misc_feature (2)..(613): NCBI GI: 119488353 Blast Desc: serine/threonine-protein kinase chk2 (cds1) [Neosartorya fischeri NRRL 181] gi|119410838|gb|EAW20783.1| serine/threonine-protein kinase chk2 (cds1) [Neosartorya fischeri
MDPLSISASVAGIVSLAGTVFSLMAKYVKGANNATQEASELLSEVKELSLLLHHLSLVSQELEVNTEAEKCLPRNRTHLRFHHIYDCQKILNRLDKGLRQSTGGLKSRSKLVRFGSRLAWPFTADETTDIIQTIQRRKQTINLALTADTYAQLAQYLCRQEEASKQHDQIEEQLGAIQNTVKEILEVETKIFLDQKRQRVLDFFASFANPWRDFELMQNLRHPSTGMWFTDSDDFKEWSTIPGSKLWVTGIPGAGKSVLAGLILHDCLKLSSEDERKATTYFFCTYKNKETHSARNIMSSLVSQLARQNEESFHLLESYYHELVSQQSLATEPSLQRLSTIFEDMCENFDQVFVVVDGLDECDTNGPTDTLSHISLGKRSPSMSMLLLSRDEVQIRDLLALNFAEVEIEANTDDIQLYVLSELESRTASRRIRIRNPELKAEITHKLVHNAKGMFRWVACQLDYLGELPNDRERRSALSKLPPTLPATYERILTKIERSGETIRRLVQKTLLLIRASLTSVESIRVALSIREDSNEIVDDDMVDEYDILLRCSSLIRKSANGENLEFSHYTVQEFLESINPAHEAVGFYHVSEQQAFLALGEISLRYLMLKDFDKRPVADKTQIEYFPGRPRERPFYRSFAGALRTSLEVLAESLATNGVHNASPMMDLLRDFFGDAKSACFQQWVINYVAAWTTDNRDCMISEDGTRSYPRKRPLMFGQNIESCGGHLREEQGFLTFVAAILRPDFSPLHMAAMLGLPYMCEHLLGCGAKVNLKSRFGTPLHCALGGLSVFLGTKDHVREILVTSISAELWSPIRLCQTAEVLLAAGASADPRLSTPFQQRTLMELMCMSAASFNGFQIVQALVRGGLVVGHKDVMAMEDRLGAELDFGPRSVYYIRHTSILALLKCFKTSHDGLDPKKIIYSMIYEFARIRRMDLSMLAVPKNIHEIPSRGQPPQDVLRSIIVTNDIVALEKILELNEPAYVQDARFTVDSEEWTAVHLACSSGSSDVLELLLALDSDPEATTTRGTKPIHMSQSRLDGGNIIRILLRHKVSTTAKTPNRDTIWHLCIRDGDMQTLTDLVDLASDKYDALQTVSGSGQTPICLALDKQMNRAVDLLLDHCPTQAFWKGKAPMYQEVARSGSLRLLRHLSSLGIRLDEFDYASGSPLHHIRPTSTSVFVEELVKFFPFCYRQRQDGQMPFQSLLDRTTIQNSKLQPGVLERLLPASVDTHTEEMAGIWPLLCSGILRYLQRSPGNVGWIVQAIRHVINNGFVSSYEKAYGRSAFLFLATEIDEQCSTQLLGWAAKRRNEELDKQCSERLPRWDCLSQMLLALFTVIEDRTGVADYDVVTRLLSHAIIHDDQLLTTRLLEDGVDIHRRADLLSPMELACVPAVPVSENHFKNLLSYTDKTKLSQQNEHINGETIFHLLGNGTHCEFRARWKLRQILEVGVQVDIDAKDSDSQTGLLAHIWHESFTTAEILLEYGADPGITNYFGFDAALYSVAANSSGFLIRLADHAITHNFTINWGQKWRWRDTPLSGGNAFHLAAAEGALECMQLYLQSKWLTDLEALDDDLQTPMHYAASYDQHNVVHFLHVNGCDIGRCSHDGSSPMHLAVKKGHVGCTRELLRLGAKLQYDAHGMTPLDHAYKSKNLELIDILHSKEQKAVQNSIISNPDMQTWIRLADSFCSALEQGNLDVCERYLARGFPVDTAIWEPWRVTPLMFAFVKRLSPDSIGFLLKRGASVSVVFEGPKSSEFATVLEAAVAMGCYNRLLPFLLRKYLAEGGELESLARTPLHVAVEQGNNTGLGILLSELRRIAYPVQKIINKGNPEYEDGTALHMAAHHDNIVAAKLLMDYGANLECRDEDGYTPLHIAANRGSTDATKLLVRRGACIKAVIPLTQHTPLMVACVSGCVDVVKFLSQLDQTHDLDLDGDGVTQLVLDGQNNATDELHIFALLFSKGMNLHQLNDYEISSMFWIMKSSNHWVLRHLLRSYPESIRIQEIQWSSRLITLFIDFSV

SEQ ID NO: 10879 - DNA, 843 bp, Muscodor strobelii
  misc_feature: SGI cDNA ID NO. 563474
  misc_feature: Encodes the peptide sequence at SEQ ID NO 10880
atgacgtcctatccagacctcacaagcttcaaagccctcaggtatgctcaccactctctactctcatgcctttcatcctcatacccaatctcatcactaacaatctccagtttcgactgctacggcaccctaatagactgggaatccggcttcctccgcaccatcacgctcctaaccacccaactccccgcctcacaccctctaaacaccaacccaccgactgaggcaatgcagcgcgtccacaaaatagcaaacgaacacgaacaagccaccggctcaatgccctacaacgaaatcctcgcaacttccctctcccaattcgcctcagaaatcggtgtcccctgtcccgactcaatctccgagcccttcggcaactcgcccggaacctggacgcccttctccgacaccatatctgcactacaaatcctagcgaagcgctacaaactgataatcctctccaacgtagacaacgccaacatctcgtccacagtctccaaacaactgtcccccatccacttcagcgcagtctacacagcgcaagatatccggtcttacaagccctcactccccaattttcactacctgttctcacacgcgaagcaggatctagatattgattggaagaaaggtgatttgctacatgttgccaggagtctgtatgcggaccatgtaccggccaaggaactgggattgagaagtgtgtggatcagtaggggtggggatacggaggagggtgcgggtggaaactatgaggaattgaagagtaagtgcagttttgagtggcgcttcgacgatcttggggcttttgcgaaggaggttgagaggcaatttgctgcgaagtag

SEQ ID NO: 10880 - protein, 280 aa, Muscodor strobelii
  misc_feature: SGI Peptide ID NO. 563474
  misc_feature (24)..(279): NCBI GI: 171694854 Blast Desc: protein product [Podospora anserina] gi|170947669|emb|CAP59831.1| protein product [Podospora anserina]
  misc_feature (3)..(278): NCBI GI: 46113817 Blast Desc: FG02943.1 [Gibberella zeae PH-1]
  misc_feature (1)..(280): NCBI GI: 261358850 Blast Desc: haloacid dehalogenase [Verticillium albo-atrum VaMs.102]
  misc_feature (24)..(276): NCBI GI: 225558261 Blast Desc: HAD-superfamily hydrolase [Ajellomyces capsulatus G186AR]
  misc_feature (24)..(266): NCBI GI: 240277216 Blast Desc: HAD-superfamily hydrolase [Ajellomyces capsulatus H143]
  misc_feature (24)..(274): NCBI GI: 238838991 Blast Desc: haloacid dehalogenase [Microsporum canis CBS 113480]
  misc_feature (24)..(276): NCBI GI: 226291252 Blast Desc: haloacid dehalogenase [Paracoccidioides brasiliensis Pb18]
  misc_feature (24)..(276): NCBI GI: 240109878 Blast Desc: haloacid dehalogenase-like hydrolase family protein [Coccidioides posadasii C735 delta SOWgp]
  misc_feature (30)..(267): NCBI GI: 239611861 Blast Desc: haloacid dehalogenase [Ajellomyces dermatitidis ER-3]
  misc_feature (30)..(267): NCBI GI: 261201676 Blast Desc: haloacid dehalogenase [Ajellomyces dermatitidis SLH14081] gi|239590149|gb|EEQ72730.1| haloacid dehalogenase [Ajellomyces dermatitidis SLH14081]
MTSYPDLTSFKALRYAHHSLLSCLSSSYPISSLTISSFDCYGTLIDWESGFLRTITLLTTQLPASHPLNTNPPTEAMQRVHKIANEHEQATGSMPYNEILATSLSQFASEIGVPCPDSISEPFGNSPGTWTPFSDTISALQILAKRYKLIILSNVDNANISSTVSKQLSPIHFSAVYTAQDIRSYKPSLPNFHYLFSHAKQDLDIDWKKGDLLHVARSLYADHVPAKELGLRSVWISRGGDTEEGAGGNYEELKSKCSFEWRFDDLGAFAKEVERQFAAK

SEQ ID NO: 10881 - DNA, 3587 bp, Muscodor strobelii
  misc_feature: SGI EST ID NO. CUFF.25832.0
  misc_feature: Variant of the nucleotide sequence at SEQ ID NO 10879
caggtacgtttgggaatcggaaattgttaatggtggagtcaagatgaacgtcaacaacgccctttcgcggggaagaaggcgcttgttgggcgcgatctccaaaggcactttcagggtcttccccgcataatgatattgccgagaagaggtcaggtactgactgtagataagggaacttatcgtatatataacacgtcagagcttcgtgggaattattatgagcaatagggcatcaaagacgcagacaggcagagaattaaatcatgagacattgcaacattctcattgctctgtatagatccttttatacaaatcatacgcaaagattttgaggccctcacgacaataaggcaatcaaacagcaccatgacgtcctatccagacctcacaagcttcaaagccctcagtttcgactgctacggcaccctaatagactgggaatccggcttcctccgcaccatcacgctcctaaccacccaactccccgcctcacaccctctaaacaccaacccaccgactgaggcaatgcagcgcgtccacaaaatagcaaacgaacacgaacaagccaccggctcaatgccctacaacgaaatcctcgcaacttccctctcccaattcgcctcagaaatcggtgtcccctgtcccgactcaatctccgagcccttcggcaactcgcccggaacctggacgcccttctccgacaccatatctgcactacaaatcctagcgaagcgctacaaactgataatcctctccaacgtagacaacgccaacatctcgtccacagtctccaaacaactgtcccccatccacttcagcgcagtctacacagcgcaagatatccggtcttacaagccctcactccccaattttcactacctgttctcacacgcgaagcaggatctagatattgattggaagaaaggtgatttgctacatgttgccaggagtctgtatgcggaccatgtaccggccaaggaactgggattgagaagtgtgtggatcagtaggggtggggatacggaggagggtgcgggtggaaactatgaggaattgaagagtaagtgcagttttgagtggcgcttcgacgatcttggggcttttgcgaaggaggttgagaggcaatttgctgcgaagtagtgcagttgacgagtgctggccgatgggaggtggtgggctaggtgtgaggcaggatgagaatgacggaaatgacgacaataacgagaacgagattgatgagaatgatatgaacgatgtaatcaattgacaaacgctagcttagcatcttaatcaaacatcttctactccatcctctttcactcacgacccatcccggccccctcaatcatcctcatcctcctcccaatccccatctcctctacccctactcttactccgtcccctaaaagctctctgcaaactatcaacccccctccacccactcttcatcttgatcggctgtaaaaaccgatccctatgcaccgcgcccagcatctcatcttcagaatcgacttcaacaggcaactcgtccccctcataatggtgcacaagtttcagatgtctcatcagattcgcccggcgatcaaacgtctccactgcgcggggacaatcagcgtagatgcagaaccaggatttacccactgagcgggagcgggtgcgggagactgatttgctccgccgtctgctacggcttgcggagcgtcctcgagacggtgcttcgtcgtctgtttctatagttgttgctcggcgacgttgggtgatggtggtgctgggttctaaggattcttctggatccgaggacggcaggagaggagggaggatcatgcctgggttgtattctacgcgttgatttaggttaggttgtgtcagtggcccttcttccagtttgtgaagaacgaagttctgtccgaagagatctgcgcaacgcctcgctgcgcggtcaagcacggggccggggaattgtgccatagcggcggcaccgaggacgtctctccaatctagcagtcccgtccgtcgttgctggcgtggtttacgctttcttgaatccgtcgcagaagcatcggttgacgaaacgctcgagtctctaggcatctgtcgtgatcgagctcgtttccttgatttggctgtagctttcccatctgaatactcccctgcggaatccggcgcaggagtcgagtccgaaagctggggcgcaatgtcctctgcaaagactggtgcgcgctttttctgtagtttggcaatcctaatagcatactccctctccgtctcgccctcaagcattgggtagacctttcgcttgcggccacgtgcccgtatacccacacccttcttcccctgggacggactcatagtccgtcttgccggctcgggaggtgcaaagcgatccctcgtttcggtttttattcccggtgtacgggacgtcgctctagatggcgcgttagatggtgctttggaaggtgctttagaaggtgcttttgatggcgcgcgacttcgaacccgactccgacttcgactgcgactgcgagatgacccagtccatgtatcggaatcaccaccagaatcggagtggtacctagcaaccgattcttgtgtattatgtagaatcctcaacatcctatccaccttgcccaagatctggcgcgctgtaggtcgtaacatggtgtacgatagatcgtcatccgtagacacgacaggcttcagcccactctcatgcactatcgttctcgatgacatggcttgatccgcatcatcgacatccatcatctcggcatcgctaggatgttcgtccttcacggacattgagcgaggcctggatgctgattccatgtctacgtcctcctcgttttcatcctcgccatcactactagactgggattcgatagaagtaacgataggttgagcatcaggcctggcttcaaacttctctttcgcatatctcagtatagccgcggaaacggcttcctcaagatcagcgctgggcccatcctgccgcgccatcctgagcttgaaaggctcatccgcttcatccgcccggcccatgaactccgggcgcggcacggtgcgcgcagacatcggccaggctgtccatagctttgagggcacccatttgtcctctgtgactggctgtcccgtaatcgcattgatatcctgatcacacatgtcagtcaatcgactcttcatagggcgctcaatctcattcacatgtcaatcttacccccgtagctgcaggtcccttcccatcttttgatcctgcggcgctatgccgtttcttgagtgcaaacgcattatataaatgcacggccagatcgcggttccggatctcgtcgagcgcggtgatggtctcaatctctgcgctgttcagctgctgccaggtggacggggggcccttccagcggtttgggcgttcatcttcatcttcaaaatcagccgagtccgaagaaagcggatgatgtggttcatctccttcggacgccatcgtcgcagagtccgcataaagtcgacgtagtgaaggttggtggaaattaattccgtttgctggaaagtcgctccaagaaatagtggcacaccgcgtccacgcctatcacaaa

SEQ ID NO: 10882 - DNA, 774 bp, Muscodor strobelii
  misc_feature: SGI cDNA ID NO. 563475
  misc_feature: Elevated expression when VOC is produced
  misc_feature: Encodes the peptide sequence at SEQ ID NO 10883
atgacgtcctatccagacctcacaagcttcaaagccctcagtttcgactgctacggcaccctaatagactgggaatccggcttcctccgcaccatcacgctcctaaccacccaactccccgcctcacaccctctaaacaccaacccaccgactgaggcaatgcagcgcgtccacaaaatagcaaacgaacacgaacaagccaccggctcaatgccctacaacgaaatcctcgcaacttccctctcccaattcgcctcagaaatcggtgtcccctgtcccgactcaatctccgagcccttcggcaactcgcccggaacctggacgcccttctccgacaccatatctgcactacaaatcctagcgaagcgctacaaactgataatcctctccaacgtagacaacgccaacatctcgtccacagtctccaaacaactgtcccccatccacttcagcgcagtctacacagcgcaagatatccggtcttacaagccctcactccccaattttcactacctgttctcacacgcgaagcaggatctagatattgattggaagaaaggtgatttgctacatgttgccaggagtctgtatgcggaccatgtaccggccaaggaactgggattgagaagtgtgtggatcagtaggggtggggatacggaggagggtgcgggtggaaactatgaggaattgaagagtaagtgcagttttgagtggcgcttcgacgatcttggggcttttgcgaaggaggttgagaggcaatttgctgcgaagtag

SEQ ID NO: 10883 - protein, 257 aa, Muscodor strobelii
  misc_feature: SGI Peptide ID NO. 563475
  misc_feature (1)..(256): NCBI GI: 171694854 Blast Desc: protein product [Podospora anserina] gi|170947669|emb|CAP59831.1| protein product [Podospora anserina]
  misc_feature (3)..(255): NCBI GI: 46113817 Blast Desc: FG02943.1 [Gibberella zeae PH-1]
  misc_feature (1)..(257): NCBI GI: 261358850 Blast Desc: haloacid dehalogenase [Verticillium albo-atrum VaMs.102]
  misc_feature (1)..(253): NCBI GI: 225558261 Blast Desc: HAD-superfamily hydrolase [Ajellomyces capsulatus G186AR]
  misc_feature (1)..(243): NCBI GI: 240277216 Blast Desc: HAD-superfamily hydrolase [Ajellomyces capsulatus H143]
  misc_feature (1)..(251): NCBI GI: 238838991 Blast Desc: haloacid dehalogenase [Microsporum canis CBS 113480]
  misc_feature (1)..(253): NCBI GI: 226291252 Blast Desc: haloacid dehalogenase [Paracoccidioides brasiliensis Pb18]
  misc_feature (7)..(244): NCBI GI: 239611861 Blast Desc: haloacid dehalogenase [Ajellomyces dermatitidis ER-3]
  misc_feature (7)..(244): NCBI GI: 261201676 Blast Desc: haloacid dehalogenase [Ajellomyces dermatitidis SLH14081] gi|239590149|gb|EEQ72730.1| haloacid dehalogenase [Ajellomyces dermatitidis SLH14081]
  misc_feature (7)..(256): NCBI GI: 67524163 Blast Desc: AN2539.2 [Aspergillus nidulans FGSC A4] gi|40745488|gb|EAA64644.1| AN2539.2 [Aspergillus nidulans FGSC A4] gi|259487969|tpe|CBF87056.1| TPA: haloalkanoic acid nidulans
  misc_feature: Useful for introducing or modulating the production of volatile compounds
MTSYPDLTSFKALSFDCYGTLIDWESGFLRTITLLTTQLPASHPLNTNPPTEAMQRVHKIANEHEQATGSMPYNEILATSLSQFASEIGVPCPDSISEPFGNSPGTWTPFSDTISALQILAKRYKLIILSNVDNANISSTVSKQLSPIHFSAVYTAQDIRSYKPSLPNFHYLFSHAKQDLDIDWKKGDLLHVARSLYADHVPAKELGLRSVWISRGGDTEEGAGGNYEELKSKCSFEWRFDDLGAFAKEVERQFAAK

SEQ ID NO: 10884 - DNA, 3587 bp, Muscodor strobelii; identical to SEQ ID NO: 10881
  misc_feature: SGI EST ID NO. CUFF.25832.0
  misc_feature: Variant of the nucleotide sequence at SEQ ID NO 10882

SEQ ID NO: 10885 - DNA, 2067 bp, Muscodor strobelii
  misc_feature: SGI cDNA ID NO. 563476
  misc_feature: Encodes the peptide sequence at SEQ ID NO 10886
atggcgtccgaaggagatgaaccacatcatccgctttcttcggactcggctgattttgaagatgaagatgaacgcccaaaccgctggaagggccccccgtccacctggcagcagctgaacagcgcagagattgagaccatcaccgcgctcgacgagatccggaaccgcgatctggccgtgcatttatataatgcgtttgcactcaagaaacggcatagcgccgcaggatcaaaagatgggaagggacctgcagctacgggggatatcaatgcgattacgggacagccagtcacagaggacaaatgggtgccctcaaagctatggacagcctggccgatgtctgcgcgcaccgtgccgcgcccggagttcatgggccgggcggatgaagcggatgagcctttcaagctcaggatggcgcggcaggatgggcccagcgctgatcttgaggaagccgtttccgcggctatactgagatatgcgaaagagaagtttgaagccaggcctgatgctcaacctatcgttacttctatcgaatcccagtctagtagtgatggcgaggatgaaaacgaggaggacgtagacatggaatcagcatccaggcctcgctcaatgtccgtgaaggacgaacatcctagcgatgccgagatgatggatgtcgatgatgcggatcaagccatgtcatcgagaacgatagtgcatgagagtgggctgaagcctgtcgtgtctacggatgacgatctatcgtacaccatgttacgacctacagcgcgccagatcttgggcaaggtggataggatgttgaggattctacataatacacaagaatcggttgctaggtaccactccgattctggtggtgattccgatacatggactgggtcatctcgcagtcgcagtcgaagtcggagtcgggttcgaagtcgcgcgccatcaaaagcaccttctaaagcaccttccaaagcaccatctaacgcgccatctagagcgacgtcccgtacaccgggaataaaaaccgaaacgagggatcgctttgcacctcccgagccggcaagacggactatgagtccgtcccaggggaagaagggtgtgggtatacgggcacgtggccgcaagcgaaaggtctacccaatgcttgagggcgagacggagagggagtatgctattaggattgccaaactacagaaaaagcgcgcaccagtctttgcagaggacattgcgccccagctttcggactcgactcctgcgccggattccgcaggggagtattcagatgggaaagctacagccaaatcaaggaaacgagctcgatcacgacagatgcctagagactcgagcgtttcgtcaaccgatgcttctgcgacggattcaagaaagcgtaaaccacgccagcaacgacggacgggactgctagattggagagacgtcctcggtgccgccgctatggcacaattccccggccccgtgcttgaccgcgcagcgaggcgttgcgcagatctcttcggacagaacttcgttcttcacaaactggaagaagggccactgacacaacctaacctaaatcaacgcgtagaatacaacccaggcatgatcctccctcctctcctgccgtcctcggatccagaagaatccttagaacccagcaccaccatcacccaacgtcgccgagcaacaactatagaaacagacgacgaagcaccgtctcgaggacgctccgcaagccgtagcagacggcggagcaaatcagtctcccgcacccgctcccgctcagtgggtaaatcctggttctgcatctacgctgattgtccccgcgcagtggagacgtttgatcgccgggcgaatctgatgagacatctgaaacttgtgcaccattatgagggggacgagttgcctgttgaagtcgattctgaagatgagatgctgggcgcggtgcatagggatcggtttttacagccgatcaagatgaagagtgggtggaggggggttgatagtttgcagagagcttttaggggacggagtaagagtaggggtagaggagatggggattgggaggaggatgaggatgattga

SEQ ID NO: 10886 - protein, 688 aa, Muscodor strobelii
  misc_feature: SGI Peptide ID NO. 563476
  misc_feature (25)..(669): NCBI GI: 46107626 Blast Desc: FG00696.1 [Gibberella zeae PH-1]
  misc_feature (25)..(688): NCBI GI: 156057257 Blast Desc: SS1G_04359 [Sclerotinia sclerotiorum 1980] gi|154702145|gb|EDO01884.1| SS1G_04359 [Sclerotinia sclerotiorum 1980]
  misc_feature (23)..(666): NCBI GI: 256734755 Blast Desc: NECHADRAFT_75333 [Nectria haematococca mpVI 77-13-4]
  misc_feature (20)..(655): NCBI GI: 164428688 Blast Desc: NCU00926 [Neurospora crassa OR74A] gi|38567288|emb|CAE76577.1| [Neurospora crassa] gi|157072242|gb|EAA35516.2| [Neurospora crassa OR74A]
  misc_feature (25)..(670): NCBI GI: 39949997 Blast Desc: MGG_01171 [Magnaporthe grisea 70-15] gi|145021039|gb|EDK05168.1| MGG_01171 [Magnaporthe grisea 70-15]
  misc_feature (466)..(688): NCBI GI: 171694866 Blast Desc: protein product [Podospora anserina] gi|170947675|emb|CAP59837.1| protein product [Podospora anserina]
  misc_feature (15)..(278): NCBI GI: 225679775 Blast Desc: conserved [Paracoccidioides brasiliensis Pb03]
  misc_feature (15)..(278): NCBI GI: 226291528 Blast Desc: conserved [Paracoccidioides brasiliensis Pb18]
  misc_feature (25)..(283): NCBI GI: 261358851 Blast Desc: conserved [Verticillium albo-atrum VaMs.102]
  misc_feature (15)..(278): NCBI GI: 226283885 Blast Desc: conserved [Paracoccidioides brasiliensis Pb01] gi|226286046|gb|EEH41612.1| conserved [Paracoccidioides brasiliensis Pb01]
MASEGDEPHHPLSSDSADFEDEDERPNRWKGPPSTWQQLNSAEIETITALDEIRNRDLAVHLYNAFALKKRHSAAGSKDGKGPAATGDINAITGQPVTEDKWVPSKLWTAWPMSARTVPRPEFMGRADEADEPFKLRMARQDGPSADLEEAVSAAILRYAKEKFEARPDAQPIVTSIESQSSSDGEDENEEDVDMESASRPRSMSVKDEHPSDAEMMDVDDADQAMSSRTIVHESGLKPVVSTDDDLSYTMLRPTARQILGKVDRMLRILHNTQESVARYHSDSGGDSDTWTGSSRSRSRSRSRVRSRAPSKAPSKAPSKAPSNAPSRATSRTPGIKTETRDRFAPPEPARRTMSPSQGKKGVGIRARGRKRKVYPMLEGETEREYAIRIAKLQKKRAPVFAEDIAPQLSDSTPAPDSAGEYSDGKATAKSRKRARSRQMPRDSSVSSTDASATDSRKRKPRQQRRTGLLDWRDVLGAAAMAQFPGPVLDRAARRCADLFGQNFVLHKLEEGPLTQPNLNQRVEYNPGMILPPLLPSSDPEESLEPSTTITQRRRATTIETDDEAPSRGRSASRSRRRSKSVSRTRSRSVGKSWFCIYADCPRAVETFDRRANLMRHLKLVHHYEGDELPVEVDSEDEMLGAVHRDRFLQPIKMKSGWRGVDSLQRAFRGRSKSRGRGDGDWEEDEDD

SEQ ID NO: 10887 - DNA, 3589 bp, Muscodor strobelii
  misc_feature: SGI EST ID NO. CUFF.25833.1
  misc_feature: Variant of the nucleotide sequence at SEQ ID NO 10885
tttgtgataggcgtggacgcggtgtgccactatttcttggagcgactttccagcaaacggaattaatttccaccaaccttcactacgtcgactttatgcggactctgcgacgatggcgtccgaaggagatgaaccacatcatccgctttcttcggactcggctgattttgaagatgaagatgaacgcccaaaccgctggaagggccccccgtccacctggcagcagctgaacagcgcagagattgagaccatcaccgcgctcgacgagatccggaaccgcgatctggccgtgcatttatataatgcgtttgcactcaagaaacggcatagcgccgcaggatcaaaagatgggaagggacctgcagctacgggggatatcaatgcgattacgggacagccagtcacagaggacaaatgggtgccctcaaagctatggacagcctggccgatgtctgcgcgcaccgtgccgcgcccggagttcatgggccgggcggatgaagcggatgagcctttcaagctcaggatggcgcggcaggatgggcccagcgctgatcttgaggaagccgtttccgcggctatactgagatatgcgaaagagaagtttgaagccaggcctgatgctcaacctatcgttacttctatcgaatcccagtctagtagtgatggcgaggatgaaaacgaggaggacgtagacatggaatcagcatccaggcctcgctcaatgtccgtgaaggacgaacatcctagcgatgccgagatgatggatgtcgatgatgcggatcaagccatgtcatcgagaacgatagtgcatgagagtgggctgaagcctgtcgtgtctacggatgacgatctatcgtacaccatgttacgacctacagcgcgccagatcttgggcaaggtggataggatgttgaggattctacataatacacaagaatcggttgctaggtaccactccgattctggtggtgattccgatacatggactgggtcatctcgcagtcgcagtcgaagtcggagtcgggttcgaagtcgcgcgccatcaaaagcaccttctaaagcaccttccaaagcaccatctaacgcgccatctagagcgacgtcccgtacaccgggaataaaaaccgaaacgagggatcgctttgcacctcccgagccggcaagacggactatgagtccgtcccaggggaagaagggtgtgggtatacgggcacgtggccgcaagcgaaaggtctacccaatgcttgagggcgagacggagagggagtatgctattaggattgccaaactacagaaaaagcgcgcaccagtctttgcagaggacattgcgccccagctttcggactcgactcctgcgccggattccgcaggggagtattcagatgggaaagctacagccaaatcaaggaaacgagctcgatcacgacagatgcctagagactcgagcgtttcgtcaaccgatgcttctgcgacggattcaagaaagcgtaaaccacgccagcaacgacggacgggactgctagattggagagacgtcctcggtgccgccgctatggcacaattccccggccccgtgcttgaccgcgcagcgaggcgttgcgcagatctcttcggacagaacttcgttcttcacaaactggaagaagggccactgacacaacctaacctaaatcaacgcgtagaatacaacccaggcatgatcctccctcctctcctgccgtcctcggatccagaagaatccttagaacccagcaccaccatcacccaacgtcgccgagcaacaactatagaaacagacgacgaagcaccgtctcgaggacgctccgcaagccgtagcagacggcggagcaaatcagtctcccgcacccgctcccgctcagtgggtaaatcctggttctgcatctacgctgattgtccccgcgcagtggagacgtttgatcgccgggcgaatctgatgagacatctgaaacttgtgcaccattatgagggggacgagttgcctgttgaagtcgattctgaagatgagatgctgggcgcggtgcatagggatcggtttttacagccgatcaagatgaagagtgggtggaggggggttgatagtttgcagagagcttttaggggacggagtaagagtaggggtagaggagatggggattgggaggaggatgaggatgattgagggggccgggatgggtcgtgagtgaaagaggatggagtagaagatgtttgattaagatgctaagctagcgtttgtcaattgattacatcgttcatatcattctcatcaatctcgttctcgttattgtcgtcatttccgtcattctcatcctgcctcacacctagcccaccacctcccatcggccagcactcgtcaactgcactacttcgcagcaaattgcctctcaacctccttcgcaaaagccccaagatcgtcgaagcgccactcaaaactgcacttactcttcaattcctcatagtttccacccgcaccctcctccgtatccccacccctactgatccacacacttctcaatcccagttccttggccggtacatggtccgcatacagactcctggcaacatgtagcaaatcacctttcttccaatcaatatctagatcctgcttcgcgtgtgagaacaggtagtgaaaattggggagtgagggcttgtaagaccggatatcttgcgctgtgtagactgcgctgaagtggatgggggacagttgtttggagactgtggacgagatgttggcgttgtctacgttggagaggattatcagtttgtagcgcttcgctaggatttgtagtgcagatatggtgtcggagaagggcgtccaggttccgggcgagttgccgaagggctcggagattgagtcgggacaggggacaccgatttctgaggcgaattgggagagggaagttgcgaggatttcgttgtagggcattgagccggtggcttgttcgtgttcgtttgctattttgtggacgcgctgcattgcctcagtcggtgggttggtgtttagagggtgtgaggcggggagttgggtggttaggagcgtgatggtgcggaggaagccggattcccagtctattagggtgccgtagcagtcgaaactggagattgttagtgatgagattgggtatgaggatgaaaggcatgagagtagagagtggtgagcatacctgagggctttgaagcttgtgaggtctggataggacgtcatggtgctgtttgattgccttattgtcgtgagggcctcaaaatctttgcgtatgatttgtataaaaggatctatacagagcaatgagaatgttgcaatgtctcatgatttaattctctgcctgtctgcgtctttgatgccctattgctcataataattcccacgaagctctgacgtgttatatatacgataagttcccttatctacagtcagtacctgacctcttctcggcaatatcattatgcggggaagaccctgaaagtgcctttggagatcgcgcccaacaagcgccttcttccccgcgaaagggcgttgttgacgttcatcttgactccaccattaacaatttccgattcccaaacgtacctg

SEQ ID NO: 10888 - DNA, 2025 bp, Muscodor strobelii
  misc_feature: SGI cDNA ID NO. 563477
  misc_feature: Reduced expression when VOC is produced
  misc_feature: Encodes the peptide sequence at SEQ ID NO 10889
atgggccgaatcaagaagaagggagaggcgggcaatgccagaaactacatcacccgcacccaggccgtgaaaaagctgcagctcagcctccccgacttccgcaagctctgcatctggaaaggcatcttcccccgcgagccccggaaccgcaagaaggcgtacaagagcgccacggcctccaccaccttctactacgccaaggacatccagtacctcctccacgaaccccttgtgcagaagttcagagaccagaaggtcctcgagaagaagatctccagagccctgggccgcggcgatgtgggtgacgccagccgcctcgagcgcaacgctgcccggcccgacaagaccggcaagccccgctacaccctcgaccatgtcatccgcgagcgctacccgaccttcatcgacgccctccgcgacctcgacgactgcctgtccatgctgttcctcttcgccaacctcccctcctcctccgccgtccccgccaagatgatcgcccgctgcgagcgcctatgcctcgagttccagcactacctcattgtctcccagaacctgcgcaagtccttcctctctatcaagggcatatactaccaggccaacatccaaggagaggacattctatggctcgttccgtacaaattcaaccagagggtctacggggatgtagatttccgcatcatgggcacgttcgtcgagttttatatgtctcttctcggcttcgtcaacttcagactgtacaagaccatcggtctgaagtaccctcctaaattcgaccactcaaaggacgacggtgccgctgaattgggcgcatttaagctcgaaggcaatagtaccatcacagacaagccaagcgaacccgcccaggtcacgaatggcagtggtgctgatagcgctagagacgagcagcccgatcccaaggcccaggctcaagtgaatgctctaattcgccagatgagagatgaaatggtggtcgatgggaacgaggagacaacagacaccgctcaagaggaggaagaccccgatgctatcgacaagtttgtgcctgtcgctcctggcggcgatgttttacctcagcctactcaatccgaaggttccgccgagtcgttattcgcaaattgcaccttctatctatcccgagagacccctagacaaccattggagttcattctccgcgctttcggctgtaagcgcattggttgggactcggtactgggcgaaggcgcatacaccaccaacgagtcagacccatccatcactcatcaagttgtcgatcgcccaataatacaagctgcgacggaagagaacgaaggagacgacgaagataatcagacagcacagaagctcgcgccgaatcagagacacccaggacgcatctacgtccagccgcagtgggtatgggacagtgtaaacgacgaggaattgaagagacccgatgattacgctcctggtgctcaattgcctcctcacttgagtcccttcgtccagagtacccagggcgcttacgatcctacgttacctctgcaagatcaggagacagagggcgaagccctgcaggacagcgatgaggaggacgaggaagaagaggaaggcgcggatgaccttgctgtcaagaagaacaaaaagaccgcgtccaacggcatggatgttgacatttcagacgaagatgacgctgactcttttggtgggttttccgaagatgaggatgccggagagggagagaatgacgaagaggtcgatgaagaactacgaaatcagcttgagctggaagcagagctcagtggcaaacctgtcaagcaacccaagaaagacgcccagtcccagaagatagaggcaaggaagaagctagcacagaaagccaaggaggaggcagaagagatcgagcgtgccaagggaatgctgagcaagaagaagaggaagctgtttgagcaaatgcagtacaccaacagcaagaagagcgccgaggatcagaagttgagggaaaagaggagaaagatagagaaacagaaagctcgaggcaaggcttaa

SEQ ID NO: 10889 - protein, 674 aa, Muscodor strobelii
  misc_feature: SGI Peptide ID NO. 563477
  misc_feature (365)..(469): Pfam Id: PF00533 Pfam Desc: BRCA1 C Terminus (BRCT) domain
  misc_feature (5)..(294): Pfam Id: PF06732 Pfam Desc: Pescadillo N-terminus
  misc_feature (5)..(268): Pfam Id: PF06732 Pfam Desc: Pescadillo N-terminus
  misc_feature (1)..(669): NCBI GI: 116182650 Blast Desc: CHGG_01953 [Chaetomium globosum CBS 148.51] gi|121789911|sp|Q2HCV1.1|PESC_CHAGB RecName: Full=Pescadillo homolog; AltName: Full=Nucleolar protein 7 homolog CHGG_01953 CBS
  misc_feature (1)..(671): NCBI GI: 85114760 Blast Desc: NCU00925 [Neurospora crassa OR74A] gi|74629076|sp|Q7SFC2.1|PESC_NEUCR RecName: Full=Pescadillo homolog; AltName: Full=Nucleolar protein 7 homolog NCU00925 to
  misc_feature (1)..(674): NCBI GI: 171694864 Blast Desc: protein product [Podospora anserina] gi|170947674|emb|CAP59836.1| protein product [Podospora anserina]
  misc_feature (1)..(674): NCBI GI: 39950125 Blast Desc: MGG_01183 [Magnaporthe grisea 70-15] gi|229891432|sp|A4RLI4.1|PESC_MAGGR RecName: Full=Pescadillo homolog; AltName: Full=Nucleolar protein 7 homolog MGG_01183
  misc_feature (1)..(674): NCBI GI: 46107624 Blast Desc: FG00695.1 [Gibberella zeae PH-1]
  misc_feature (1)..(665): NCBI GI: 256734754 Blast Desc: NECHADRAFT_30617 [Nectria haematococca mpVI 77-13-4]
  misc_feature (1)..(674): NCBI GI: 154295907 Blast Desc: BC1G_13323 [Botryotinia fuckeliana B05.10] gi|229891427|sp|A6SK81.1|PESC_BOTFB RecName: Full=Pescadillo homolog; AltName: Full=Nucleolar protein 7 homolog BC1G_13323
  misc_feature (1)..(674): NCBI GI: 156057251 Blast Desc: pescadillo [Sclerotinia sclerotiorum 1980] gi|229891438|sp|A7EGB5.1|PESC_SCLS1 RecName: Full=Pescadillo homolog; AltName: Full=Nucleolar protein 7 homolog pescadillo
  misc_feature (1)..(667): NCBI GI: 255936381 Blast Desc: Pc13g07910 [Penicillium chrysogenum Wisconsin 54-1255] gi|211583837|emb|CAP91860.1| Pc13g07910 [Penicillium chrysogenum Wisconsin 54-1255]
  misc_feature (1)..(667): NCBI GI: 238843244 Blast Desc: pescadillo [Microsporum canis CBS 113480]
  misc_feature: Useful for introducing or modulating the production of volatile compounds
MGRIKKKGEAGNARNYITRTQAVKKLQLSLPDFRKLCIWKGIFPREPRNRKKAYKSATASTTFYYAKDIQYLLHEPLVQKFRDQKVLEKKISRALGRGDVGDASRLERNAARPDKTGKPRYTLDHVIRERYPTFIDALRDLDDCLSMLFLFANLPSSSAVPAKMIARCERLCLEFQHYLIVSQNLRKSFLSIKGIYYQANIQGEDILWLVPYKFNQRVYGDVDFRIMGTFVEFYMSLLGFVNFRLYKTIGLKYPPKFDHSKDDGAAELGAFKLEGNSTITDKPSEPAQVTNGSGADSARDEQPDPKAQAQVNALIRQMRDEMVVDGNEETTDTAQEEEDPDAIDKFVPVAPGGDVLPQPTQSEGSAESLFANCTFYLSRETPRQPLEFILRAFGCKRIGWDSVLGEGAYTTNESDPSITHQVVDRPIIQAATEENEGDDEDNQTAQKLAPNQRHPGRIYVQPQWVWDSVNDEELKRPDDYAPGAQLPPHLSPFVQSTQGAYDPTLPLQDQETEGEALQDSDEEDEEEEEGADDLAVKKNKKTASNGMDVDISDEDDADSFGGFSEDEDAGEGENDEEVDEELRNQLELEAELSGKPVKQPKKDAQSQKIEARKKLAQKAKEEAEEIERAKGMLSKKKRKLFEQMQYTNSKKSAEDQKLREKRRKIEKQKARGKA

SEQ ID NO: 10890 - DNA, 2278 bp, Muscodor strobelii
  misc_feature: SGI EST ID NO. CUFF.25824.0
  misc_feature: Variant of the nucleotide sequence at SEQ ID NO 10888
ctcggatttcggcgcaacaacacaattaccacctcccacctcccatcgccctcaagatgggccgaatcaagaagaagggagaggcgggcaatgccagaaactacatcacccgcacccaggccgtgaaaaagctgcagctcagcctccccgacttccgcaagctctgcatctggaaaggcatcttcccccgcgagccccggaaccgcaagaaggcgtacaagagcgccacggcctccaccaccttctactacgccaaggacatccagtacctcctccacgaaccccttgtgcagaagttcagagaccagaaggtcctcgagaagaagatctccagagccctgggccgcggcgatgtgggtgacgccagccgcctcgagcgcaacgctgcccggcccgacaagaccggcaagccccgctacaccctcgaccatgtcatccgcgagcgctacccgaccttcatcgacgccctccgcgacctcgacgactgcctgtccatgctgttcctcttcgccaacctcccctcctcctccgccgtccccgccaagatgatcgcccgctgcgagcgcctatgcctcgagttccagcactacctcattgtctcccagaacctgcgcaagtccttcctctctatcaagggcatatactaccaggccaacatccaaggagaggacattctatggctcgttccgtacaaattcaaccagagggtctacggggatgtagatttccgcatcatgggcacgttcgtcgagttttatatgtctcttctcggcttcgtcaacttcagactgtacaagaccatcggtctgaagtaccctcctaaattcgaccactcaaaggacgacggtgccgctgaattgggcgcatttaagctcgaaggcaatagtaccatcacagacaagccaagcgaacccgcccaggtcacgaatggcagtggtgctgatagcgctagagacgagcagcccgatcccaaggcccaggctcaagtgaatgctctaattcgccagatgagagatgaaatggtggtcgatgggaacgaggagacaacagacaccgctcaagaggaggaagaccccgatgctatcgacaagtttgtgcctgtcgctcctggcggcgatgttttacctcagcctactcaatccgaaggttccgccgagtcgttattcgcaaattgcaccttctatctatcccgagagacccctagacaaccattggagttcattctccgcgctttcggctgtaagcgcattggttgggactcggtactgggcgaaggcgcatacaccaccaacgagtcagacccatccatcactcatcaagttgtcgatcgcccaataatacaagctgcgacggaagagaacgaaggagacgacgaagataatcagacagcacagaagctcgcgccgaatcagagacacccaggacgcatctacgtccagccgcagtgggtatgggacagtgtaaacgacgaggaattgaagagacccgatgattacgctcctggtgctcaattgcctcctcacttgagtcccttcgtccagagtacccagggcgcttacgatcctacgttacctctgcaagatcaggagacagagggcgaagccctgcaggacagcgatgaggaggacgaggaagaagaggaaggcgcggatgaccttgctgtcaagaagaacaaaaagaccgcgtccaacggcatggatgttgacatttcagacgaagatgacgctgactcttttggtgggttttccgaagatgaggatgccggagagggagagaatgacgaagaggtcgatgaagaactacgaaatcagcttgagctggaagcagagctcagtggcaaacctgtcaagcaacccaagaaagacgcccagtcccagaagatagaggcaaggaagaagctagcacagaaagccaaggaggaggcagaagagatcgagcgtgccaagggaatgctgagcaagaagaagaggaagctgtttgagcaaatgcagtacaccaacagcaagaagagcgccgaggatcagaagttgagggaaaagaggagaaagatagagaaacagaaagctcgaggcaaggcttaaaaaggactctagataggcgtaaaggatgcttgataatatcacgaattggtttacactttcaactctcattctgaataacgtagagaacagtataacgctttacagaccggataaacatcctatcgcggtttaaccaaatggttccatcgatttacgcatactacttggctcagtatcacgccgaatgtaaccttgaa

SEQ ID NO: 10891 - DNA, 1278 bp, Muscodor strobelii
  misc_feature: SGI cDNA ID NO. 563478
  misc_feature: Encodes the peptide sequence at SEQ ID NO 10892
atgggccacgataaaatgtcacttcgggatagggctggtctgtacggtgccgccgccgccctccgccttgcactcttcaccttgttcccgcgcctgcctgacctgttgaccgcccgtgtcgaggtttcgacccctgttacaagcttcaagagattgcaagagggattgttcctctacaaccacaacgtctccccctacgacggcggtgtcttccaccaggcacccctcctcctgcccatcttctctctgctcccggacccctcgacataccccttcttcacataccttctgtacatactcgtcgatatagcgagcgcacatgcattataccagatcgcagagtcaggcgaggctgcctcctctaagctgtctagctcggcgcgcaaggacaagcaatggagcggctatgtcgtagccgctatctatcttttcaacccattcacgatcgctacctgcttgggacgacccacaaacgtcttcacgacatgcgccattctacatgctgtggtcaaggctatatccggcaacccctttacctcgatgcttgccatatcgctggcctcgtatctctccatgtacccgattctcctcctcccgccgctggttttacttgcctacgacaggcagcaagatcgcaataaaatatcgtcactgacacctttcgctggactcgctgtctccggtgttgctttgactctctccgcactcttcggcatctcctatctcctgactggctcctgggaattcttcgcatcgacctacggcatccaactcactctcaacgacctgacccccaacattggactctggtggtacttcttcatcgagatgttcgacagcttcagggctttcttcctcggcgtattctggttacacctctcatcctacgtggccggactatcactgcgcatccgctcgcaacctctctccgtcttcaccatcctcctcggcatcttcagtatcttcaagccataccctagtatagccgacatgagcttgtttctcgccgtactgcccttgtttcggcatgtcttccccctcatgcgatacacattcttcgcagcatcaacgatcctctactcggccgttttgggcccggctttctactacctctggatctctgccggtagcggcaatgcgaacttcttctacgcgattacgctggtttacagtatcggccaaagcttattggtcagcgacttgacctttgccgtgctgagagatgagtgggaagtagagagacccgagatggtgggcaaggagattaagcagatgtaa

SEQ ID NO: 10892 - protein, 425 aa, Muscodor strobelii
  misc_feature: SGI Peptide ID NO. 563478
  misc_feature (247)..(421): Pfam Id: PF06728 Pfam Desc: GPI transamidase subunit PIG-U
  misc_feature (1)..(425): NCBI GI: 38567290 Blast Desc: related to cell division control protein CDC91 [Neurospora crassa]
  misc_feature (1)..(425): NCBI GI: 171694862 Blast Desc: protein product [Podospora anserina] gi|170947673|emb|CAP59835.1| protein product [Podospora anserina]
  misc_feature (6)..(425): NCBI GI: 46107622 Blast Desc: FG00694.1 [Gibberella zeae PH-1]
  misc_feature (6)..(425): NCBI GI: 256735464 Blast Desc: [Nectria haematococca mpVI 77-13-4]
  misc_feature (13)..(425): NCBI GI: 145614064 Blast Desc: MGG_01168 [Magnaporthe grisea 70-15] gi|145021042|gb|EDK05171.1| MGG_01168 [Magnaporthe grisea 70-15]
  misc_feature (9)..(425): NCBI GI: 238843245 Blast Desc: GPI transamidase component PIG-U [Microsporum canis CBS 113480]
  misc_feature (9)..(425): NCBI GI: 225679773 Blast Desc: cell division cycle protein [Paracoccidioides brasiliensis Pb03]
  misc_feature (9)..(425): NCBI GI: 169773577 Blast Desc: [Aspergillus oryzae RIB40] gi|83769118|dbj|BAE59255.1| protein product [Aspergillus oryzae]
  misc_feature (9)..(425): NCBI GI: 225556810 Blast Desc: phosphatidylinositol glycan anchor biosynthesis class U protein [Ajellomyces capsulatus G186AR]
  misc_feature (9)..(425): NCBI GI: 261206014 Blast Desc: GPI transamidase component PIG-U [Ajellomyces dermatitidis SLH14081] gi|239592803|gb|EEQ75384.1| GPI transamidase component PIG-U [Ajellomyces dermatitidis SLH14081]
MGHDKMSLRDRAGLYGAAAALRLALFTLFPRLPDLLTARVEVSTPVTSFKRLQEGLFLYNHNVSPYDGGVFHQAPLLLPIFSLLPDPSTYPFFTYLLYILVDIASAHALYQIAESGEAASSKLSSSARKDKQWSGYVVAAIYLFNPFTIATCLGRPTNVFTTCAILHAVVKAISGNPFTSMLAISLASYLSMYPILLLPPLVLLAYDRQQDRNKISSLTPFAGLAVSGVALTLSALFGISYLLTGSWEFFASTYGIQLTLNDLTPNIGLWWYFFIEMFDSFRAFFLGVFWLHLSSYVAGLSLRIRSQPLSVFTILLGIFSIFKPYPSIADMSLFLAVLPLFRHVFPLMRYTFFAASTILYSAVLGPAFYYLWISAGSGNANFFYAITLVYSIGQSLLVSDLTFAVLRDEWEVERPEMVGKEIKQM

SEQ ID NO: 10893 - DNA, 7604 bp, Muscodor strobelii
  misc_feature: SGI EST ID NO. CUFF.25961.0
  misc_feature: Variant of the nucleotide sequence at SEQ ID NO 10891
gttaaaccgtactccatcgtcacatctaagactcgagctggtgtccatcctagtgtgtgacttaggacgtcgtcactgcctgacaactacgatacacactcctttcttctgtctccgacgatggaagcacagtatgggccacgataaaatgtcacttcgggatagggctggtctgtacggtgccgccgccgccctccgccttgcactcttcaccttgttcccgcgcctgcctgacctgttgaccgcccgtgtcgaggtttcgacccctgttacaagcttcaagagattgcaagagggattgttcctctacaaccacaacgtctccccctacgacggcggtgtcttccaccaggcacccctcctcctgcccatcttctctctgctcccggacccctcgacataccccttcttcacataccttctgtacatactcgtcgatatagcgagcgcacatgcattataccagatcgcagagtcaggcgaggctgcctcctctaagctgtctagctcggcgcgcaaggacaagcaatggagcggctatgtcgtagccgctatctatcttttcaacccattcacgatcgctacctgcttgggacgacccacaaacgtcttcacgacatgcgccattctacatgctgtggtcaaggctatatccggcaacccctttacctcgatgcttgccatatcgctggcctcgtatctctccatgtacccgattctcctcctcccgccgctggttttacttgcctacgacaggcagcaagatcgcaataaaatatcgtcactgacacctttcgctggactcgctgtctccggtgttgctttgactctctccgcactcttcggcatctcctatctcctgactggctcctgggaattcttcgcatcgacctacggcatccaactcactctcaacgacctgacccccaacattggactctggtggtacttcttcatcgagatgttcgacagcttcagggctttcttcctcggcgtattctggttacacctctcatcctacgtggccggactatcactgcgcatccgctcgcaacctctctccgtcttcaccatcctcctcggcatcttcagtatcttcaagccataccctagtatagccgacatgagcttgtttctcgccgtactgcccttgtttcggcatgtcttccccctcatgcgatacacattcttcgcagcatcaacgatcctctactcggccgttttgggcccggctttctactacctctggatctctgccggtagcggcaatgcgaacttcttctacgcgattacgctggtttacagtatcggccaaagcttattggtcagcgacttgacctttgccgtgctgagagatgagtgggaagtagagagacccgagatggtgggcaaggagattaagcagatgtaagactagaaaatccattattagactcgaggtgagactttggtagacaggcgcatatgatgcctaatatctatcataaaaatacataaatatcatatcgtcatcaccaaaaatgcgcttccatctcacgaccatcagattgggagaaagggaagtatcaaaacaacgtaatatcgtgcatagaggtatctaatcataaggatcatgcccaaaaacgcccatgctcatggattctaaccagtgtcacatcccacgtcgtcccgatccctttgtacatatcatacccaacccaagacgctagctcccctagctccaagcctaaaaaccagccacacccacaatcaacgactacccacctcagaaatcaacccgatgcagtgatctcaacctcgtgttttgaatctgcacgcgaatgggtggacgaaggcacagcgggatcatccatcggcgtccccgtaaaactagttttcggggctgtcttcggcctctcgctctgaactaatgtgatatcggtcttgatctcgatgtagttcctcctttccctcctctcaaagtacgtcgatgtgttgccgctctgtatcttcctgagattcgccttcgataacctggtcagagggtactgcgatgtgagacccgtggtgttcgcagacattagattggattgcagagatcgcaggaacggccagaagtacaagatgcaggccgagactagggagaggaagagcacgagttggagcgttatgtagtaggggaatgcggtaaggaggtaatttggagcagagagaaggggtatgtaggtggtgaggaggattgtgagggctaacacggacagccggaagaggtagaaggatgttacggtgattcgtagcttgaggcccatttgtaaggggaggatgataattagaggaagaaggacgaggaggaagtctgtgatgataccggtgattgttatgtatcggaggaatggggtcttagggatgcaggatgcgtcgctgtcccaaggcccgtgagcgccgcattggaaggcggtcaggaggaaggaggagagtgtccagaggctggaggatatggacaggatgtgtgagatgcggtggtggatttggtcgggcgagagggcgcggagagattcgcaggttgagagcttggagaagcctagggagaggatgaggaggaggtcgcgagcataggcgatctggacaacattgttagagtgtgttcttgagcttgaatgatttttgtgttgaaattgtttgagatgccttaccttcccagctgctacgatctgactatctgataaatcagccatgtctctgccaaacgccgatgcaccgggcatgagaactgctattgattctccaagcatgaacagctagcatctcgttcttagctaagtcgcaaacagtgaatcatagcggaacctacgtatgtagccaacatcaaagcatcttccaccaccaacggcgcccgaactttgatataaaacttcgtcacgaccctgaagccagccacaagcgtcgctagtgcgagcagaagccatattacgacttggattacgggactctggttcgtggccgtgacgacgataccgccaccgcccatatcgtctgaggcgcgcggcatggcgaccgccatttctttagtggctcaccagtccacgatgcgagggagtgccacagaacgggtggaagccgttattttgtgttgggttaaagaggtatggtatgggtacgataccggtaagatgggatggtggatgatgacggatgagatgaggtgtaatcccgaagatggccggtttacggctcatgcaatcaatcaaacatgggatagacgaaaatctacgatcgttcaaattgcgcaagaaaccttgatagatagatagatagatagatagatagatagatagtagcaagccgtttctactgggttgtatatcgatcttcctcttgcttccaaataacattctttcatcgccttatacaaagcgtcgacatgagaacgtggaacacgcctacggtacggctgttacccgctaatactagaatactcctaatctgccctatctctcaccacgccatctagttgtgcgcgctgaaagagaaaagatagaagcgccatgcgaggaacacatgatttccgttcctgtcaggacaggtgtgccttggcctcggattccgaggattgttgcaccacagaagtgcatcgataaaagatgccgcggaaaccaatagatggtagtccttagcgaaaagagagggaacagaatttctaggcatttcacagacaggggaaacgctgtgggagcgtagcatgaccttgctcaccgttttggacatgccatttgaggatttggagacaagagtggctgtgggagaaatactacgggaactacatgtaccgatgctgagctgtaggtacaagcttggttggtggtggtgggttatgtatgtaaggtagataggctatcaagaaagtctagtcgtctgccccctctgcctaagtcgtcaaatacagaatcacggaccttcggcaacgtcagggaatagatcatatcacgtacgtacggaacacaccatggttaacaatcccccaatatgcccgcccgtcaatgtaaccctgctccctggtcccgcagacgatactcctgccctccacagcggactggctctttttcagcggagctgatatgcattgcttatttcgattatgtataatgccggactcgcccaagactttctctgaccttttcggtgcaaccctcttcatcagcttccgcttgcagcgtgttctgcgagagatctacgattcgttcattggatcgtttccgaccggtttttgacgtgttttggttgtcagagtaaatcggtgggtacagttgaaatttgtacccgtaataccacttgtggtcgtcagcttttacgtgagtcccttgattcgggcaatgaattcttcaagtaccattgatccacggttgatatacagtgcttatggcttttcccattaaagacttggcacctcgtcctgctgagctatttcatcctaaatattggggtcgaaggggtttgaaggggtgcggtcttgagcattgattcgctggatttcatgaatgtagtagtgcgacgagacatcttctaatgctacggttgcaagaggatttagcaaggtgcctgcagcgatgggctggtggaccgttgaacacgtgcacgcagcaagatcatctgagctacaacagatagtagagaatggtatgtacattgaacatcatcgatctaaagttctttgataggacctttgaaatgacgccgagcatacacgccgtaccagatgagactgaataatacgacgctgccgtagacgagaacactccagtttaccgactctggctttgggtgattgacagacggccagaaggaccaaaatagtacgaatgcagtgtatatgatggcgaagccgttgttgatgacaccaaatggctcaggtactttccatgggccccagttcagatcatctgagtcataatctgaccctgccacaaagggcttgacgactcccctcgttctgtgccagaataggagactacaaacaattaggtacgacgagtaaagcgcagcaactagaagtgagagcagtgccgataggactacagtagatccgaggacaatcagcgagagaagtgttgtgaacaccatcgttgtgatgatagcatagacgggaagtgagttccggttaagcttggcatctgtgtgtcagcacacgccaagtatagtgggaggttgtagtgagctaccttgactagtgtgctgtcgaatggcagacccctatcgcgtgcgaaggaccagatcattcgtgaagcggaagcataggcgctgatactgcttgcgagtgaaatgacgaggatgataccggcgactatgaggtttcaagtaagcaactattatcggatcatcatgagttatttggtgttactcacggaggctagctccgactgctgatctgagcgcagagctgaagatgtagaggaaagggtagtataaggtatcggatgccttgatagccgcgtccgggtcggtcgtacagaacaggaccgcaatgaccatagcgaaagcaagcgacccgttgataaagatagtgtagagcagagattgaggtactacaatgttagctgatcgaacttcttctgacatatgtacagcgcagtctgctcctgttagggtactagctactgtcggaagacctatcagaaaagctaaaccttgtgatgaccattggcccacgttgtagaatgcagaaaagacttcagaggcagagttgtgtggcgcgaaatatacaagtggaatgagaacaccgaagaatccggcgagatgcagtaggaggaagagacgctctagagtagctagtatgcgtcccgtagttgagttgattagcactgagaatagagctacagccagcataatcaggacagtacgccacgcttcgggcgtgtagcttggtctcgacagcacaacgatgccctgaatgagagttgcgatcgagaagctggtcgtaatgctaatagcctgccaggccaatacggtcaaccaagccgtcatgtatgcaagaaagtttgcccatttctcaggagacatcatagccacccaatgatcttagtttggtgttagcaattaaccgagatgaatatcaggaagagaagaggcttgcttacattgtccaccagctgttggcgccatcgacgataactcggcaatcacggcatatacagatgtcatcccaatccagccgatcaagaacgcccaaacgactccggccgggccgacggtgataaaggtcgacgttgaggtgattaaaattccttcccaagagactagaatggaacatgatagcccaaggctagacatgaagccaaaactgcgattgagcagtggtcgctttccgaggcgcctgagagcatcgtcatcctgcgttgcttgtgctgattgatgtggttccgtaggtgttggcgcaagagtgtctgattttgctccgacctccgtcatttcgaccccgttctccatgattgtcatcgtaatgttgagttaaagagatcagaagatgacgtgccgcacaaatagatgtgcgaactcggcgaatgaattgtagatctaagcttcgcgatgtctcaagagcaacgtaacagatgccttggtttgtggatgttcgaagcaaagtcctacttaaggacactggaaattgtatttatcagaaacgtagttctatagaagcgcgattctgtagaccccttcgcaattggagaggtacgtgggtagcggttgcccttcacgttcagctgtacccagggttgactagaattgttgaaaagatacagggtctagttgaactgtggctttttggggcggaaagtttacatggatagaagctgtgcgtcatccagctgcgggagaggaacgtctacacgtggtatttttgttcttgcacaattagatacatggcgtctagagtaggtagccggcgccacgcagaagggggttcacattcagccctccgtatctactacataaacatatatacccctgagcctgtatttggcgacctgtaaggctggctcgatgcatcagaatattgaaagtgccatgcaggcatgtatcagaacttgttttcggagcctcaccaatttcgacatcgaatgagctggggttgatcaagtcttgatcgcgcgggtagcagtattgactatgcctccttctttgaccaccgagctcatgataaaccggacacaactcgagatgtcagcaaggaagcagtacgactgacagacccacgttttggcgatgatcgagatatcagctatcgctctctaaccgagctacccaggcgataggcggcgtggtagattctgaactcgctctgtatagtccaccttgagccttatgcagtaagctgcatacaatgatactatgatgtgtctctgcagtggctgcgatgcctcgatgcctccttgggcctacatatagttattcgaaacaatcagaagtgataagggtctagacgtctccaaatgcaaccttctccaacaagtaaccgtttctgccacagcttccagggcttcacctcaaagcataattgacccgtcttacatgcatatgctttcacataccggaaaacagcgccttcacagggaaggactcgatgtgtgccgact

SEQ ID NO: 10894 - DNA, 1263 bp, Muscodor strobelii
  misc_feature: SGI cDNA ID NO. 563479
  misc_feature: Encodes the peptide sequence at SEQ ID NO 10895
atgtcacttcgggatagggctggtctgtacggtgccgccgccgccctccgccttgcactcttcaccttgttcccgcgcctgcctgacctgttgaccgcccgtgtcgaggtttcgacccctgttacaagcttcaagagattgcaagagggattgttcctctacaaccacaacgtctccccctacgacggcggtgtcttccaccaggcacccctcctcctgcccatcttctctctgctcccggacccctcgacataccccttcttcacataccttctgtacatactcgtcgatatagcgagcgcacatgcattataccagatcgcagagtcaggcgaggctgcctcctctaagctgtctagctcggcgcgcaaggacaagcaatggagcggctatgtcgtagccgctatctatcttttcaacccattcacgatcgctacctgcttgggacgacccacaaacgtcttcacgacatgcgccattctacatgctgtggtcaaggctatatccggcaacccctttacctcgatgcttgccatatcgctggcctcgtatctctccatgtacccgattctcctcctcccgccgctggttttacttgcctacgacaggcagcaagatcgcaataaaatatcgtcactgacacctttcgctggactcgctgtctccggtgttgctttgactctctccgcactcttcggcatctcctatctcctgactggctcctgggaattcttcgcatcgacctacggcatccaactcactctcaacgacctgacccccaacattggactctggtggtacttcttcatcgagatgttcgacagcttcagggctttcttcctcggcgtattctggttacacctctcatcctacgtggccggactatcactgcgcatccgctcgcaacctctctccgtcttcaccatcctcctcggcatcttcagtatcttcaagccataccctagtatagccgacatgagcttgtttctcgccgtactgcccttgtttcggcatgtcttccccctcatgcgatacacattcttcgcagcatcaacgatcctctactcggccgttttgggcccggctttctactacctctggatctctgccggtagcggcaatgcgaacttcttctacgcgattacgctggtttacagtatcggccaaagcttattggtcagcgacttgacctttgccgtgctgagagatgagtgggaagtagagagacccgagatggtgggcaaggagattaagcagatgtaa

SEQ ID NO: 10895 - protein, 420 aa, Muscodor strobelii
  misc_feature: SGI Peptide ID NO. 563479
  misc_feature (242)..(416): Pfam Id: PF06728 Pfam Desc: GPI transamidase subunit PIG-U
  misc_feature (1)..(420): NCBI GI: 38567290 Blast Desc: related to cell division control protein CDC91 [Neurospora crassa]
  misc_feature (1)..(420): NCBI GI: 46107622 Blast Desc: FG00694.1 [Gibberella zeae PH-1]
  misc_feature (7)..(420): NCBI GI: 171694862 Blast Desc: protein product [Podospora anserina] gi|170947673|emb|CAP59835.1| protein product [Podospora anserina]
  misc_feature (1)..(420): NCBI GI: 256735464 Blast Desc: [Nectria haematococca mpVI 77-13-4]
  misc_feature (8)..(420): NCBI GI: 145614064 Blast Desc: MGG_01168 [Magnaporthe grisea 70-15] gi|145021042|gb|EDK05171.1| MGG_01168 [Magnaporthe grisea 70-15]
  misc_feature (4)..(420): NCBI GI: 238843245 Blast Desc: GPI transamidase component PIG-U [Microsporum canis CBS 113480]
  misc_feature (4)..(420): NCBI GI: 225679773 Blast Desc: cell division cycle protein [Paracoccidioides brasiliensis Pb03]
  misc_feature (4)..(420): NCBI GI: 169773577 Blast Desc: [Aspergillus oryzae RIB40] gi|83769118|dbj|BAE59255.1| protein product [Aspergillus oryzae]
  misc_feature (4)..(420): NCBI GI: 225556810 Blast Desc: phosphatidylinositol glycan anchor biosynthesis class U protein [Ajellomyces capsulatus G186AR]
  misc_feature (4)..(420): NCBI GI: 261206014 Blast Desc: GPI transamidase component PIG-U [Ajellomyces dermatitidis SLH14081] gi|239592803|gb|EEQ75384.1| GPI transamidase component PIG-U [Ajellomyces dermatitidis SLH14081]
MSLRDRAGLYGAAAALRLALFTLFPRLPDLLTARVEVSTPVTSFKRLQEGLFLYNHNVSPYDGGVFHQAPLLLPIFSLLPDPSTYPFFTYLLYILVDIASAHALYQIAESGEAASSKLSSSARKDKQWSGYVVAAIYLFNPFTIATCLGRPTNVFTTCAILHAVVKAISGNPFTSMLAISLASYLSMYPILLLPPLVLLAYDRQQDRNKISSLTPFAGLAVSGVALTLSALFGISYLLTGSWEFFASTYGIQLTLNDLTPNIGLWWYFFIEMFDSFRAFFLGVFWLHLSSYVAGLSLRIRSQPLSVFTILLGIFSIFKPYPSIADMSLFLAVLPLFRHVFPLMRYTFFAASTILYSAVLGPAFYYLWISAGSGNANFFYAITLVYSIGQSLLVSDLTFAVLRDEWEVERPEMVGKEIKQM

SEQ ID NO: 10896 - DNA, 7604 bp, Muscodor strobelii; identical to SEQ ID NO: 10893
  misc_feature: SGI EST ID NO. CUFF.25961.0
  misc_feature: Variant of the nucleotide sequence at SEQ ID NO 10894

SEQ ID NO: 10897 - DNA, 1131 bp, Muscodor strobelii
  misc_feature: SGI cDNA ID NO. 563480
  misc_feature: Encodes the peptide sequence at SEQ ID NO 10898
atgccgcgcgcctcagacgatatgggcggtggcggtatcgtcgtcacggccacgaaccagagtcccgtaatccaagtcgtaatatggcttctgctcgcactagcgacgcttgtggctggcttcagggtcgtgacgaagttttatatcaaagttcgggcgccgttggtggtggaagatgctttgatgttggctacatacctgttcatgcttggagaatcaatagcagttctcatgcccggtgcatcggcgtttggcagagacatggctgatttatcagatagtcagatcgtagcagctgggaagatcgcctatgctcgcgacctcctcctcatcctctccctaggcttctccaagctctcaacctgcgaatctctccgcgccctctcgcccgaccaaatccaccaccgcatctcacacatcctgtccatatcctccagcctctggacactctcctccttcctcctgaccgccttccaatgcggcgctcacgggccttgggacagcgacgcatcctgcatccctaagaccccattcctccgatacataacaatcaccggtatcatcacagacttcctcctcgtccttcttcctctaattatcatcctccccttacaaatgggcctcaagctacgaatcaccgtaacatccttctacctcttccggctgtccgtgttagccctcacaatcctcctcaccacctacataccccttctctctgctccaaattacctccttaccgcattcccctactacataacgctccaactcgtgctcttcctctccctagtctcggcctgcatcttgtacttctggccgttcctgcgatctctgcaatccaatctaatgtctgcgaacaccacgggtctcacatcgcagtaccctctgaccaggttatcgaaggcgaatctcaggaagatacagagcggcaacacatcgacgtactttgagaggagggaaaggaggaactacatcgagatcaagaccgatatcacattagttcagagcgagaggccgaagacagccccgaaaactagttttacggggacgccgatggatgatcccgctgtgccttcgtccacccattcgcgtgcagattcaaaacacgaggttgagatcactgcatcgggttga

SEQ ID NO: 10898 - protein, 376 aa, Muscodor strobelii
  misc_feature: SGI Peptide ID NO. 563480
  misc_feature (20)..(286): NCBI GI: 212540778 Blast Desc: PMAA_057240 [Penicillium marneffei ATCC 18224] gi|210067843|gb|EEA21935.1| PMAA_057240 [Penicillium marneffei ATCC 18224]
  misc_feature (22)..(293): NCBI GI: 212531441 Blast Desc: conserved [Penicillium marneffei ATCC 18224] gi|210071241|gb|EEA25330.1| conserved [Penicillium marneffei ATCC 18224]
  misc_feature (24)..(322): NCBI GI: 242800720 Blast Desc: conserved [Talaromyces stipitatus ATCC 10500] gi|218716990|gb|EED16411.1| conserved [Talaromyces stipitatus ATCC 10500]
  misc_feature (22)..(338): NCBI GI: 242796225 Blast Desc: conserved [Talaromyces stipitatus ATCC 10500] gi|218719342|gb|EED18762.1| conserved [Talaromyces stipitatus ATCC 10500]
  misc_feature (14)..(280): NCBI GI: 256720571 Blast Desc: NECHADRAFT_55806 [Nectria haematococca mpVI 77-13-4]
  misc_feature (14)..(279): NCBI GI: 256728318 Blast Desc: NECHADRAFT_97744 [Nectria haematococca mpVI 77-13-4]
  misc_feature (15)..(322): NCBI GI: 145233421 Blast Desc: An02g09530 [Aspergillus niger] gi|134057014|emb|CAK37823.1| protein product [Aspergillus niger]
  misc_feature (14)..(283): NCBI GI: 238846087 Blast Desc: MCYG_08568 [Microsporum canis CBS 113480]
  misc_feature (14)..(285): NCBI GI: 240107899 Blast Desc: CPC735_002400 [Coccidioides posadasii C735 delta SOWgp]
  misc_feature (52)..(316): NCBI GI: 145251834 Blast Desc: An16g01170 [Aspergillus niger] gi|134082970|emb|CAK42734.1| protein product [Aspergillus niger]
MPRASDDMGGGGIVVTATNQSPVIQVVIWLLLALATLVAGFRVVTKFYIKVRAPLVVEDALMLATYLFMLGESIAVLMPGASAFGRDMADLSDSQIVAAGKIAYARDLLLILSLGFSKLSTCESLRALSPDQIHHRISHILSISSSLWTLSSFLLTAFQCGAHGPWDSDASCIPKTPFLRYITITGIITDFLLVLLPLIIILPLQMGLKLRITVTSFYLFRLSVLALTILLTTYIPLLSAPNYLLTAFPYYITLQLVLFLSLVSACILYFWPFLRSLQSNLMSANTTGLTSQYPLTRLSKANLRKIQSGNTSTYFERRERRNYIEIKTDITLVQSERPKTAPKTSFTGTPMDDPAVPSSTHSRADSKHEVEITASG

SEQ ID NO: 10899 - DNA, 7422 bp, Muscodor strobelii
  misc_feature: SGI EST ID NO. CUFF.25962.1
  misc_feature: Variant of the nucleotide sequence at SEQ ID NO 10897
agtcggcacacatcgagtccttccctgtgaaggcgctgttttccggtatgtgaaagcatatgcatgtaagacgggtcaattatgctttgaggtgaagccctggaagctgtggcagaaacggttacttgttggagaaggttgcatttggagacgtctagacccttatcacttctgattgtttcgaataactatatgtaggcccaaggaggcatcgaggcatcgcagccactgcagagacacatcatagtatcattgtatgcagcttactgcataaggctcaaggtggactatacagagcgagttcagaatctaccacgccgcctatcgcctgggtagctcggttagagagcgatagctgatatctcgatcatcgccaaaacgtgggtctgtcagtcgtactgcttccttgctgacatctcgagttgtgtccggtttatcatgagctcggtggtcaaagaaggaggcatagtcaatactgctacccgcgcgatcaagacttgatcaaccccagctcattcgatgtcgaaattggtgaggctccgaaaacaagttctgatacatgcctgcatggcactttcaatattctgatgcatcgagccagccttacaggtcgccaaatacaggctcaggggtatatatgtttatgtagtagatacggagggctgaatgtgaacccccttctgcgtggcgccggctacctactctagacgccatgtatctaattgtgcaagaacaaaaataccacgtgtagacgttcctctcccgcagctggatgacgcacagcttctatccatgtaaactttccgccccaaaaagccacagttcaactagaccctgtatcttttcaacaattctagtcaaccctgggtacagctgaacgtgaagggcaaccgctacccacgtacctctccaattgcgaaggggtctacagaatcgcgcttctatagaactacgtttctgataaatacaatttccagtgtccttaagtaggactttgcttcgaacatccacaaaccaaggcatctgttacgttgctcttgagacatcgcgaagcttagatctacaattcattcgccgagttcgcacatctatttgtgcggcacgtcatcttctgatctctttaactcaacattacgatgacaatcatggagaacggggtcgaaatgacggaggtcggagcaaaatcagacactcttgcgccaacacctacggaaccacatcaatcagcacaagcaacgcaggatgacgatgctctcaggcgcctcggaaagcgaccactgctcaatcgcagttttggcttcatgtctagccttgggctatcatgttccattctagtctcttgggaaggaattttaatcacctcaacgtcgacctttatcaccgtcggcccggccggagtcgtttgggcgttcttgatcggctggattgggatgacatctgtatatgccgtgattgccgagttatcgtcgatggcgccaacagctggtggacaatatcattgggtggctatgatgtctcctgagaaatgggcaaactttcttgcatacatgacggcttggttgaccgtattggcctggcaggctattagcattacgaccagcttctcgatcgcaactctcattcagggcatcgttgtgctgtcgagaccaagctacacgcccgaagcgtggcgtactgtcctgattatgctggctgtagctctattctcagtgctaatcaactcaactacgggacgcatactagctactctagagcgtctcttcctcctactgcatctcgccggattcttcggtgttctcattccacttgtatatttcgcgccacacaactctgcctctgaagtcttttctgcattctacaacgtgggccaatggtcatcacaaggtttagcttttctgataggtcttccgacagtagctagtaccctaacaggagcagactgcgctgtacatatgtcagaagaagttcgatcagctaacattgtagtacctcaatctctgctctacactatctttatcaacgggtcgcttgctttcgctatggtcattgcggtcctgttctgtacgaccgacccggacgcggctatcaaggcatccgataccttatactaccctttcctctacatcttcagctctgcgctcagatcagcagtcggagctagcctcctcgccggtatcatcctcgtcatttcactcgcaagcagtatcagcgcctatgcttccgcttcacgaatgatctggtccttcgcacgcgataggggtctgccattcgacagcacactagtcaagcttaaccggaactcacttcccgtctatgctatcatcacaacgatggtgttcacaacacttctctcgctgattgtcctcggatctactgtagtcctatcggcactgctctcacttctagttgctgcgctttactcgtcgtacctaattgtttgtagtctcctattctggcacagaacgaggggagtcgtcaagccctttgtggcagggtcagattatgactcagatgatctgaactggggcccatggaaagtacctgagccatttggtgtcatcaacaacggcttcgccatcatatacactgcattcgtactattttggtccttctggccgtctgtcaatcacccaaagccagagtcggtaaactggagtgttctcgtctacggcagcgtcgtattattcagtctcatctggtacggcgtgtatgctcggcgtcatttcaaaggtcctatcaaagaactttagatcgatgatgttcaatgtacataccattctctactatctgttgtagctcagatgatcttgctgcgtgcacgtgttcaacggtccaccagcccatcgctgcaggcaccttgctaaatcctcttgcaaccgtagcattagaagatgtctcgtcgcactactacattcatgaaatccagcgaatcaatgctcaagaccgcaccccttcaaaccccttcgaccccaatatttaggatgaaatagctcagcaggacgaggtgccaagtctttaatgggaaaagccataagcactgtatatcaaccgtggatcaatggtacttgaagaattcattgcccgaatcaagggactcacgtaaaagctgacgaccacaagtggtattacgggtacaaatttcaactgtacccaccgatttactctgacaaccaaaacacgtcaaaaaccggtcggaaacgatccaatgaacgaatcgtagatctctcgcagaacacgctgcaagcggaagctgatgaagagggttgcaccgaaaaggtcagagaaagtcttgggcgagtccggcattatacataatcgaaataagcaatgcatatcagctccgctgaaaaagagccagtccgctgtggagggcaggagtatcgtctgcgggaccagggagcagggttacattgacgggcgggcatattgggggattgttaaccatggtgtgttccgtacgtacgtgatatgatctattccctgacgttgccgaaggtccgtgattctgtatttgacgacttaggcagagggggcagacgactagactttcttgatagcctatctaccttacatacataacccaccaccaccaaccaagcttgtacctacagctcagcatcggtacatgtagttcccgtagtatttctcccacagccactcttgtctccaaatcctcaaatggcatgtccaaaacggtgagcaaggtcatgctacgctcccacagcgtttcccctgtctgtgaaatgcctagaaattctgttccctctcttttcgctaaggactaccatctattggtttccgcggcatcttttatcgatgcacttctgtggtgcaacaatcctcggaatccgaggccaaggcacacctgtcctgacaggaacggaaatcatgtgttcctcgcatggcgcttctatcttttctctttcagcgcgcacaactagatggcgtggtgagagatagggcagattaggagtattctagtattagcgggtaacagccgtaccgtaggcgtgttccacgttctcatgtcgacgctttgtataaggcgatgaaagaatgttatttggaagcaagaggaagatcgatatacaacccagtagaaacggcttgctactatctatctatctatctatctatctatctatctatcaaggtttcttgcgcaatttgaacgatcgtagattttcgtctatcccatgtttgattgattgcatgagccgtaaaccggccatcttcgggattacacctcatctcatccgtcatcatccaccatcccatcttaccggtatcgtacccataccatacctctttaacccaacacaaaataacggcttccacccgttctgtggcactccctcgcatcgtggactggtgagccactaaagaaatggcggtcgccatgccgcgcgcctcagacgatatgggcggtggcggtatcgtcgtcacggccacgaaccagagtcccgtaatccaagtcgtaatatggcttctgctcgcactagcgacgcttgtggctggcttcagggtcgtgacgaagttttatatcaaagttcgggcgccgttggtggtggaagatgctttgatgttggctacatacctgttcatgcttggagaatcaatagcagttctcatgcccggtgcatcggcgtttggcagagacatggctgatttatcagatagtcagatcgtagcagctgggaagatcgcctatgctcgcgacctcctcctcatcctctccctaggcttctccaagctctcaacctgcgaatctctccgcgccctctcgcccgaccaaatccaccaccgcatctcacacatcctgtccatatcctccagcctctggacactctcctccttcctcctgaccgccttccaatgcggcgctcacgggccttgggacagcgacgcatcctgcatccctaagaccccattcctccgatacataacaatcaccggtatcatcacagacttcctcctcgtccttcttcctctaattatcatcctccccttacaaatgggcctcaagctacgaatcaccgtaacatccttctacctcttccggctgtccgtgttagccctcacaatcctcctcaccacctacataccccttctctctgctccaaattacctccttaccgcattcccctactacataacgctccaactcgtgctcttcctctccctagtctcggcctgcatcttgtacttctggccgttcctgcgatctctgcaatccaatctaatgtctgcgaacaccacgggtctcacatcgcagtaccctctgaccaggttatcgaaggcgaatctcaggaagatacagagcggcaacacatcgacgtactttgagaggagggaaaggaggaactacatcgagatcaagaccgatatcacattagttcagagcgagaggccgaagacagccccgaaaactagttttacggggacgccgatggatgatcccgctgtgccttcgtccacccattcgcgtgcagattcaaaacacgaggttgagatcactgcatcgggttgatttctgaggtgggtagtcgttgattgtgggtgtggctggtttttaggcttggagctaggggagctagcgtcttgggttgggtatgatatgtacaaagggatcgggacgacgtgggatgtgacactggttagaatccatgagcatgggcgtttttgggcatgatccttatgattagatacctctatgcacgatattacgttgttttgatacttccctttctcccaatctgatggtcgtgagatggaagcgcatttttggtgatgacgatatgatatttatgtatttttatgatagatattaggcatcatatgcgcctgtctaccaaagtctcacctcgagtctaataatggattttctagtcttacatctgcttaatctccttgcccaccatctcgggtctctctacttcccactcatctctcagcacggcaaaggtcaagtcgctgaccaataagctttggccgatactgtaaaccagcgtaatcgcgtagaagaagttcgcattgccgctaccggcagagatccagaggtagtagaaagccgggcccaaaacggccgagtagaggatcgttgatgctgcgaagaatgtgtatcgcatgagggggaagacatgccgaaacaagggcagtacggcgagaaacaagctcatgtcggctatactagggtatggcttgaagatactgaagatgccgaggaggatggtgaagacggagagaggttgcgagcggatgcgcagtgatagtccggccacgtaggatgagaggtgtaaccagaatacgccgaggaagaaagccctgaagctgtcgaacatctcgatgaagaagtaccaccagagtccaatgttgggggtcaggtcgttgagagtgagttggatgccgtaggtcgatgcgaagaattcccaggagccagtcaggagataggagatgccgaagagtgcggagagagtcaaagcaacaccggagacagcgagtccagcgaaaggtgtcagtgacgatattttattgcgatcttgctgcctgtcgtaggcaagtaaaaccagcggcgggaggaggagaatcgggtacatggagagatacgaggccagcgatatggcaagcatcgaggtaaaggggttgccggatatagccttgaccacagcatgtagaatggcgcatgtcgtgaagacgtttgtgggtcgtcccaagcaggtagcgatcgtgaatgggttgaaaagatagctaccatctgtcagtgaatactggagcaagtacgagacgatgagactcacatagcggctacgacatagccgctccattgcttgtccttgcgcgccgagctagacagcttagaggaggcagcctcgcctgactctgcgatctggtataatgcatgtgcgctcgctatatcgacgagtatgtacagaaggtatgtgaagaaggggtatgtcgaggggtccgggagcagagagaagatgggcaggaggaggggtgcctggtggaagacaccgccgtcgtagggggagacgttgtggttgtagaggaacaatccctcttgcactgcgcaggggcggatgtcagcaaagtccagagtcgttttcagcttcagcaaagaccgggaccaacacacatctcttgaagcttgtaacaggggtcgaaacctcgacacgggcggtcaacaggtcaggcaggcgcgggaacaaggtgaagagtgcaaggcggagggcggcggcggcaccgtacagaccagccctatcccgaagtgacattttatcgtggcccatactgtgcttccatcgtcggagacagaagaaaggagtgtgtatcgtagttgtcaggcagtgacgacgtcctaagtcacacactaggatggacaccagctcgagtcttagatgtgacgatggagtacggtttaac

SEQ ID NO: 10900 - DNA, 1614 bp, Muscodor strobelii
  misc_feature: SGI cDNA ID NO. 563481
  misc_feature: Encodes the peptide sequence at SEQ ID NO 10901
atgacaatcatggagaacggggtcgaaatgacggaggtcggagcaaaatcagacactcttgcgccaacacctacggaaccacatcaatcagcacaagcaacgcaggatgacgatgctctcaggcgcctcggaaagcgaccactgctcaatcgcagttttggcttcatgtctagccttgggctatcatgttccattctagtctcttgggaaggaattttaatcacctcaacgtcgacctttatcaccgtcggcccggccggagtcgtttgggcgttcttgatcggctggattgggatgacatctgtatatgccgtgattgccgagttatcgtcgatggcgccaacagctggtggacaatatcattgggtggctatgatgtctcctgagaaatgggcaaactttcttgcatacatgacggcttggttgaccgtattggcctggcaggctattagcattacgaccagcttctcgatcgcaactctcattcagggcatcgttgtgctgtcgagaccaagctacacgcccgaagcgtggcgtactgtcctgattatgctggctgtagctctattctcagtgctaatcaactcaactacgggacgcatactagctactctagagcgtctcttcctcctactgcatctcgccggattcttcggtgttctcattccacttgtatatttcgcgccacacaactctgcctctgaagtcttttctgcattctacaacgtgggccaatggtcatcacaaggtttagcttttctgataggtcttccgacagtagctagtaccctaacaggagcagactgcgctgtacatatgtcagaagaagttcgatcagctaacattgtagtacctcaatctctgctctacactatctttatcaacgggtcgcttgctttcgctatggtcattgcggtcctgttctgtacgaccgacccggacgcggctatcaaggcatccgataccttatactaccctttcctctacatcttcagctctgcgctcagatcagcagtcggagctagcctcctcgccggtatcatcctcgtcatttcactcgcaagcagtatcagcgcctatgcttccgcttcacgaatgatctggtccttcgcacgcgataggggtctgccattcgacagcacactagtcaagcttaaccggaactcacttcccgtctatgctatcatcacaacgatggtgttcacaacacttctctcgctgattgtcctcggatctactgtagtcctatcggcactgctctcacttctagttgctgcgctttactcgtcgtacctaattgtttgtagtctcctattctggcacagaacgaggggagtcgtcaagccctttgtggcagggtcagattatgactcagatgatctgaactggggcccatggaaagtacctgagccatttggtgtcatcaacaacggcttcgccatcatatacactgcattcgtactattttggtccttctggccgtctgtcaatcacccaaagccagagtcggtaaactggagtgttctcgtctacggcagcgtcgtattattcagtctcatctggtacggcgtgtatgctcggcgtcatttcaaaggtcctatcaaagaactttag

SEQ ID NO: 10901 - protein, 537 aa, Muscodor strobelii
  misc_feature: SGI Peptide ID NO. 563481
  misc_feature (54)..(537): Pfam Id: PF00324 Pfam Desc: Amino acid permease
  misc_feature (23)..(537): NCBI GI: 115492221 Blast Desc: conserved [Aspergillus terreus NIH2624] gi|114197598|gb|EAU39298.1| conserved [Aspergillus terreus NIH2624]
  misc_feature (29)..(537): NCBI GI: 256720570 Blast Desc: [Nectria haematococca mpVI 77-13-4]
  misc_feature (17)..(536): NCBI GI: 256728317 Blast Desc: NECHADRAFT_73000 [Nectria haematococca mpVI 77-13-4]
  misc_feature (24)..(537): NCBI GI: 238484007 Blast Desc: GABA permease, [Aspergillus flavus NRRL3357] gi|220701292|gb|EED57630.1| GABA permease, [Aspergillus flavus NRRL3357]
  misc_feature (13)..(536): NCBI GI: 46127687 Blast Desc: FG08221.1 [Gibberella zeae PH-1]
  misc_feature (1)..(537): NCBI GI: 256730185 Blast Desc: NECHADRAFT_70714 [Nectria haematococca mpVI 77-13-4]
  misc_feature (26)..(536): NCBI GI: 255953911 Blast Desc: Pc21g06640 [Penicillium chrysogenum Wisconsin 54-1255] gi|211589419|emb|CAP95561.1| Pc21g06640 [Penicillium chrysogenum Wisconsin 54-1255]
  misc_feature (35)..(537): NCBI GI: 115437358 Blast Desc: conserved [Aspergillus terreus NIH2624] gi|114188605|gb|EAU30305.1| conserved [Aspergillus terreus NIH2624]
  misc_feature (23)..(537): NCBI GI: 121714214 Blast Desc: amino acid permease, [Aspergillus clavatus NRRL 1] gi|119402871|gb|EAW13292.1| amino acid permease, [Aspergillus clavatus NRRL 1]
  misc_feature (12)..(536): NCBI GI: 240107898 Blast Desc: choline transport protein, [Coccidioides posadasii C735 delta SOWgp]
MTIMENGVEMTEVGAKSDTLAPTPTEPHQSAQATQDDDALRRLGKRPLLNRSFGFMSSLGLSCSILVSWEGILITSTSTFITVGPAGVVWAFLIGWIGMTSVYAVIAELSSMAPTAGGQYHWVAMMSPEKWANFLAYMTAWLTVLAWQAISITTSFSIATLIQGIVVLSRPSYTPEAWRTVLIMLAVALFSVLINSTTGRILATLERLFLLLHLAGFFGVLIPLVYFAPHNSASEVFSAFYNVGQWSSQGLAFLIGLPTVASTLTGADCAVHMSEEVRSANIVVPQSLLYTIFINGSLAFAMVIAVLFCTTDPDAAIKASDTLYYPFLYIFSSALRSAVGASLLAGIILVISLASSISAYASASRMIWSFARDRGLPFDSTLVKLNRNSLPVYAIITTMVFTTLLSLIVLGSTVVLSALLSLLVAALYSSYLIVCSLLFWHRTRGVVKPFVAGSDYDSDDLNWGPWKVPEPFGVINNGFAIIYTAFVLFWSFWPSVNHPKPESVNWSVLVYGSVVLFSLIWYGVYARRHFKGPIKEL

SEQ ID NO: 10902 - DNA, 7422 bp, Muscodor strobelii; identical to SEQ ID NO: 10899
  misc_feature: SGI EST ID NO. CUFF.25962.1
  misc_feature: Variant of the nucleotide sequence at SEQ ID NO 10900

SEQ ID NO: 10903 - DNA, 585 bp, Muscodor strobelii
  misc_feature: SGI cDNA ID NO. 563482
  misc_feature: Elevated expression when VOC is produced
  misc_feature: Encodes the peptide sequence at SEQ ID NO 10904
atggtacacaagacagctttggtgggactctttggcctcattcgccttggatgggctgtaccaatctggggagatactgatatcgctgcgatcattgagaaggcgcccgttgtcgacgaagcagatgagcttgctgtccgagatgggagtattggaatagttgcaccagctccggttgtcgatgcagacagcgaggaagaatggttggctgctagagctgaaaacattcgaattgtcgtccctgctccagttgtcgacgaggaggacgagaccgaatggctagctgcccgacaaccaaaagatgcaattgggcgtatcattattcctgccccggttgtcgaagcagagaacgagaaaaggtgggtatctactcgaggcgaaagtacagtgatcattccctctgcctcaattgtcaatggggaagacgaaggggcatggctatctagcagcgggatccaaatcgttgctacggctccagttgtcgataaagatagtgaggaagcatggccgtctgctaagcttgctcatcgcgacaccgcagttattattggcgatgagccaatcgtcgacgcggccgatgagtag

SEQ ID NO: 10904 - protein, 194 aa, Muscodor strobelii
  misc_feature: SGI Peptide ID NO. 563482
  misc_feature: Useful for introducing or modulating the production of volatile compounds
MVHKTALVGLFGLIRLGWAVPIWGDTDIAAIIEKAPVVDEADELAVRDGSIGIVAPAPVVDADSEEEWLAARAENIRIVVPAPVVDEEDETEWLAARQPKDAIGRIIIPAPVVEAENEKRWVSTRGESTVIIPSASIVNGEDEGAWLSSSGIQIVATAPVVDKDSEEAWPSAKLAHRDTAVIIGDEPIVDAADE

SEQ ID NO: 10905 - DNA, 1244 bp, Muscodor strobelii
  misc_feature: SGI EST ID NO. CUFF.25827.0
  misc_feature: Variant of the nucleotide sequence at SEQ ID NO 10903
cgggcataaatcaagcagtcaaggacagccctacggcgatccatctaggcacacaagagggcagacaatcggcctcgccattcaccattttacatcaatcagtcgccgttgcccgtctatttgacttgcatgtcctgctatgtgatccccgtcacattttcttaagttactgctagcccatcccaattctacgacaagatatcataaccatggtacacaagacagctttggtgggactctttggcctcattcgccttggatgggctgtaccaatctggggagatactgatatcgctgcgatcattgagaaggcgcccgttgtcgacgaagcagatgagcttgctgtccgagatgggagtattggaatagttgcaccagctccggttgtcgatgcagacagcgaggaagaatggttggctgctagagctgaaaacattcgaattgtcgtccctgctccagttgtcgacgaggaggacgagaccgaatggctagctgcccgacaaccaaaagatgcaattgggcgtatcattattcctgccccggttgtcgaagcagagaacgagaaaaggtgggtatctactcgaggcgaaagtacagtgatcattccctctgcctcaattgtcaatggggaagacgaaggggcatggctatctagcagcgggatccaaatcgttgctacggctccagttgtcgataaagatagtgaggaagcatggccgtctgctaagcttgctcatcgcgacaccgcagttattattggcgatgagccaatcgtcgacgcggccgatgagtaggtctccatgttgtggtcgcgtaccgattagaaatcggcccttgcctcttcatacttgaaggatttgggacaatatcaatcatgctgcagtatctcgaggaacattggaaactgcaccgttgcattaaaggatataccagaatacggtttaaggagaattagtagtcggaggaaatttcatagtgcaaccgtgagggcttagactgaggtgaacgtcatggtctcaccagttgtctctctcgacgcattgcgcatctggtcggtaatgattacagtacccctgttacgcccccggctgttgatcttaccaagtattctctttacgaatgaaattcggtacactcatgacctgctgctcaaatgtttaaatgcaactagtttctgtctatcagttgctggcgtctctttttgatgcggttcctatcccgcaacacggcgatatttggtctga

SEQ ID NO: 10906 - DNA, 837 bp, Muscodor strobelii
  misc_feature: SGI cDNA ID NO. 563483
  misc_feature: Elevated expression when VOC is produced
  misc_feature: Encodes the peptide sequence at SEQ ID NO 10907
atggaaaataagtcaggagattctcatgatcgtctactaggtgatagcttcgatgagaatgcacatctgtgggacgcttcaccagatgaacgtaggagttgttgtcggtctccttacttacatctcaagaaaaatctctactcttttttgatatgtgtattgctactttacattgccacaatcgtgacaatcgatcttgctctaagagtcaaggagaaagctcactcgagaaaaccagataatcgcttcacattattgagcgatcacatgcaatatgaagacaggctggagtggcatccgcctcagcatccgttcaacctcgagccatctgatgaactcgatgatgcatggggcgatctattatatgcgatcgacatcagagtaacaggcgacgaattgaagtcgctggggatgaacttgacgaatcgagttcaggtgaacggcggcgactacctcgcctcacttggcgtatatcaccaccttcactgtctcaacaacttgcgcaaagtcattcactgggattactataagcataaatactcggatgacgttatcgagaaagcattcggcttcgggcattcagaccattgcatcgagacgctgcggcaagccgtcatgtgtcacgccaataccgccgtgacaactttcgaatgggtagatgagatcaatgatcttcagggcaaagtacagcgacttgagcagatggaaacatgcgcaaggtgggacagtgtcgacaactgggcgcgccagaaggcattggttcccgggaattacacgtatcgacctggcccattcacgcagaagacaagcgatagcaaggagattattcatggctga

SEQ ID NO: 10907 - protein, 278 aa, Muscodor strobelii
  misc_feature: SGI Peptide ID NO. 563483
  misc_feature (42)..(260): NCBI GI: 39960105 Blast Desc: MGG_09381 [Magnaporthe grisea 70-15] gi|145014341|gb|EDJ98909.1| MGG_09381 [Magnaporthe grisea 70-15]
  misc_feature (44)..(263): NCBI GI: 212534486 Blast Desc: conserved [Penicillium marneffei ATCC 18224] gi|210069798|gb|EEA23888.1| conserved [Penicillium marneffei ATCC 18224]
  misc_feature (36)..(253): NCBI GI: 238501772 Blast Desc: conserved [Aspergillus flavus NRRL3357] gi|220692357|gb|EED48704.1| conserved [Aspergillus flavus NRRL3357]
  misc_feature (36)..(253): NCBI GI: 169769306 Blast Desc: [Aspergillus oryzae RIB40] gi|83766981|dbj|BAE57121.1| protein product [Aspergillus oryzae]
  misc_feature (104)..(259): NCBI GI: 67900556 Blast Desc: AN7265.2 [Aspergillus nidulans FGSC A4] gi|40741946|gb|EAA61136.1| AN7265.2 [Aspergillus nidulans FGSC A4] gi|259483389|tpe|CBF78739.1| TPA: conserved [Aspergillus FGSC
  misc_feature (34)..(253): NCBI GI: 225562435 Blast Desc: conserved [Ajellomyces capsulatus G186AR]
  misc_feature (46)..(253): NCBI GI: 242817094 Blast Desc: conserved [Talaromyces stipitatus ATCC 10500] gi|218713348|gb|EED12772.1| conserved [Talaromyces stipitatus ATCC 10500]
  misc_feature (46)..(253): NCBI GI: 261204982 Blast Desc: conserved [Ajellomyces dermatitidis SLH14081] gi|239592287|gb|EEQ74868.1| conserved [Ajellomyces dermatitidis SLH14081] gi|239611559|gb|EEQ88546.1| conserved [Ajellomyces
  misc_feature (90)..(253): NCBI GI: 242817099 Blast Desc: conserved [Talaromyces stipitatus ATCC 10500] gi|218713349|gb|EED12773.1| conserved [Talaromyces stipitatus ATCC 10500]
  misc_feature (112)..(257): NCBI GI: 46139913 Blast Desc: FG11471.1 [Gibberella zeae PH-1]
  misc_feature: Useful for introducing or modulating the production of volatile compounds
MENKSGDSHDRLLGDSFDENAHLWDASPDERRSCCRSPYLHLKKNLYSFLICVLLLYIATIVTIDLALRVKEKAHSRKPDNRFTLLSDHMQYEDRLEWHPPQHPFNLEPSDELDDAWGDLLYAIDIRVTGDELKSLGMNLTNRVQVNGGDYLASLGVYHHLHCLNNLRKVIHWDYYKHKYSDDVIEKAFGFGHSDHCIETLRQAVMCHANTAVTTFEWVDEINDLQGKVQRLEQMETCARWDSVDNWARQKALVPGNYTYRPGPFTQKTSDSKEIIHG

SEQ ID NO: 10908 - DNA, 1340 bp, Muscodor strobelii
  misc_feature: SGI EST ID NO. CUFF.25829.0
  misc_feature: Variant of the nucleotide sequence at SEQ ID NO 10906
ccagaatctgtgagatcttatttacactgcctcatcatgataaccacggtccaattgaatcccgaagtctcatcgaacagtaaaccgagcaagatctagattcggtcgcggaccgcggcattccgtcctcgtccaaactgcattgcgactttcactgtgggttcctgacgatggtcaatcgaggttgagatatcccttttgcccgattttacgtagatatcccaccaagttgattacaatctcaccgtatatcttatttcttcacttacatcatggaaaataagtcaggagattctcatgatcgtctactaggtgatagcttcgatgagaatgcacatctgtgggacgcttcaccagatgaacgtaggagttgttgtcggtctccttacttacatctcaagaaaaatctctactcttttttgatatgtgtattgctactttacattgccacaatcgtgacaatcgatcttgctctaagagtcaaggagaaagctcactcgagaaaaccagataatcgcttcacattattgagcgatcacatgcaatatgaagacaggctggagtggcatccgcctcagcatccgttcaacctcgagccatctgatgaactcgatgatgcatggggcgatctattatatgcgatcgacatcagagtaacaggcgacgaattgaagtcgctggggatgaacttgacgaatcgagttcaggtgaacggcggcgactacctcgcctcacttggcgtatatcaccaccttcactgtctcaacaacttgcgcaaagtcattcactgggattactataagcataaatactcggatgacgttatcgagaaagcattcggcttcgggcattcagaccattgcatcgagacgctgcggcaagccgtcatgtgtcacgccaataccgccgtgacaactttcgaatgggtagatgagatcaatgatcttcagggcaaagtacagcgacttgagcagatggaaacatgcgcaaggtgggacagtgtcgacaactgggcgcgccagaaggcattggttcccgggaattacacgtatcgacctggcccattcacgcagaagacaagcgatagcaaggagattattcatggctgaagtcacaaatagatattagactttaatttaattgcctacaccaccccgtaaaccgctgcagtcgacatcaaagatatcatcggggtaatgcgaaatttacgatgttttctatgaacttggcttttatttccggggctatttttgcaactctagatactgtcttgagcctcttaatatctttatatcagtacttgacggaaattgtgaacctcatgttccgggggagaactg

SEQ ID NO: 10909 - DNA, 936 bp, Muscodor strobelii
  misc_feature: SGI cDNA ID NO. 563484
  misc_feature: Encodes the peptide sequence at SEQ ID NO 10910
atggctgagagccacatcacggaaggcgagataccactcgatgtcccaagtgccgggaagccgtgcaaaacatggtataggatcattggcgatatcaagtcatctggcaaatcacctgtaatcacactccatggtggtccaggggccggacataactacatggttgctttggaagatatatatggccagcgaggcatccctattgttctgtacgaccaggtgggctgcggccatagcacgcatctgcccgagaaagtgggagatggcgacttttggacggtcgatctattcattaacgagcttgataaactcgtcgaccaccttgagctgcgtgacattgggttccatattgttggtaacagctggggtggcatgcttggtgcttcgtatgctgcccggcatcctcgtggtctcaaaaagcttgttctctcaagcgcgcctgccagcatgcccttgtataacgagggatgcaagatccggctctcgcagatgccacctgacacgcgcaagactctcgagaacacagatgcggatcattccagtcccgagtataaacaggctgagcttgttttcatgcgcacgttcgtctgtcaattggacccgataccagaccccattcagcaggtatgggcaaacctgaaagtagaaaaagcttgctatttgactatgcaaggtgatgcagagttcgaaacgacaggcacgctcaagacatgggagggttggaaggatgcgcataagatcgaggcggagacactgctactgaatggcaaaaacgacgaggtgatggactttgttatggagccttggttcaagcacataccgaaggtgaaatgggtgactcttgagaatgctagtcactgcaccatgtgggaggaacgtgatcgttacatgcaactctgtggggagttcctatcacaagagtcatcattatcgtga

SEQ ID NO: 10910 - protein, 311 aa, Muscodor strobelii
  misc_feature: SGI Peptide ID NO. 563484
  misc_feature (66)..(302): Pfam Id: PF00561 Pfam Desc: alpha/beta hydrolase fold
  misc_feature (1)..(306): NCBI GI: 145252800 Blast Desc: An16g06070 [Aspergillus niger] gi|134083468|emb|CAK46945.1| protein product [Aspergillus niger]
  misc_feature (23)..(304): NCBI GI: 254406800 Blast Desc: proline imino-peptidase [Streptomyces sviceus ATCC 29083] gi|197716230|gb|EDY60264.1| proline imino-peptidase [Streptomyces sviceus ATCC 29083]
  misc_feature (6)..(304): NCBI GI: 156036178 Blast Desc: SS1G_12775 [Sclerotinia sclerotiorum 1980] gi|154698183|gb|EDN97921.1| SS1G_12775 [Sclerotinia sclerotiorum 1980]
  misc_feature (15)..(304): NCBI GI: 154314339 Blast Desc: BC1G_05263 [Botryotinia fuckeliana B05.10] gi|150848908|gb|EDN24101.1| BC1G_05263 [Botryotinia fuckeliana B05.10]
  misc_feature (20)..(304): NCBI GI: 271963655 Blast Desc: Prolyl aminopeptidase [Streptosporangium roseum DSM 43021] gi|270506830|gb|ACZ85108.1| Prolyl aminopeptidase [Streptosporangium roseum DSM 43021]
  misc_feature (23)..(304): NCBI GI: 13470803 Blast Desc: proline iminopeptidase [Mesorhizobium loti MAFF303099] gi|14021546|dbj|BAB48158.1| proline iminopeptidase [Mesorhizobium loti MAFF303099]
  misc_feature (23)..(304): NCBI GI: 260459253 Blast Desc: proline-specific peptidase [Mesorhizobium opportunistum WSM2075] gi|259034807|gb|EEW36063.1| proline-specific peptidase [Mesorhizobium opportunistum WSM2075]
  misc_feature (6)..(306): NCBI GI: 271501435 Blast Desc: proline-specific peptidase [Dickeya dadantii Ech586] gi|270344990|gb|ACZ77755.1| proline-specific peptidase [Dickeya dadantii Ech586]
  misc_feature (1)..(306): NCBI GI: 116249628 Blast Desc: proline iminopeptidase [Rhizobium leguminosarum bv. viciae 3841] gi|115254276|emb|CAK03895.1| proline iminopeptidase [Rhizobium leguminosarum bv. viciae 3841]
  misc_feature (6)..(306): NCBI GI: 242217665 Blast Desc: [Postia placenta Mad-698-R] gi|220726210|gb|EED80167.1| [Postia placenta Mad-698-R]
  misc_feature (32)..(311): SWISSPROT Homolog: EC 3.4.11.5 Prolyl aminopeptidase
MAESHITEGEIPLDVPSAGKPCKTWYRIIGDIKSSGKSPVITLHGGPGAGHNYMVALEDIYGQRGIPIVLYDQVGCGHSTHLPEKVGDGDFWTVDLFINELDKLVDHLELRDIGFHIVGNSWGGMLGASYAARHPRGLKKLVLSSAPASMPLYNEGCKIRLSQMPPDTRKTLENTDADHSSPEYKQAELVFMRTFVCQLDPIPDPIQQVWANLKVEKACYLTMQGDAEFETTGTLKTWEGWKDAHKIEAETLLLNGKNDEVMDFVMEPWFKHIPKVKWVTLENASHCTMWEERDRYMQLCGEFLSQESSLS

SEQ ID NO: 10911 - DNA, 1747 bp, Muscodor strobelii
  misc_feature: SGI EST ID NO. CUFF.25920.3
  misc_feature: Variant of the nucleotide sequence at SEQ ID NO 10909
tctacctccttgaatcatctacaatcaagactgcgctgcacccgacttcgaatcagctggaattcctttcttacggtatctgggtatactgacgtgccacacgctcaattctagcatcgtccaattttgacattcatcaagatttcagcaaaatggctgagagccacatcacggaaggcgagataccactcgatgtcccaagtgccgggaagccgtgcaaaacatggtataggatcattggcgatatcaagtcatctggcaaatcacctgtaatcacactccatggtggtccaggggccggacataactacatggttgctttggaagatatatatggccagcgaggcatccctattgttctgtacgaccaggtgggctgcggccatagcacgcatctgcccgagaaagtgggagatggcgacttttggacggtcgatctattcattaacgagcttgataaactcgtcgaccaccttgagctgcgtgacattgggttccatattgttggtaacagctggggtggcatgcttggtgcttcgtatgctgcccggcatcctcgtggtctcaaaaagcttgttctctcaagcgcgcctgccagcatgcccttgtataacgagggatgcaagatccggctctcgcagatgccacctgacacgcgcaagactctcgagaacacagatgcggatcattccagtcccgagtataaacaggctgagcttgttttcatgcgcacgttcgtctgtcaattggacccgataccagaccccattcagcaggtatgggcaaacctgaaagtagaaaaagcttgctatttgactatgcaaggtgatgcagagttcgaaacgacaggcacgctcaagacatgggagggttggaaggatgcgcataagatcgaggcggagacactgctactgaatggcaaaaacgacgaggtgatggactttgttatggagccttggttcaagcacataccgaaggtgaaatgggtgactcttgagaatgctagtcactgcaccatgtgggaggaacgtgatcgttacatgcaactctgtggggagttcctatcacaagagtcatcattatcgtgatgtgcgtgttgattgaagaaagcgatggacgtccacattctcgacatgcggatattaactatagagaccgaggtcccgtgatatgagacagtcacattataatcacaatgttttattgccattctctccgtgattcgccgagatgcaacacacgaatccccttaatcagatccatagtatataatctcctcactctttgccccttcattgacccacgataacaacgtttgctttacagagtttgcaaccctctctccgtactgcaacacgcgtagttagtaattactcttcatagtgtgtttgatcatgtctcgggagtcctaaaacatgtttccagagcacttgctccctcaaacaaagaaactgactcccgcaactctgcagaatgagcagagaataactccagaaatcacttactcccggaggaggaggtccaggggggactttgtaattaggatcgctagcaatccatgcaataggcgtttggctacctcccttacaaagttcatgaagctctaccacaagtgctggatcaatcgctcttccgaatatcacagcacgtggcaccttgctgtaatcgtgagtgccgacttgatttgggctcgccgattttggtcctttgccagctagtaaggacgggatgtttttctttgcttctt

SEQ ID NO: 10912 - DNA, 453 bp, Muscodor strobelii
  misc_feature: SGI cDNA ID NO. 563485
  misc_feature: Encodes the peptide sequence at SEQ ID NO 10913
atgtcgcaaccaattcctatcatatgctgcggtcaggcgattgaggtcggcgagagcgtcgcgcctgcgctgaggccagagatcgaggtcattcgattcttcaacgataaggaagaagcaaagaaaaacatcccgtccttactagctggcaaaggaccaaaatcggcgagcccaaatcaagtcggcactcacgattacagcaaggtgccacgtgctgtgatattcggaagagcgattgatccagcacttgtggtagagcttcatgaactttgtaagggaggtagccaaacgcctattgcatggattgctagcgatcctaattacaaagtcccccctggacctcctcctccgggatacggagagagggttgcaaactctgtaaagcaaacgttgttatcgtgggtcaatgaaggggcaaagagtgaggagattatatactatggatctgattaa

SEQ ID NO: 10913 - protein, 150 aa, Muscodor strobelii
  misc_feature: SGI Peptide ID NO. 563485
  misc_feature (1)..(147): NCBI GI: 119467061 Blast Desc: NFIA_047760 [Neosartorya fischeri NRRL 181] gi|119405489|gb|EAW15440.1| conserved [Neosartorya fischeri NRRL 181]
  misc_feature (1)..(147): NCBI GI: 70981428 Blast Desc: conserved [Aspergillus fumigatus Af293] gi|66843865|gb|EAL84206.1| conserved [Aspergillus fumigatus Af293] gi|159122713|gb|EDP47834.1| conserved [Aspergillus A1163]
  misc_feature (1)..(147): NCBI GI: 212528602 Blast Desc: conserved [Penicillium marneffei ATCC 18224] gi|210073856|gb|EEA27943.1| conserved [Penicillium marneffei ATCC 18224]
  misc_feature (2)..(147): NCBI GI: 121704246 Blast Desc: conserved [Aspergillus clavatus NRRL 1] gi|119398531|gb|EAW08961.1| conserved [Aspergillus clavatus NRRL 1]
  misc_feature (1)..(147): NCBI GI: 255932415 Blast Desc: Pc12g09370 [Penicillium chrysogenum Wisconsin 54-1255] gi|211582383|emb|CAP80564.1| Pc12g09370 [Penicillium chrysogenum Wisconsin 54-1255]
  misc_feature (1)..(146): NCBI GI: 67901598 Blast Desc: AN7786.2 [Aspergillus nidulans FGSC A4] gi|40742384|gb|EAA61574.1| AN7786.2 [Aspergillus nidulans FGSC A4] gi|259484139|tpe|CBF80104.1| TPA: conserved [Aspergillus FGSC
  misc_feature (1)..(129): NCBI GI: 145228461 Blast Desc: An01g00950 [Aspergillus niger] gi|134054628|emb|CAK43473.1| protein product [Aspergillus niger]
  misc_feature (1)..(106): NCBI GI: 169786540 Blast Desc: [Aspergillus oryzae RIB40] gi|83776480|dbj|BAE66597.1| protein product [Aspergillus oryzae]
  misc_feature (2)..(138): NCBI GI: 256723000 Blast Desc: NECHADRAFT_97412 [Nectria haematococca mpVI 77-13-4]
  misc_feature (5)..(147): NCBI GI: 169779703 Blast Desc: [Aspergillus oryzae RIB40] gi|238500373|ref|XP_002381421.1| conserved [Aspergillus flavus NRRL3357] gi|83773055|dbj|BAE63183.1| protein product oryzae]
MSQPIPIICCGQAIEVGESVAPALRPEIEVIRFFNDKEEAKKNIPSLLAGKGPKSASPNQVGTHDYSKVPRAVIFGRAIDPALVVELHELCKGGSQTPIAWIASDPNYKVPPGPPPPGYGERVANSVKQTLLSWVNEGAKSEEIIYYGSD

SEQ ID NO: 10914 - DNA, 7868 bp, Muscodor strobelii
  misc_feature: SGI EST ID NO. CUFF.25921.1
  misc_feature: Variant of the nucleotide sequence at SEQ ID NO 10912
tattggtcgacgccacacacgtattcgacgaatgcaaccccaagcaaaatacggactgtgaaggatcgcttagactaccattgcatatgcaataggcgtgcagtaatgtatgtcgcatcggggaacgatcaacgacctccggcccgctacccaggttcatgagaatggcacagagcgttagaccttaccaaaagaggaaggttttctcgggtgttgcctgcccctagcttttggcttacatttgggggtctcggggtaagagaagatggcctttccgaggctaagaaggttgtttgcgaacagcccgaccctctgcccgacagtcaaagtatatgcttctgcacatgcccgccacatatcgctgatcaagagctccattatctcattggcctgtgcaagggaatgatgtgcagcagaggaacattcgggtcatccgatattgaagggatgaaaagaagaagggtttagcaccaattgctctttgttgggatgatgctgagaaaccggcacatcataagtacttcagggtcatggggcgtgcttctgagaaagtgcatgagggtgccaaataatgggtccaggcactcattcagatatcagcatataatctcgtacctgtatcatcgacgatagatatgctattagcgatgccatgttcaacaacaaggatcaaacgcaaggggaccgaacctctcatcagttttgcttatagtctcacttttgggcaggcaaaagacacttctctcatctaatttgccaatttatctagtattcgcgacgagaggatttcgttactcacaatctctcttcaactcacctctaagatctcaatgcaaggactccctgtagcgttgtggagggaacggaccctaccccagattgttgacgatgtagcccgtgacaacccagactatgtctatggatattggcttgtgggccaggactcggagtctgcttcgatccaagttcatactctcacttatgcgcaactgtcccacgtcgtgagccaattggcatggtggcttgtagagcagttaggcaataatagaaaaggcgaggttttgacgtacataggtccaaatgacgtgcgctttactgccctcgtattagcgacgattaaaacaggattcaggctcttcctcacatcaccgcgtaatagcgcaatagcgcatcgcaagttgttcgatggactcaagtgcacgacactcatcgccgctgatcctgcacatcagccagccaaaggagtacttgaagcggttcaaccatgtcaagctctcgcgattcccagcgtcgaggagctcctacagtccgttaaggagctctatgtgatggaaaagtcgctgaaagattcatacagtgatacgttattcatcattcatacttcagggtcgacgggtatccccaaaccgttgaattggacccaagaaacagctgtgcggcacgtcggatcaggtgctcacgacccaccggacggtgaaatatcactcgactcgcttttccacggcaagcgggtgctatcaacgctgccaccattccacggcgctggcttactgcagcatttactctatgctatcccatttggaaatatcactgtaattccgccaacgacaggagcaattgttacagcccagggcgtcgtagaagcactcaagcgcaccccggctgatgttgcggtgatggtgccgtcgattgtcgctgagctatctcaagcccccgggcttcttgattactgcgccgcaaatctacagctgatcctttacataggaggtgacttgccacaagccataggggatattgtggcatcgaaagttcagcttcgttgctggtggggtgcttcagaggtaggcatgcctcagcagcttattgtgcctgaactcggaatggagcagggaggttggcattatgttcgcttccatccatgtgctggtgccacatttgaggaagtgagcgatggcctgtatgagctggttatcaagcgtgacgaggagaaaattgagacccagacgaccttcaccattgccaacttcggcatcttagatgagtatcggactcgcgacctttttgagccccatgcgacagtgccgaatgcgtggcgctggcgttcccgggcggacgatattatcgtcttcttgaatggcgagaagaccaacccagtttcgatggaacaacatataacagccagtaattccaacgcaattagcgctgctttggtcattggcgcacagaggttccaagcagcgcttattatagagcccactggcgcgagtgactcgctcgcaacagatgaacaagcagccttaattgaacgtgtatggccgagcgtcgatgcagccaacaaaaaggccccagctcacgcaagggtagaaaaatccttgatcttggttgctctgcgacccttcatacgcgcgggaaagggcacgatacaacgagccgctactgttgctcaatacacaacagagatcgacaaactttatgcggatgccgatgtttctacttatttgtctacagatgttgaacggtacggagatgtgagagatgtcgatgttgctacccacatcattcgagatgcagcgcagactgtgacaggtcgttcagagctaggcgatgaagacaatttcttcgattctggaatggattctttagaagcgttacagctcgtgcggaccattcgcgcagcgcttcatcagccgggccttgcgctttccaccgtgtatcgaaacccaacgccaaaaggtctagcattagcgatcacttctagcgactccgcgaattcagacgacagaatcctcgcaggccaactgttcaatacttatcgaggtctcattcagcaggtagaccggaaaacatattccttccaagaagatcctttcttcaaaggccacagcggcgcaatcgatgttctcctgacaggatctactgggactcttggtacatcaatcttgcacgctttgctaaaacatcccagagtcggccagattgtctgcctgaatcgcggcgcagacggcgggcaggcgacacagcacgatcgtttcaaagccgcacagctagatacaacccttctggccagatgcatgttcatacaggcagacctgtctgatccgagactcggccttgatgatgagacatatgccatgctttctatcaatatcgggcttgtgattcataatgcctggcccgtcaacttcaacctcaatctcttatcgtttcgaccattgctcgcgggcctcgtcaatcttttcaaattcgctgctagtgcttcaatatcaagacggcgctttgtattcatatctagcgtcagtgcagtggtaggggaccctacggaaacattgcctgatgagaccttagcacttgatactccgttcacgaatgcatacgcgcatagcaagcttctagctgaacttctatgcaatacagccgcaaaacatattgggcttcgaatagccatattgcgtatcggccaagttggcggttccactgccactcacggtgccgtatggaaccgagctgaatggctgccgagtctcgttgtcagttctactcgagtcctgaggtgcttgccagacagtctcgggccaagcttttccgaagttgattgggtaccatctgacttattgggccctgttgtcacggatatcgcgtttgcgagcgacgatgccgtagcgggggttggggctgtcgttttcaacgtacgcaatcccagaacagtaatgtgggtttcattaatccctagtattcgagaggtagtgaacgcccctcactctcacgatgtgcaagtcgtgagctctgaggagtggttgacgcgccttcaggagagcgatggagctggagatgcggtcaagggccgtgaagttgcagatagcaatccagcagtcaagttgttcgacttttatcgtcatgggttatggccgaaggagcagagcgacgggacgacgcggccacctatgatcatcagtcgcgctatggaagtcagcgacacgcttcgtactatgcctagcgtaaatccagcttggatgcagaaatgggttcgagaatggattgatcatacagaaaactaggcacatagtcgctctatcttagaacttttcgaagagtcgtggttgccaattattagtcttacgaaacaaatgtttaacatgacgcatgccttaatctcaattaaatgcaatacgaatgttcgcaaagttgatgtaaaggggtgacatgagcctactcaaagacttggcatctccaaggccggtttgagtaacctcgtggacacatgcaacgtcatcgcctgaacgactttcgtttccatggctgtttctttttctgcaacgagttcattgctggctgttgagcagcagggttggcatcttttagcgcgtggagtggaggtgccagtggatgcatttaggtactcagctctcgacgtcgatgcgaggttttcgcgttgcgagagaccacggcgataatgtttcttcatgcaatatttgtcccttcgtttcccgttccataattgaaagagctcgagactctgatcaaaataaatccatcctttaggcagagacggacgaagacgagaagctgctctttacagtgagcacaccaatttagccgcgaaaatgacactagccaagctctctcagctcatcgctattgcagaaatagcgaccatgaatttcgcatatgccatgccacggaagagtgcaagtcctagtgcgacagtcaactatccttacgactactcatcgcttgtctgtccagatacgagtgctgggcccgagtcgactcttcttacgcctacttatgggtcttcggggtcggccttcatggtttgcgcaagactgcaaatctcggcgccagcgtctcaaatccggaatgccattctcgacttcaggtcttatgggaaatggaatacgttcatcccctcggtcacgctgcctgagaacgtgacaacaacaccagatgatgacttcgagaacatgtccatgagcttcacgtccgctggtctcgtggaaggcgtcaatacatcgagtaccgagatcttaaccatactagattactctagtgttggtgaaagcggcaagccgtatctcatggtggcgtggcactatgacgatggactagcaggggccggtagtagggctgaacacccgagtgtaatcgttgaagaggcggatggttcgtcgtggttgttgagctatgaaacatactatgtcggcacacttactgtggtggtcgagttgttgaagaatcggttgcaggaacaatttgaggtacaggcagcggacctcaaaggttacgtcgagagtgcaagctagcgatatatgatcggtggtcaaaatcgaatatttcgatctcgcggcttacgctcttcttgcaatgatctcgcacctgttgttgtcgatatgacctctgttaaatatgtgcggaagcactaatcgtacaccaccctctgatgtgtcaagataccgtgttctgttttctgatggatcattaaggatgttgtcgcctagatcttaaatccgctacgcgagcgcgagagctttctgttactaggagatttgtagggagcaaggatgaggatttagggcatcccggtggctagcgggggctatgtgggactgattatcaacgactcgctggcatagtgagtgcaagtgggatcttacctctgattaataagttccatttcggacggaactcgggcgtcagtcgttttccgttcgtataatgagcagcgcatttggaagttgctatatcgtgaaaccttgtgtcacaagtatataaagagacatgacgattcgcgtagttcgacatgtcgcagttgctgcaagccttgggcaccgaagtacagcacagctgaatcttagagtgtgattataaagtaacgcaattcctcgatctaagctagagtatcgttacgattcaacccgataaatattcggacaagcttacagctagcatgtcgcaaccaattcctatcatatgctgcggtcaggcgattgaggtcggcgagagcgtcgcgcctgcgctgaggccagagatcgaggtcattcgattcttcaacgataaggaagaagcaaagaaaaacatcccgtccttactagctggcaaaggaccaaaatcggcgagcccaaatcaagtcggcactcacgattacagcaaggtgccacgtgctgtgatattcggaagagcgattgatccagcacttgtggtagagcttcatgaactttgtaagggaggtagccaaacgcctattgcatggattgctagcgatcctaattacaaagtcccccctggacctcctcctccgggatacggagagagggttgcaaactctgtaaagcaaacgttgttatcgtgggtcaatgaaggggcaaagagtgaggagattatatactatggatctgattaaggggattcgtgtgttgcatctcggcgaatcacggagagaatggcaataaaacattgtgattataatgtgactgtctcatatcacgggacctcggtctctatagttaatatccgcatgtcgagaatgtggacgtccatcgctttcttcaatcaacacgcacatcacgataatgatgactcttgtgataggaactccccacagagttgcatgtaacgatcacgttcctcccacatggtgcagtgactagcattctcaagagtcacccatttcaccttcggtatgtgcttgaaccaaggctccataacaaagtccatcacctcgtcgtttttgccattcagtagcagtgtctccgcctcgatcttatgcgcatccttccaaccctcccatgtcttgagcgtgcctgtcgtttcgaactctgcatcaccttgcctacgcacagcgatcaatattttgctaatgtaggaagggtgtgtatggaggatgtgtatagcggcagcatttcctgcactcacatagtcaaatagcaagctttttctactttcaggtttgcccatacctgctgaatggggtctggtatcgggtccaattgacagacgaacgtgcgcatgaaaacaagctcagcctgtttatactcgggactggaatgatccgcatctgtgttctcgagagtcttgcgcgtgtcaggtggcatctgcgagagccggatcttgcatccctcgttatacaagggcatgctggcaggcgcgcttgagagaacaagctttttgagaccacgaggatgccgggcagcatacgaagcaccaagcatgccaccccagctgttaccaacaatatggaacccaatgtcacgcagctcaaggtggtcgacgagtttatcaagctcgttaatgaatagatcgaccgtccaaaagtcgccatctcccactttctcgggcagatgcgtgctatggccgcagcccacctggtcgtacagaacaatagggatgcctcgctggccatatatatcttccaaagcaaccatgtagttatgtccggcccctggaccaccatggagtgtgattacaggtgatttgccagatgacttgatatcgccaatgatcctataccatgttttgcacggcttcccggcacttgggacatcgagtggtatctcgccttccgtgatgtggctctcagccattttgctgaaatcttgatgaatgtcaaaattggacgatgctagaattgagcgtgtggcacgtcagtatacccagataccgtaagaaaggaattccagctgattcgaagtcgggtgcagcgcagtcttgattgtagatgattcaaggaggtagaaaggaccaacaagggaacatgcagaaggccggagttcttcctagtaatattggattgcgtacctttcctgcaccgatattcgattcaaaacattcacgactttttcaatgtttcattcgtccattctttctgattttca

SEQ ID NO: 10915 - DNA, 699 bp, Muscodor strobelii
  misc_feature: SGI cDNA ID NO. 563486
  misc_feature: Encodes the peptide sequence at SEQ ID NO 10916
atgacactagccaagctctctcagctcatcgctattgcagaaatagcgaccatgaatttcgcatatgccatgccacggaagagtgcaagtcctagtgcgacagtcaactatccttacgactactcatcgcttgtctgtccagatacgagtgctgggcccgagtcgactcttcttacgcctacttatgggtcttcggggtcggccttcatggtttgcgcaagactgcaaatctcggcgccagcgtctcaaatccggaatgccattctcgacttcaggtcttatgggaaatggaatacgttcatcccctcggtcacgctgcctgagaacgtgacaacaacaccagatgatgacttcgagaacatgtccatgagcttcacgtccgctggtctcgtggaaggcgtcaatacatcgagtaccgagatcttaaccatactagattactctagtgttggtgaaagcggcaagccgtatctcatggtggcgtggcactatgacgatggactagcaggggccggtagtagggctgaacacccgagtgtaatcgttgaagaggcggatggttcgtcgtggttgttgagctatgaaacatactatgtcggcacacttactgtggtggtcgagttgttgaagaatcggttgcaggaacaatttgaggtacaggcagcggacctcaaaggttacgtcgagagtgcaagctag

SEQ ID NO: 10916 - protein, 232 aa, Muscodor strobelii
  misc_feature: SGI Peptide ID NO. 563486
  misc_feature (59)..(232): NCBI GI: 71000058 Blast Desc: conserved [Aspergillus fumigatus Af293] gi|66852383|gb|EAL92708.1| conserved [Aspergillus fumigatus Af293] gi|159127754|gb|EDP52869.1| conserved [Aspergillus A1163]
  misc_feature (53)..(230): NCBI GI: 115384836 Blast Desc: [Aspergillus terreus NIH2624] gi|114196657|gb|EAU38357.1| [Aspergillus terreus NIH2624]
  misc_feature (60)..(226): NCBI GI: 119492264 Blast Desc: NFIA_068430 [Neosartorya fischeri NRRL 181] gi|119411731|gb|EAW21674.1| conserved [Neosartorya fischeri NRRL 181]
  misc_feature (71)..(109): NCBI GI: 255710381 Blast Desc: KLTH0A00110p [Lachancea thermotolerans] gi|238932851|emb|CAR21032.1| KLTH0A00110p [Lachancea thermotolerans]
MTLAKLSQLIAIAEIATMNFAYAMPRKSASPSATVNYPYDYSSLVCPDTSAGPESTLLTPTYGSSGSAFMVCARLQISAPASQIRNAILDFRSYGKWNTFIPSVTLPENVTTTPDDDFENMSMSFTSAGLVEGVNTSSTEILTILDYSSVGESGKPYLMVAWHYDDGLAGAGSRAEHPSVIVEEADGSSWLLSYETYYVGTLTVVVELLKNRLQEQFEVQAADLKGYVESAS

SEQ ID NO: 10917 - DNA, 7868 bp, Muscodor strobelii; identical to SEQ ID NO: 10914
  misc_feature: SGI EST ID NO. CUFF.25921.1
  misc_feature: Variant of the nucleotide sequence at SEQ ID NO 10915

SEQ ID NO: 10918 - DNA, 3225 bp, Muscodor strobelii
  misc_feature: SGI cDNA ID NO. 563487
  misc_feature: Encodes the peptide sequence at SEQ ID NO 10919
atgcaaggactccctgtagcgttgtggagggaacggaccctaccccagattgttgacgatgtagcccgtgacaacccagactatgtctatggatattggcttgtgggccaggactcggagtctgcttcgatccaagttcatactctcacttatgcgcaactgtcccacgtcgtgagccaattggcatggtggcttgtagagcagttaggcaataatagaaaaggcgaggttttgacgtacataggtccaaatgacgtgcgctttactgccctcgtattagcgacgattaaaacaggattcaggctcttcctcacatcaccgcgtaatagcgcaatagcgcatcgcaagttgttcgatggactcaagtgcacgacactcatcgccgctgatcctgcacatcagccagccaaaggagtacttgaagcggttcaaccatgtcaagctctcgcgattcccagcgtcgaggagctcctacagtccgttaaggagctctatgtgatggaaaagtcgctgaaagattcatacagtgatacgttattcatcattcatacttcagggtcgacgggtatccccaaaccgttgaattggacccaagaaacagctgtgcggcacgtcggatcaggtgctcacgacccaccggacggtgaaatatcactcgactcgcttttccacggcaagcgggtgctatcaacgctgccaccattccacggcgctggcttactgcagcatttactctatgctatcccatttggaaatatcactgtaattccgccaacgacaggagcaattgttacagcccagggcgtcgtagaagcactcaagcgcaccccggctgatgttgcggtgatggtgccgtcgattgtcgctgagctatctcaagcccccgggcttcttgattactgcgccgcaaatctacagctgatcctttacataggaggtgacttgccacaagccataggggatattgtggcatcgaaagttcagcttcgttgctggtggggtgcttcagaggtaggcatgcctcagcagcttattgtgcctgaactcggaatggagcagggaggttggcattatgttcgcttccatccatgtgctggtgccacatttgaggaagtgagcgatggcctgtatgagctggttatcaagcgtgacgaggagaaaattgagacccagacgaccttcaccattgccaacttcggcatcttagatgagtatcggactcgcgacctttttgagccccatgcgacagtgccgaatgcgtggcgctggcgttcccgggcggacgatattatcgtcttcttgaatggcgagaagaccaacccagtttcgatggaacaacatataacagccagtaattccaacgcaattagcgctgctttggtcattggcgcacagaggttccaagcagcgcttattatagagcccactggcgcgagtgactcgctcgcaacagatgaacaagcagccttaattgaacgtgtatggccgagcgtcgatgcagccaacaaaaaggccccagctcacgcaagggtagaaaaatccttgatcttggttgctctgcgacccttcatacgcgcgggaaagggcacgatacaacgagccgctactgttgctcaatacacaacagagatcgacaaactttatgcggatgccgatgtttctacttatttgtctacagatgttgaacggtacggagatgtgagagatgtcgatgttgctacccacatcattcgagatgcagcgcagactgtgacaggtcgttcagagctaggcgatgaagacaatttcttcgattctggaatggattctttagaagcgttacagctcgtgcggaccattcgcgcagcgcttcatcagccgggccttgcgctttccaccgtgtatcgaaacccaacgccaaaaggtctagcattagcgatcacttctagcgactccgcgaattcagacgacagaatcctcgcaggccaactgttcaatacttatcgaggtctcattcagcaggtagaccggaaaacatattccttccaagaagatcctttcttcaaaggccacagcggcgcaatcgatgttctcctgacaggatctactgggactcttggtacatcaatcttgcacgctttgctaaaacatcccagagtcggccagattgtctgcctgaatcgcggcgcagacggcgggcaggcgacacagcacgatcgtttcaaagccgcacagctagatacaacccttctggccagatgcatgttcatacaggcagacctgtctgatccgagactcggccttgatgatgagacatatgccatgctttctatcaatatcgggcttgtgattcataatgcctggcccgtcaacttcaacctcaatctcttatcgtttcgaccattgctcgcgggcctcgtcaatcttttcaaattcgctgctagtgcttcaatatcaagacggcgctttgtattcatatctagcgtcagtgcagtggtaggggaccctacggaaacattgcctgatgagaccttagcacttgatactccgttcacgaatgcatacgcgcatagcaagcttctagctgaacttctatgcaatacagccgcaaaacatattgggcttcgaatagccatattgcgtatcggccaagttggcggttccactgccactcacggtgccgtatggaaccgagctgaatggctgccgagtctcgttgtcagttctactcgagtcctgaggtgcttgccagacagtctcgggccaagcttttccgaagttgattgggtaccatctgacttattgggccctgttgtcacggatatcgcgtttgcgagcgacgatgccgtagcgggggttggggctgtcgttttcaacgtacgcaatcccagaacagtaatgtgggtttcattaatccctagtattcgagaggtagtgaacgcccctcactctcacgatgtgcaagtcgtgagctctgaggagtggttgacgcgccttcaggagagcgatggagctggagatgcggtcaagggccgtgaagttgcagatagcaatccagcagtcaagttgttcgacttttatcgtcatgggttatggccgaaggagcagagcgacgggacgacgcggccacctatgatcatcagtcgcgctatggaagtcagcgacacgcttcgtactatgcctagcgtaaatccagcttggatgcagaaatgggttcgagaatggattgatcatacagaaaactag

SEQ ID NO: 10919 - protein, 1074 aa, Muscodor strobelii
  misc_feature: SGI Peptide ID NO. 563487
  misc_feature (690)..(963): Pfam Id: PF01370 Pfam Desc: NAD dependent epimerase/dehydratase family
  misc_feature (692)..(932): Pfam Id: PF07993 Pfam Desc: Male sterility protein
  misc_feature (50)..(318): Pfam Id: PF00501 Pfam Desc: AMP-binding enzyme
  misc_feature (810)..(874): Pfam Id: PF01370 Pfam Desc: NAD dependent epimerase/dehydratase family
  misc_feature (692)..(924): Pfam Id: PF07993 Pfam Desc: Male sterility protein
  misc_feature (575)..(640): Pfam Id: PF00550 Pfam Desc: Phosphopantetheine attachment site
  misc_feature (10)..(1069): NCBI GI: 145239907 Blast Desc: An08g04820 [Aspergillus niger] gi|134077114|emb|CAK45455.1| protein product [Aspergillus niger]
  misc_feature (10)..(1069): NCBI GI: 169766506 Blast Desc: [Aspergillus oryzae RIB40] gi|83765579|dbj|BAE55722.1| protein product [Aspergillus oryzae]
  misc_feature (4)..(1069): NCBI GI: 156046697 Blast Desc: SS1G_09449 [Sclerotinia sclerotiorum 1980] gi|154693844|gb|EDN93582.1| SS1G_09449 [Sclerotinia sclerotiorum 1980]
  misc_feature (10)..(1069): NCBI GI: 145241446 Blast Desc: An09g00450 [Aspergillus niger] gi|134077907|emb|CAL00305.1| protein product [Aspergillus niger]
  misc_feature (102)..(1069): NCBI GI: 238483233 Blast Desc: NRPS-like enzyme, [Aspergillus flavus NRRL3357] gi|220700905|gb|EED57243.1| NRPS-like enzyme, [Aspergillus flavus NRRL3357]
  misc_feature (14)..(1069): NCBI GI: 154314562 Blast Desc: BC1G_03990 [Botryotinia fuckeliana B05.10] gi|150848612|gb|EDN23805.1| BC1G_03990 [Botryotinia fuckeliana B05.10]
  misc_feature (14)..(1072): NCBI GI: 154308659 Blast Desc: BC1G_07752 [Botryotinia fuckeliana B05.10] gi|150852703|gb|EDN27895.1| BC1G_07752 [Botryotinia fuckeliana B05.10]
  misc_feature (3)..(1069): NCBI GI: 156062202 Blast Desc: SS1G_01217 [Sclerotinia sclerotiorum 1980] gi|154696553|gb|EDN96291.1| SS1G_01217 [Sclerotinia sclerotiorum 1980]
  misc_feature (11)..(1069): NCBI GI: 242810029 Blast Desc: NRPS-like enzyme, [Talaromyces stipitatus ATCC 10500] gi|218716122|gb|EED15544.1| NRPS-like enzyme, [Talaromyces stipitatus ATCC 10500]
  misc_feature (11)..(1069): NCBI GI: 242789697 Blast Desc: NRPS-like enzyme, [Talaromyces stipitatus ATCC 10500] gi|218718004|gb|EED17424.1| NRPS-like enzyme, [Talaromyces stipitatus ATCC 10500]
MQGLPVALWRERTLPQIVDDVARDNPDYVYGYWLVGQDSESASIQVHTLTYAQLSHVVSQLAWWLVEQLGNNRKGEVLTYIGPNDVRFTALVLATIKTGFRLFLTSPRNSAIAHRKLFDGLKCTTLIAADPAHQPAKGVLEAVQPCQALAIPSVEELLQSVKELYVMEKSLKDSYSDTLFIIHTSGSTGIPKPLNWTQETAVRHVGSGAHDPPDGEISLDSLFHGKRVLSTLPPFHGAGLLQHLLYAIPFGNITVIPPTTGAIVTAQGVVEALKRTPADVAVMVPSIVAELSQAPGLLDYCAANLQLILYIGGDLPQAIGDIVASKVQLRCWWGASEVGMPQQLIVPELGMEQGGWHYVRFHPCAGATFEEVSDGLYELVIKRDEEKIETQTTFTIANFGILDEYRTRDLFEPHATVPNAWRWRSRADDIIVFLNGEKTNPVSMEQHITASNSNAISAALVIGAQRFQAALIIEPTGASDSLATDEQAALIERVWPSVDAANKKAPAHARVEKSLILVALRPFIRAGKGTIQRAATVAQYTTEIDKLYADADVSTYLSTDVERYGDVRDVDVATHIIRDAAQTVTGRSELGDEDNFFDSGMDSLEALQLVRTIRAALHQPGLALSTVYRNPTPKGLALAITSSDSANSDDRILAGQLFNTYRGLIQQVDRKTYSFQEDPFFKGHSGAIDVLLTGSTGTLGTSILHALLKHPRVGQIVCLNRGADGGQATQHDRFKAAQLDTTLLARCMFIQADLSDPRLGLDDETYAMLSINIGLVIHNAWPVNFNLNLLSFRPLLAGLVNLFKFAASASISRRRFVFISSVSAVVGDPTETLPDETLALDTPFTNAYAHSKLLAELLCNTAAKHIGLRIAILRIGQVGGSTATHGAVWNRAEWLPSLVVSSTRVLRCLPDSLGPSFSEVDWVPSDLLGPVVTDIAFASDDAVAGVGAVVFNVRNPRTVMWVSLIPSIREVVNAPHSHDVQVVSSEEWLTRLQESDGAGDAVKGREVADSNPAVKLFDFYRHGLWPKEQSDGTTRPPMIISRAMEVSDTLRTMPSVNPAWMQKWVREWIDHTEN

SEQ ID NO: 10920 - DNA, 7868 bp, Muscodor strobelii; identical to SEQ ID NO: 10914
  misc_feature: SGI EST ID NO. CUFF.25921.1
  misc_feature: Variant of the nucleotide sequence at SEQ ID NO 10918

SEQ ID NO: 10921 - DNA, 348 bp, Muscodor strobelii
  misc_feature: SGI cDNA ID NO. 563488
  misc_feature: Encodes the peptide sequence at SEQ ID NO 10922
atgtgggtttcattaatccctagtattcgagaggtagtgaacgcccctcactctcacgatgtgcaagtcgtgagctctgaggagtggttgacgcgccttcaggagagcgatggagctggagatgcggtcaagggccgtgaagttgcagatagcaatccagcagtcaagttgttcgacttttatcgtcatgggttatggccgaaggagcagagcgacgggacgacgcggccacctatgatcatcagtcgcgctatggaagtcagcgacacgcttcgtactatgcctagcgtaaatccagcttggatgcagaaatgggttcgagaatggattgatcatacagaaaactag

SEQ ID NO: 10922 - protein, 115 aa, Muscodor strobelii
  misc_feature: SGI Peptide ID NO. 563488
  misc_feature (18)..(110): NCBI GI: 242810029 Blast Desc: NRPS-like enzyme, [Talaromyces stipitatus ATCC 10500] gi|218716122|gb|EED15544.1| NRPS-like enzyme, [Talaromyces stipitatus ATCC 10500]
  misc_feature (2)..(109): NCBI GI: 85075756 Blast Desc: NCU05000 [Neurospora crassa OR74A] gi|28916838|gb|EAA26584.1| [Neurospora crassa OR74A]
  misc_feature (2)..(109): NCBI GI: 169783030 Blast Desc: [Aspergillus oryzae RIB40] gi|83774721|dbj|BAE64844.1| protein product [Aspergillus oryzae]
  misc_feature (28)..(109): NCBI GI: 39941158 Blast Desc: MGG_05491 [Magnaporthe grisea 70-15] gi|145022151|gb|EDK06171.1| MGG_05491 [Magnaporthe grisea 70-15]
  misc_feature (2)..(115): NCBI GI: 212526428 Blast Desc: AMP dependent ligase/synthetase, [Penicillium marneffei ATCC 18224] gi|210072769|gb|EEA26856.1| AMP dependent ligase/synthetase, [Penicillium marneffei ATCC 18224]
  misc_feature (50)..(111): NCBI GI: 154317848 Blast Desc: BC1G_02907 [Botryotinia fuckeliana B05.10] gi|150843565|gb|EDN18758.1| BC1G_02907 [Botryotinia fuckeliana B05.10]
  misc_feature (22)..(109): NCBI GI: 171679130 Blast Desc: protein product [Podospora anserina] gi|170937636|emb|CAP62295.1| protein product [Podospora anserina]
  misc_feature (2)..(109): NCBI GI: 121701267 Blast Desc: nonribosomal peptide synthetase, [Aspergillus clavatus NRRL 1] gi|119397041|gb|EAW07472.1| nonribosomal peptide synthetase, [Aspergillus clavatus NRRL 1]
  misc_feature (2)..(110): NCBI GI: 238483233 Blast Desc: NRPS-like enzyme, [Aspergillus flavus NRRL3357] gi|220700905|gb|EED57243.1| NRPS-like enzyme, [Aspergillus flavus NRRL3357]
  misc_feature (2)..(110): NCBI GI: 242789697 Blast Desc: NRPS-like enzyme, [Talaromyces stipitatus ATCC 10500] gi|218718004|gb|EED17424.1| NRPS-like enzyme, [Talaromyces stipitatus ATCC 10500]
MWVSLIPSIREVVNAPHSHDVQVVSSEEWLTRLQESDGAGDAVKGREVADSNPAVKLFDFYRHGLWPKEQSDGTTRPPMIISRAMEVSDTLRTMPSVNPAWMQKWVREWIDHTEN

SEQ ID NO: 10923 - DNA, 7868 bp, Muscodor strobelii; identical to SEQ ID NO: 10914
  misc_feature: SGI EST ID NO. CUFF.25921.1
  misc_feature: Variant of the nucleotide sequence at SEQ ID NO 10921

SEQ ID NO: 10924 - DNA, 1425 bp, Muscodor strobelii
  misc_feature: SGI cDNA ID NO. 563489
  misc_feature: Encodes the peptide sequence at SEQ ID NO 10925
atggattctttagaagcgttacagctcgtgcggaccattcgcgcagcgcttcatcagccgggccttgcgctttccaccgtgtatcgaaacccaacgccaaaaggtctagcattagcgatcacttctagcgactccgcgaattcagacgacagaatcctcgcaggccaactgttcaatacttatcgaggtctcattcagcaggtagaccggaaaacatattccttccaagaagatcctttcttcaaaggccacagcggcgcaatcgatgttctcctgacaggatctactgggactcttggtacatcaatcttgcacgctttgctaaaacatcccagagtcggccagattgtctgcctgaatcgcggcgcagacggcgggcaggcgacacagcacgatcgtttcaaagccgcacagctagatacaacccttctggccagatgcatgttcatacaggcagacctgtctgatccgagactcggccttgatgatgagacatatgccatgctttctatcaatatcgggcttgtgattcataatgcctggcccgtcaacttcaacctcaatctcttatcgtttcgaccattgctcgcgggcctcgtcaatcttttcaaattcgctgctagtgcttcaatatcaagacggcgctttgtattcatatctagcgtcagtgcagtggtaggggaccctacggaaacattgcctgatgagaccttagcacttgatactccgttcacgaatgcatacgcgcatagcaagcttctagctgaacttctatgcaatacagccgcaaaacatattgggcttcgaatagccatattgcgtatcggccaagttggcggttccactgccactcacggtgccgtatggaaccgagctgaatggctgccgagtctcgttgtcagttctactcgagtcctgaggtgcttgccagacagtctcgggccaagcttttccgaagttgattgggtaccatctgacttattgggccctgttgtcacggatatcgcgtttgcgagcgacgatgccgtagcgggggttggggctgtcgttttcaacgtacgcaatcccagaacagtaatgtgggtttcattaatccctagtattcgagaggtagtgaacgcccctcactctcacgatgtgcaagtcgtgagctctgaggagtggttgacgcgccttcaggagagcgatggagctggagatgcggtcaagggccgtgaagttgcagatagcaatccagcagtcaagttgttcgacttttatcgtcatgggttatggccgaaggagcagagcgacgggacgacgcggccacctatgatcatcagtcgcgctatggaagtcagcgacacgcttcgtactatgcctagcgtaaatccagcttggatgcagaaatgggttcgagaatggattgatcatacagaaaactag

SEQ ID NO: 10925 - protein, 474 aa, Muscodor strobelii
  misc_feature: SGI Peptide ID NO. 563489
  misc_feature (90)..(363): Pfam Id: PF01370 Pfam Desc: NAD dependent epimerase/dehydratase family
  misc_feature (92)..(332): Pfam Id: PF07993 Pfam Desc: Male sterility protein
  misc_feature (210)..(274): Pfam Id: PF01370 Pfam Desc: NAD dependent epimerase/dehydratase family
  misc_feature (92)..(324): Pfam Id: PF07993 Pfam Desc: Male sterility protein
  misc_feature (1)..(470): NCBI GI: 154317848 Blast Desc: BC1G_02907 [Botryotinia fuckeliana B05.10] gi|150843565|gb|EDN18758.1| BC1G_02907 [Botryotinia fuckeliana B05.10]
  misc_feature (1)..(469): NCBI GI: 154314562 Blast Desc: BC1G_03990 [Botryotinia fuckeliana B05.10] gi|150848612|gb|EDN23805.1| BC1G_03990 [Botryotinia fuckeliana B05.10]
  misc_feature (1)..(469): NCBI GI: 238483233 Blast Desc: NRPS-like enzyme, [Aspergillus flavus NRRL3357] gi|220700905|gb|EED57243.1| NRPS-like enzyme, [Aspergillus flavus NRRL3357]
  misc_feature (1)..(471): NCBI GI: 154308659 Blast Desc: BC1G_07752 [Botryotinia fuckeliana B05.10] gi|150852703|gb|EDN27895.1| BC1G_07752 [Botryotinia fuckeliana B05.10]
  misc_feature (1)..(469): NCBI GI: 156046697 Blast Desc: SS1G_09449 [Sclerotinia sclerotiorum 1980] gi|154693844|gb|EDN93582.1| SS1G_09449 [Sclerotinia sclerotiorum 1980]
  misc_feature (1)..(469): NCBI GI: 169766506 Blast Desc: [Aspergillus oryzae RIB40] gi|83765579|dbj|BAE55722.1| protein product [Aspergillus oryzae]
  misc_feature (1)..(469): NCBI GI: 156062202 Blast Desc: SS1G_01217 [Sclerotinia sclerotiorum 1980] gi|154696553|gb|EDN96291.1| SS1G_01217 [Sclerotinia sclerotiorum 1980]
  misc_feature (1)..(469): NCBI GI: 145239907 Blast Desc: An08g04820 [Aspergillus niger] gi|134077114|emb|CAK45455.1| protein product [Aspergillus niger]
  misc_feature (1)..(469): NCBI GI: 242789697 Blast Desc: NRPS-like enzyme, [Talaromyces stipitatus ATCC 10500] gi|218718004|gb|EED17424.1| NRPS-like enzyme, [Talaromyces stipitatus ATCC 10500]
  misc_feature (1)..(469): NCBI GI: 242810029 Blast Desc: NRPS-like enzyme, [Talaromyces stipitatus ATCC 10500] gi|218716122|gb|EED15544.1| NRPS-like enzyme, [Talaromyces stipitatus ATCC 10500]
MDSLEALQLVRTIRAALHQPGLALSTVYRNPTPKGLALAITSSDSANSDDRILAGQLFNTYRGLIQQVDRKTYSFQEDPFFKGHSGAIDVLLTGSTGTLGTSILHALLKHPRVGQIVCLNRGADGGQATQHDRFKAAQLDTTLLARCMFIQADLSDPRLGLDDETYAMLSINIGLVIHNAWPVNFNLNLLSFRPLLAGLVNLFKFAASASISRRRFVFISSVSAVVGDPTETLPDETLALDTPFTNAYAHSKLLAELLCNTAAKHIGLRIAILRIGQVGGSTATHGAVWNRAEWLPSLVVSSTRVLRCLPDSLGPSFSEVDWVPSDLLGPVVTDIAFASDDAVAGVGAVVFNVRNPRTVMWVSLIPSIREVVNAPHSHDVQVVSSEEWLTRLQESDGAGDAVKGREVADSNPAVKLFDFYRHGLWPKEQSDGTTRPPMIISRAMEVSDTLRTMPSVNPAWMQKWVREWIDHTEN

SEQ ID NO: 10926 - DNA, 7868 bp, Muscodor strobelii; identical to SEQ ID NO: 10914
  misc_feature: SGI EST ID NO. CUFF.25921.1
  misc_feature: Variant of the nucleotide sequence at SEQ ID NO 10924

SEQ ID NO: 10927 - DNA, 831 bp, Muscodor strobelii
  misc_feature: SGI cDNA ID NO. 563490
  misc_feature: Elevated expression when VOC is produced
  misc_feature: Encodes the peptide sequence at SEQ ID NO 10928
atgggcgactcttatatgttgaatgacgctgctgcgcctgacaatgagcgtgagcgtctgaataagcaattcttcgttttgaatgaagcaatggagggcaaccttttgccacctcatattgcgaaagaggtttccaacaatccgaagcctcgcatttgcgacatggcaacgggctccggcatctttcttatagaattagctaagaccctacccccatcggctgagctatttgggtacgactacgacgacagcaagtttccaaaagacaatctcccatcaaacatcaaactaggtaaagcagatttgtataagcctttccccgaggacttgcagggcacatttgatgtagtcagtttacggctgttctacctagcagctcggaaggacaaagtcgttgacatgctcaaaaatctgtccaagttgctacgtccaggaggttggcttatctggtttgacgttgccacaaagactgcgagcatggagccaccgagcgatgcggtgtttcacttcatcaaagcacttcatgagtattcattgaagatggacatggacaccaccatccccattgggacactgaagtatatgaaggaagcctcgctcagcgagtgcaataatgacattcgctccatcgacggtggctaccatcatgttgcggattcagaatggctccaattgtcgcgctggctcttttacggggcgataatgggaatatgcggcggcatagctcggtcaccgcacaatatcgaaggcatgaggagcaaagaagatctggacaacttcgagactaggctgtacgtatctgtattccaaaccctaccctgctcgacatag

SEQ ID NO: 10928 - protein, 276 aa, Muscodor strobelii
  misc_feature: SGI Peptide ID NO. 563490
  misc_feature (53)..(150): Pfam Id: PF08241 Pfam Desc: Methyltransferase domain
  misc_feature (53)..(148): Pfam Id: PF08242 Pfam Desc: Methyltransferase domain
  misc_feature (2)..(181): NCBI GI: 119489946 Blast Desc: NFIA_061940 [Neosartorya fischeri NRRL 181] gi|119411090|gb|EAW21033.1| conserved [Neosartorya fischeri NRRL 181]
  misc_feature (2)..(153): NCBI GI: 70998775 Blast Desc: conserved [Aspergillus fumigatus Af293] gi|66851746|gb|EAL92071.1| conserved [Aspergillus fumigatus Af293] gi|159127128|gb|EDP52243.1| conserved [Aspergillus A1163]
  misc_feature (5)..(152): NCBI GI: 169596262 Blast Desc: SNOG_00888 [Phaeosphaeria nodorum SN15] gi|160701267|gb|EAT92383.2| SNOG_00888 [Phaeosphaeria nodorum SN15]
  misc_feature (16)..(162): NCBI GI: 226286195 Blast Desc: conserved [Paracoccidioides brasiliensis Pb01]
  misc_feature (2)..(153): NCBI GI: 121712234 Blast Desc: conserved [Aspergillus clavatus NRRL 1] gi|119401884|gb|EAW12306.1| conserved [Aspergillus clavatus NRRL 1]
  misc_feature (19)..(207): NCBI GI: 170940319 Blast Desc: protein product [Podospora anserina]
  misc_feature (5)..(187): NCBI GI: 67903010 Blast Desc: AN8492.2 [Aspergillus nidulans FGSC A4] gi|40747958|gb|EAA67114.1| AN8492.2 [Aspergillus nidulans FGSC A4] gi|259484441|tpe|CBF80663.1| TPA: conserved [Aspergillus FGSC
  misc_feature (16)..(162): NCBI GI: 226291659 Blast Desc: conserved [Paracoccidioides brasiliensis Pb18]
  misc_feature (2)..(181): NCBI GI: 238839097 Blast Desc: conserved [Microsporum canis CBS 113480]
  misc_feature (16)..(161): NCBI GI: 121701965 Blast Desc: conserved [Aspergillus clavatus NRRL 1] gi|119397390|gb|EAW07821.1| conserved [Aspergillus clavatus NRRL 1]
  misc_feature: Useful for introducing or modulating the production of volatile compounds
MGDSYMLNDAAAPDNERERLNKQFFVLNEAMEGNLLPPHIAKEVSNNPKPRICDMATGSGIFLIELAKTLPPSAELFGYDYDDSKFPKDNLPSNIKLGKADLYKPFPEDLQGTFDVVSLRLFYLAARKDKVVDMLKNLSKLLRPGGWLIWFDVATKTASMEPPSDAVFHFIKALHEYSLKMDMDTTIPIGTLKYMKEASLSECNNDIRSIDGGYHHVADSEWLQLSRWLFYGAIMGICGGIARSPHNIEGMRSKEDLDNFETRLYVSVFQTLPCST

SEQ ID NO: 10929 - DNA, 2036 bp, Muscodor strobelii
  misc_feature: SGI EST ID NO. CUFF.25921.7
  misc_feature: Variant of the nucleotide sequence at SEQ ID NO 10927
ctagaatctcgttgaaaagtagactctctacaggggaaaccgcggttccagccaaccccatgcctttgatagtcttgatcatcgacgcaattcagacaactatgaggagtgaccctgccagcactttgcctccagcgtgcagaacacctgtctcgcgtcccgttacgtcgcaagtccctcgattgacaaagtcgaacagggatccatacatgcgatggatgtgaccaaccgtacacgatagagtgcacaatgagtgctttcttcgccttccataatggagtggaagaggggaaacgagggacgtattccgctgtacaccttgaattgagagccatcggatcctcgttcaaccacaagcttcacttggcggagcgggccgctgttcaacagccgccttggccagcttggccttcttggctgtagattttgtttaactatgtaatgactttgatagaccatcttagggctactgatcataaatcgaaggagtacgaaaagtatttcgatgcgtcactccatttctaatttaggcactcccaattaagacttattggttggtagtgcaacctacatagacttggcgtccctttcgtgacatcattctgcgaaggagaaaacaccttgtaatgggacatgcttttggtttcccgtcgaataccgtcgcactgcatcagttcgttgaccgaacctaagtcaattcaatagtagacgtaccatcgccgaaactgcttcacttccccggttcgcgacggcgaaacattcattgcgcacaattgaagagcttggtttttgacaggcggtgctgcgttgagtgcagcaactctgcacaatagagctgctggccttgtatcattgcatataggcagtatagctagaggaacgtattgactactcgaaaatgggcgactcttatatgttgaatgacgctgctgcgcctgacaatgagcgtgagcgtctgaataagcaattcttcgttttgaatgaagcaatggagggcaaccttttgccacctcatattgcgaaagaggtttccaacaatccgaagcctcgcatttgcgacatggcaacgggctccggcatctttcttatagaattagctaagaccctacccccatcggctgagctatttgggtacgactacgacgacagcaagtttccaaaagacaatctcccatcaaacatcaaactaggtaaagcagatttgtataagcctttccccgaggacttgcagggcacatttgatgtagtcagtttacggctgttctacctagcagctcggaaggacaaagtcgttgacatgctcaaaaatctgtccaagttgctacgtccaggaggttggcttatctggtttgacgttgccacaaagactgcgagcatggagccaccgagcgatgcggtgtttcacttcatcaaagcacttcatgagtattcattgaagatggacatggacaccaccatccccattgggacactgaagtatatgaaggaagcctcgctcagcgagtgcaataatgacattcgctccatcgacggtggctaccatcatgttgcggattcagaatggctccaattgtcgcgctggctcttttacggggcgataatgggaatatgcggcggcatagctcggtcaccgcacaatatcgaaggcatgaggagcaaagaagatctggacaacttcgagactaggctgtacgtatctgtattccaaaccctaccctgctcgacatagtaagtatcctgacacacagattagggtcaaagatatggaccaagcggagagaattcaactattcctggtgcagacatggggacgacgggcattttgacgcgcttggatcagtgccctttgcagacatgagtgtcaagagagtcgagagattcatgataggcatataggtagcattgaacgccggcacttgttgcgtttaatgtcgcagcttttgtaaatcatacaaacaacccttactaagcgtcctttctacagtatcagacccacctgtgatgttaagtaagtacaagatatgccctggttaaac

SEQ ID NO: 10930 - DNA, 1077 bp, Muscodor strobelii
  misc_feature: SGI cDNA ID NO. 563491
  misc_feature: Encodes the peptide sequence at SEQ ID NO 10931
atggcgccacaactgagtgactcgagcgaatacgtcgggtggcgcctaatagtgtttgtatccgtctttacaccgctccagattgggctcgttgctttacgattctatgcgaggtctctcacgaaagcaagttatgatatcggcgacatcttggtggtcgtggccctgcttgctggactagtgcaagtcggtattagcatcggtgccggcgttcaagctggagtcggctatcaccttttgtaccttgagaaaacggaccctgagaagatcaccctattcttcaaatatctcgtaccgatctctgtttggtattttgcgacaatcactatcacgaagctcgccatctgcaaattgtatcgaacacttttcccgcagaaacctgtgttctacgtactcgttatcaccgcaacgattctcgtactcacccctgttgcgacatcaataacgctcctagcagcctgtcgtccgttttcggccaattggggctcggctgaggttcaagctacccattgtatcgacaaagaggcggtattcgtctggggcaccatccctaacatcgtgaccgatatcgtgcttttaactatcccgctaccaattgtttggaagcttcatacgacaactaagctaaaaattgcactatcagttacattcatcatcggtagcgttggcctcttagcgtcaattctaaggtttatctcgttctacaatacgaactcattctcggacgcaaccttcaatgcagatgaacttatcatctggactattgctgagcccggtatttatctcatttctgcctgcttattggttcttcgacctttgctcgagaagttcaagactggaatttccaataaattaggcacatattcggggtccacagcgaagtcgcgcgcaacatcggatagccgcgagctggacacctttgagggaagcaatcgcatgaatgtcgcacttgtctctactagcggtcacggtggtttcattcagttgagcgacaacgaagatgacatgaagacccgtggccctgaacagcgcatcaaagtcacaacagatattgaacaagcttggaacaagaaatga

SEQ ID NO: 10931 - protein, 358 aa, Muscodor strobelii
  misc_feature: SGI Peptide ID NO. 563491
  misc_feature (9)..(351): NCBI GI: 156046695 Blast Desc: SS1G_09448 [Sclerotinia sclerotiorum 1980] gi|154693843|gb|EDN93581.1| SS1G_09448 [Sclerotinia sclerotiorum 1980]
  misc_feature (65)..(276): NCBI GI: 238495224 Blast Desc: alpha-xylosidase, [Aspergillus flavus NRRL3357] gi|220695498|gb|EED51841.1| alpha-xylosidase, [Aspergillus flavus NRRL3357]
  misc_feature (11)..(271): NCBI GI: 212543813 Blast Desc: integral membrane protein [Penicillium marneffei ATCC 18224] gi|210066968|gb|EEA21061.1| integral membrane protein [Penicillium marneffei ATCC 18224]
  misc_feature (8)..(309): NCBI GI: 242787830 Blast Desc: integral membrane protein [Talaromyces stipitatus ATCC 10500] gi|218721243|gb|EED20662.1| integral membrane protein [Talaromyces stipitatus ATCC 10500]
  misc_feature (15)..(273): NCBI GI: 145239909 Blast Desc: An08g04830 [Aspergillus niger] gi|134077115|emb|CAK45456.1| protein product [Aspergillus niger]
  misc_feature (8)..(275): NCBI GI: 212542769 Blast Desc: conserved [Penicillium marneffei ATCC 18224] gi|210066446|gb|EEA20539.1| conserved [Penicillium marneffei ATCC 18224]
  misc_feature (26)..(332): NCBI GI: 115491041 Blast Desc: [Aspergillus terreus NIH2624] gi|114197008|gb|EAU38708.1| [Aspergillus terreus NIH2624]
  misc_feature (31)..(273): NCBI GI: 121701967 Blast Desc: integral membrane protein [Aspergillus clavatus NRRL 1] gi|119397391|gb|EAW07822.1| integral membrane protein [Aspergillus clavatus NRRL 1]
  misc_feature (31)..(275): NCBI GI: 145243758 Blast Desc: An11g03960 [Aspergillus niger] gi|134079072|emb|CAK48381.1| protein product [Aspergillus niger]
  misc_feature (73)..(273): NCBI GI: 70995233 Blast Desc: integral membrane protein [Aspergillus fumigatus Af293] gi|66850015|gb|EAL90342.1| integral membrane protein [Aspergillus fumigatus Af293] gi|159131134|gb|EDP56247.1| protein
MAPQLSDSSEYVGWRLIVFVSVFTPLQIGLVALRFYARSLTKASYDIGDILVVVALLAGLVQVGISIGAGVQAGVGYHLLYLEKTDPEKITLFFKYLVPISVWYFATITITKLAICKLYRTLFPQKPVFYVLVITATILVLTPVATSITLLAACRPFSANWGSAEVQATHCIDKEAVFVWGTIPNIVTDIVLLTIPLPIVWKLHTTTKLKIALSVTFIIGSVGLLASILRFISFYNTNSFSDATFNADELIIWTIAEPGIYLISACLLVLRPLLEKFKTGISNKLGTYSGSTAKSRATSDSRELDTFEGSNRMNVALVSTSGHGGFIQLSDNEDDMKTRGPEQRIKVTTDIEQAWNKK

SEQ ID NO: 10932 - DNA, 2066 bp, Muscodor strobelii
  misc_feature: SGI EST ID NO. CUFF.25840.0
  misc_feature: Variant of the nucleotide sequence at SEQ ID NO 10930
cttgtatctccttttatcaagtccatttatgatgattgatatgcaactgtggtccaacaaaatgtggtgacctcccgatctaacctaactttatgtacaacagtatatttcattcacttcgctatttgttgcgcagactacacgccttcataacagcactacggcggtgctttgcccttcactagcattacaaacttggaaaatatggcgccacaactgagtgactcgagcgaatacgtcgggtggcgcctaatagtgtttgtatccgtctttacaccgctccagattgggctcgttgctttacgattctatgcgaggtctctcacgaaagcaagttatgatatcggcgacatcttggtggtcgtggccctgcttgctggactagtgcaagtcggtattagcatcggtgccggcgttcaagctggagtcggctatcaccttttgtaccttgagaaaacggaccctgagaagatcaccctattcttcaaatatctcgtaccgatctctgtttggtattttgcgacaatcactatcacgaagctcgccatctgcaaattgtatcgaacacttttcccgcagaaacctgtgttctacgtactcgttatcaccgcaacgattctcgtactcacccctgttgcgacatcaataacgctcctagcagcctgtcgtccgttttcggccaattggggctcggctgaggttcaagctacccattgtatcgacaaagaggcggtattcgtctggggcaccatccctaacatcgtgaccgatatcgtgcttttaactatcccgctaccaattgtttggaagcttcatacgacaactaagctaaaaattgcactatcagttacattcatcatcggtagcgttggcctcttagcgtcaattctaaggtttatctcgttctacaatacgaactcattctcggacgcaaccttcaatgcagatgaacttatcatctggactattgctgagcccggtatttatctcatttctgcctgcttattggttcttcgacctttgctcgagaagttcaagactggaatttccaataaattaggcacatattcggggtccacagcgaagtcgcgcgcaacatcggatagccgcgagctggacacctttgagggaagcaatcgcatgaatgtcgcacttgtctctactagcggtcacggtggtttcattcagttgagcgacaacgaagatgacatgaagacccgtggccctgaacagcgcatcaaagtcacaacagatattgaacaagcttggaacaagaaatgaactaggccattctatatctagttattttgtatcatagcagtgtatactggagtagccttgatggcttgcgacaccatgtcaagtgcgaatcaggaagtattgagcacctcttgttttgactagggcatttcggggtaatatgtataaatgctattcagtgtatgggtggagatttttttggcgatccgaaacataagctctgtatatttcaagtataatgatatccctttcctagtcttaatgtcaattttaaccactactcagattgaccgatcatagtaaaaaggagcgagacattaggcaaggagagtcagctgctaactttcttcagcaaatcgaactctaatccttgaaagcagatcgtgagatgaatggattaagacatcttacggtagaaacgctatgatcgtaagctctcgcccccggcaggtatagatgaccagaccttttacaggcatcttgcgatcggtgagttatgttaaagctttcgagactttcggctagcgaaggctcgatgctaatacccgtgttaccgtccaatacgattcccatctaggacagagggcggctcacgaatcagaccatatgttcttgttcgcaaacgattctcatcactgccgctcggtgagccttgcagaacctcagacaacgatttagatttcaaatccgtgttcgttatgtgggctgtcatagctcacatcgcatcagcccacatagggattccatcttccgagaaacctagctgcgccgtacaggatacgcgtaaattgtggattagaagcgca

SEQ ID NO: 10933 - DNA, 8964 bp, Muscodor strobelii
  misc_feature: SGI cDNA ID NO. 563492
  misc_feature: Encodes the peptide sequence at SEQ ID NO 10934
atgccatcagaaaagagtcgtggtgttgctcccattgcaatagttggcatgtcatgtcgcctaccaggaggtgcaaacagcgttgatgagctttgggagcttgttagtcgacgtggccaagcttggagtccggttccaagcgatcgtttcaatgaatctgcattccatcacccaagtcctgataatggcactggattgaatcatcaccctggtggtcacttcataagtggtgaccttcgcgatttcgatcattcgttttttcggatatcatctcaacaggcagcggcaatggatcctcaacaacgacttctactcgagcttacatacgaagctatcgaaaatgcaggcctcgatatgaaaaagattgctggcacgaatacctcagtacacgtagctacttttaccgcagactacgagagaaacctttataaggacccaatggatatgcctgcttattacatgactggcaccgacatagctataatgtctaatcgtatctcccacgcattcgatctacgaggatcgtccatgacccttgacacagcttgctcaggggggctagtatctttgcaccaagcatgtcttggcttgctcaatggggagtcagacactgctattgtcgctgcggcgaacgtgactctcagtccagaccaccacattggtatgagcagtcttcatctcatcggcagcacggggcgaagttatccctttgaccatcgaggtgatggttatggtcgtggtgaaggctgcgccgttctggtgctgaaacggcttgacgatgccctgctttgccgtgatccaatacatgctgttgtacgcggaacggctgtcaatcagaatggccataatactcgtggtataacaaacccaagcggtgatgctcagataaggttgatacgagctgcttatgaccgtgctgggctagatccacacggcattgcgtacgttgaagcccacggaaccggaacccaagccggcgacaaagaagagcttcgagcaattgccgaagtcttcacaaacccatgccgctctttgccattatacgtgggatctatcaagggaaatatcggacacactgaaaacactagtggactggcggccatcctgcaggccgccttggttctcaataaaaatacaatccctcccgtggctggcttcgagaagccgaaggagggcctcccactagactacattcatattccgaccaaaccaacgccatttccacaggaaaatcatatcataccccgtgtatccgtaaataactttggctttgggggtacaaatgctcatgctatcctcgagaaagcacccgtcaaagatgggcgacttgaggagtctctggatcctttaccaaggcttttcatcttctctgctaatagccaaacttctctcttaagcatgaccaatgcctatcatatatatcttgatggccatcaaacaatcaatctacaaaatctttcttataccctctgtcgcagacgaacggccatgccgtggcgtttcagctgcgttgcttacgatcttgagtccttaaaagctaaactcaaatccagccacttagctattcaaagactcatgccaaatgctggttctcgtgagaagatctttgtcttcaccggacagggagctcaatgggctggaatgggtcgcgagctgttattcggaagcgcagcatccccagtattccgcgactcgattagagtgtcgcgcgacattctatttaagctaggtgccacctggaatcttgaagacgagcttctgtctacagatgaatctgcatctgcccgttttgggactgcaagctttgcgcagccggcaacaacggctttgcaaattgcactgatcatgttgctcaaagctcaaaacataaaacctgatattgtagtcgggcactccagcggggagattgcggccgcgttcactgctggttatctaacacatcatacggctcttgcgattgccttctatcgcggatctatacccgtgctctgtaaaaagcgagggctccctcgaggtggcatgatggcaatcgcaactagcccggacaaagtcatggccttcctagaagctcttactcaggggactgctgtgatcgcctgtataaacagccctaagagcgttactgtatccggtgacctgagtgcaattgaagaactatcttcacgtctggacggtgaaaggagcatatcgtatcgccgactatttgttgatactgcttaccactcgaagcacatgcagactatagctgatgattatatgtcgctgatagaaaatctcgactacaacgcagacggatccgaaaaggtacccttcatttcttctgtttcgggacagttcaaatcgtctggctttggctcccggtattgggttgcaaaccttctctccccggtactatttagtgacgccatacaacgcattggacgtcattacctctcgggtcctcagcagctacgtggtgcggctattgaagttggaccacatcctgcgctggccggcccctttcaacaatctcttgaaggcgtaggggaccaaaatcttaaattcgattatacctctattttacgacggaaatctgatgcaacctctagttgcctggagtttgtcggtcaattattccaatgggggttgaaacttgattttgataccgtctttggatttgctccaggcttgggttcgagtttcagcaatgcgaccgtgttgactgatctaccaacgtattcgtgggatcatgacgtgaagcattggaacgagtcacgacttagtagcgagtatcgacatcgtcgtgagccgtaccacgatcttcttggcgtgcgtattgtcgattctacatcaatcgagcctcgctggcggtacatggttgacgtgagtctcctgccatggttggcagaccacgtagtcgacgaccttgtcatattccctgggtctggctatttatgtatggcgctagaagcaatgcttcagctcaatcgcgaaatgcatgttcggtcgtcgttcgacacctttgtattccatgacgtgtcattcttgagagcgctcgtcatctctcggtcttcaaaacgaacagaaatgcagctatctttgaagcagaatagagccaaagctacatcgttcgagttctcagtaacagctttgtctgataacaaatggtacgaacactgttgtgggacaattcagggacgaacatctgaccaaggcgcgcggatcacggccaacgagctcaactccacgatttcgagaataggactatccgatgatagtataataatgaacaatgaggagctctatgaagagtttgaagcgtctggtaatcagtacgggccaacgtttcggggctgtagccgtctcgagatggcgagcgatgcatcacgattgattgcggaagtcgtaataccagacattcggagtgtcatgccatcgcagtctcttagaaaccatcttatacatccatcgacactcgatatcttattgcatactggattgccaatggcaaaaacgctgctgggcgcgggttctgtgatgcccgttgctatcgaggaactgtcaatacatactagcgaactcctcccgcgagatcctggaaatatacttgatgtgacagcggagttggtgtcaagtggatttcgcactgccaatgtcagctatcaagtctcatccaagaatattccagttctctcgatatcgggcctggaaatgcggagcatggctggctctgacgataaagctgataagatggttcccgtagagagtatttgttatgatctgagctggcagctagatgttgactttacgcgagctagcgatttatcacctcgatcggctttgctcgaccttatccgccatctttgcttcaaatatggtgatgtctctattgctgagttatcaatgaatgacgggcaactcacctcatcaatcctcgaagcatttgatgtcgagagtaataccttatccgcatattatcgtgtcaacttagggaactcaaatgatcatcacgacgtaggtgtcgatcaacttatacaccctcgaatccaacaacttgagctagacttggaggcagacttggcagcgcagggtatagaaactgggtcatgcgaagttgttcttgccagctcaatcgagaacctcaagcatgccatggtaattgccaagattgaaggcatgattttacttgttcttgaagaggatgagaacgaattggaagctttgcatgccgccttggcacaaagtgctgaagccaatttacaactgagattcacattcgtagattccccgagcagcaagcttatcgctgtacttggccgtactggccagcaggaacaaagaattcaaagcgagatctgtgtactgcttcgatccgcatctcatcgtcgctctccctgggtcagttccttactagagtcgctccgaacgcacggcttctctatctcaattgagtccctacaaacaggtctaccggacggaaacatcgtggaccatttcatagtgattgacgatggtccagatccaattctttcagactctgtttgtttcaactccgtcaaaacgctactaaagcatccgactcgtggtctctggatctgccctgatcttccagatcagatgcatcagatcactgggttcgcacgcacggctcacgcagagaacagccagcttcaaatggctactatacactcggctgtcaattttcctgacgacgaaataagcacccaacgcttagtacaagttatgaagttttgcttcagtcgctttgaagtaagcgatgccgatacactttcggaacgggagtataggatcgattctactggtactgtcatgattccccgtttacgcagcaatgataggctcaaccaaatcgtgtctggtactgccaatgaaaatgaacaacaggttgaaatgtgccgctttatcgatagctcacagcgtcttattcattttcctgattacaagtccaaggcacgtacagtaagcctttttgttgaggaccaagacattcaggcgtgggactcaggggaagacgatattgagatccaagcccgagcgtttcatttaaaccgctcttatcgcactaataccaaaaccatcttaggaggaacaatcaatagagtcggaagcgccgtgcgcgactttatgcccggagatcatgtgattgcaataggaccatcctttggcgcgaataagatacgcatccatcaggaccacgtagtccatttgccaccggatatggatataactgatacaattggacttcttccgagcctgctagccgcatattatgcattgcaagagcttgcccgcttgaaggcggcagctcaagtgctagtctgcggagcgttgactgcagcgggacggggaatcgttgcgatggctcagtcgatcggttgtcacatcgaggttctcgcggaagactacgcagaatcacagaaaattatggggacttttggaataaaggccgaccaggtggttatggccggaacacatatacgttcgccaggaagggataacaatttgcgtggagggttagacgtcatcgtcctagccgatgaccgagatgtcccaccagagatgatgagacgactgaaggtattcggacacgttatttcgatgagacacccttcacagtcctcgaacttgccaaggactattcgtaatgccacgataagcttttgcgacgtcgaagacattgtcctgctcgacgctgaggttttagtgaatattctttccaatgtcgcccctgttctgcaaagaatttcaagaccgggccacaatgtattcacttgcgatgtctctgaaattgtagaggcattgcagcttcttgacagtggcgtacaccctgccattactctaactgcggactataactcagtcgtaccgactaatgtgcagttaaggaaggcgaccgacttttgggaggactgtgacggtgcgattgtcattgcgggaggtctcggtgatattggccggcgactgatgcatctgatggcgggtcgaggcgctaggcatttcataaccctctcacgcaaggttgtgcgagacgaagaccgcgatgttctcctgagccaactccaaagcattcgagcgggatgtcatctctactgcttgaggtgtgatatcacatcagaggcagatataagagatgtcgctacaaaaatcgttggtttaggactgccacctgttataggcgtcatccaatcgactgtcattctccaagatcgaacgctggattcgatgagctttgaggactttcttgtgccaacacgcgccaagatcgacggcacacttctccttaaaaagttgctcgtctctcctaagactaggttctttttgatgctgtcatccgctgcaactatcgtaggaacaagcggccagggcaactacaacgcagggaatgctgtccaagatgccatttcgcaaacttattctgcagcaaactgccagttcatgacgctcagtatcggctggatcgaggacgccgttgccactatagatcacaaggcgagaatgcaaggtctgagacgcgctgggcttcgtagcattacatcctcggaattatcgagatatcttgatcatgcgctcgatgctgcgatgaacaaaaaacgccttgcgcatacaattatcggattcgacaatgattctctgacacaggcagctagtgcaaatggaaattgcaacatacatgctgcaatattccggcacgtatacagccgtagggagaagaaaactttcgctcccgaaacagagacactcactcttgatcaagttgtcgcgaacggtgatcacaaggcaatagtcgattttgtcgccgactcgatcgtggcaagactgacgcaggtcctgtccaccgatgctatgcgtattcatcgtgagaacggctcgatcttggatctgggtcttgactcccttattgcaatagagatgcgcaattggatcatgcatacctttgacgcacccatacagtcttcagaaatccttcaagaccagaccatcttttcgcttgcacaacgggtatctgatcgatcgcgaaaactctcatgcgactcaaacgggcatacaagggccgatgccccagatacgcaacccctaggaagccgtgttgataaacaacctaacgggatccacgttgcccttccggcaatgccgctccctaagattgaagatacgcttcggcaattgcaagagtctcgtcgcgccgtcgactccaaggctgaccaaaaagcactcgccgattccattgccgatttccttcaaacagaagcccccggtctacagtcgcgactggagaccgtagggccggatcaaatagcagataattatgatagacaagtccatcttgagcgacgcgatcctgtccaagattctggccttttcacgcttattcaccccgtcgaagcacccgcacattctcaagctatgcgggcggcagttttgacggtagcaggtattcaatttgcgcgcaacttaacctcaggtacactcggcgcagacgctgctcgttcattgaaagcaaggagcaacttgtcggattggactttctacgctacacggagaccagggcttgatatcgatgagaacatatgctttgctccaaatgacaatgttgccgtgttgagtcgtgggcgcgttttccagctgaagatagacgacccatcattgcccctgagtgtgtccgccatgcatgcctcttttttgcagattcttgaagtgcagcccgggatagaaccccgcgtgggtattctcactgccgacgacagagattcatgggctttgctgcgacagagtctcgagtcgaaccctgcaaatacagagatgtttgcttgcttggacacgtgcgcattcatcgtgtgtctagacgatgaagcgccgctcacacccgggcaacgttttacccaattccttctcaacggccaaagacccttttccaatagatggcttgacaagcccgtacaatttgccgtgactgctaatggcctgtctgctggtatttatgaacactcgaaggttgacggcctggacggaaggttggttcatcgtcaagttgtgaaagctctcatgtcctccaggagcgacctatcaccaggacaggtcaacggacatgtagaaacagggtcagcagcagagtcatacactgtccgagagctttattggaattgtagcagtaatgtgaaagagcgcatccagtgcttggaagctgatttctcagcgccgtcttcaccatatgggcccattgagcacaagctcttgacagttcaaaacctagggcgctcgttcatgcgcagtcatggtgccattcccaactccactgcacatgtctgtatcattcttgcactgtatctggttgatggccgtttccgtgcggcatgggagccggtgtctctggctggattcttccgtggcaggcgtgattacatccagaccttgacgccatcgatgcggaaatttgtcgaaacgataacagcgttgattaaaatgcatggagacctcaacgcgcaagatcaagccactcttgaacaagcacgttcgcgtttgcgagaagccgcgacggcgcactccaagatggtagcggttgcctcacgaggcggtggctttgtcaataatctatacgcaatacgtggcgtcttgacagacgcggggaatgggtcgaaggacttgccagccctcttcgaaacaagcgcctggcatgcaacaaagtggattgggccaggacaggatctcaagattggctttgagccttgggaggaggacgaggatgtggaaggtgttgctgggagaggagttcatagatggagagaggccggattcctcttgcatggagaaaaaggtattcttgtgcaatgcgatgtctctaaaaatgacatagacttcaacgtgtcaactcgacctggctatgcggatcttgtctgcaccgctctcgaaagcgcagcaaatgttatcagacatctgctagctggtcaacaaggggacacacactag

SEQ ID NO: 10934 - protein, 2987 aa, Muscodor strobelii
  misc_feature: SGI Peptide ID NO. 563492
  misc_feature (535)..(878): Pfam Id: PF00698 Pfam Desc: Acyl transferase domain
  misc_feature (1973)..(2143): Pfam Id: PF00106 Pfam Desc: short chain dehydrogenase
  misc_feature (2373)..(2977): Pfam Id: PF00755 Pfam Desc: Choline/Carnitine o-acyltransferase
  misc_feature (10)..(261): Pfam Id: PF00109 Pfam Desc: Beta-ketoacyl synthase, N-terminal domain
  misc_feature (269)..(387): Pfam Id: PF02801 Pfam Desc: Beta-ketoacyl synthase, C-terminal domain
  misc_feature (1973)..(2156): Pfam Id: PF08659 Pfam Desc: KR domain
  misc_feature (535)..(832): Pfam Id: PF00698 Pfam Desc: Acyl transferase domain
  misc_feature (2511)..(2667): Pfam Id: PF00755 Pfam Desc: Choline/Carnitine o-acyltransferase
  misc_feature (1973)..(2133): Pfam Id: PF08659 Pfam Desc: KR domain
  misc_feature (13)..(2336): NCBI GI: 238840710 Blast Desc: polyketide synthase [Microsporum canis CBS 113480]
  misc_feature (1)..(2341): NCBI GI: 222090401 Blast Desc: RADS1 highly reducing polyketide synthase [Chaetomium chiversii]
  misc_feature (11)..(1268): NCBI GI: 225679591 Blast Desc: fatty acid synthase S-acetyltransferase [Paracoccidioides brasiliensis Pb03]
  misc_feature (1)..(2155): NCBI GI: 187940971 Blast Desc: reducing polyketide synthase [Pochonia chlamydosporia]
  misc_feature (45)..(2333): NCBI GI: 145254102 Blast Desc: An18g00520 [Aspergillus niger] gi|134084099|emb|CAK43128.1| protein product [Aspergillus niger]
  misc_feature (11)..(1161): NCBI GI: 171688048 Blast Desc: protein product [Podospora anserina] gi|170943986|emb|CAP70096.1| protein product [Podospora anserina]
  misc_feature (11)..(1257): NCBI GI: 40787340 Blast Desc: polyketide synthase [Botryotinia fuckeliana]
  misc_feature (11)..(1268): NCBI GI: 242809371 Blast Desc: polyketide synthase, [Talaromyces stipitatus ATCC 10500] gi|218715980|gb|EED15402.1| polyketide synthase, [Talaromyces stipitatus ATCC 10500]
  misc_feature (1)..(2339): NCBI GI: 189196764 Blast Desc: phenolpthiocerol synthesis polyketide synthase ppsB [Pyrenophora tritici-repentis Pt-1C-BFP] gi|187980599|gb|EDU47225.1| phenolpthiocerol synthesis polyketide
  misc_feature (11)..(1260): NCBI GI: 255953603 Blast Desc: Pc21g05080 [Penicillium chrysogenum Wisconsin 54-1255] gi|211589265|emb|CAP95405.1| Pc21g05080 [Penicillium chrysogenum Wisconsin 54-1255]
  misc_feature: Useful for fungicidal and/or biocontrol applications
MPSEKSRGVAPIAIVGMSCRLPGGANSVDELWELVSRRGQAWSPVPSDRFNESAFHHPSPDNGTGLNHHPGGHFISGDLRDFDHSFFRISSQQAAAMDPQQRLLLELTYEAIENAGLDMKKIAGTNTSVHVATFTADYERNLYKDPMDMPAYYMTGTDIAIMSNRISHAFDLRGSSMTLDTACSGGLVSLHQACLGLLNGESDTAIVAAANVTLSPDHHIGMSSLHLIGSTGRSYPFDHRGDGYGRGEGCAVLVLKRLDDALLCRDPIHAVVRGTAVNQNGHNTRGITNPSGDAQIRLIRAAYDRAGLDPHGIAYVEAHGTGTQAGDKEELRAIAEVFTNPCRSLPLYVGSIKGNIGHTENTSGLAAILQAALVLNKNTIPPVAGFEKPKEGLPLDYIHIPTKPTPFPQENHIIPRVSVNNFGFGGTNAHAILEKAPVKDGRLEESLDPLPRLFIFSANSQTSLLSMTNAYHIYLDGHQTINLQNLSYTLCRRRTAMPWRFSCVAYDLESLKAKLKSSHLAIQRLMPNAGSREKIFVFTGQGAQWAGMGRELLFGSAASPVFRDSIRVSRDILFKLGATWNLEDELLSTDESASARFGTASFAQPATTALQIALIMLLKAQNIKPDIVVGHSSGEIAAAFTAGYLTHHTALAIAFYRGSIPVLCKKRGLPRGGMMAIATSPDKVMAFLEALTQGTAVIACINSPKSVTVSGDLSAIEELSSRLDGERSISYRRLFVDTAYHSKHMQTIADDYMSLIENLDYNADGSEKVPFISSVSGQFKSSGFGSRYWVANLLSPVLFSDAIQRIGRHYLSGPQQLRGAAIEVGPHPALAGPFQQSLEGVGDQNLKFDYTSILRRKSDATSSCLEFVGQLFQWGLKLDFDTVFGFAPGLGSSFSNATVLTDLPTYSWDHDVKHWNESRLSSEYRHRREPYHDLLGVRIVDSTSIEPRWRYMVDVSLLPWLADHVVDDLVIFPGSGYLCMALEAMLQLNREMHVRSSFDTFVFHDVSFLRALVISRSSKRTEMQLSLKQNRAKATSFEFSVTALSDNKWYEHCCGTIQGRTSDQGARITANELNSTISRIGLSDDSIIMNNEELYEEFEASGNQYGPTFRGCSRLEMASDASRLIAEVVIPDIRSVMPSQSLRNHLIHPSTLDILLHTGLPMAKTLLGAGSVMPVAIEELSIHTSELLPRDPGNILDVTAELVSSGFRTANVSYQVSSKNIPVLSISGLEMRSMAGSDDKADKMVPVESICYDLSWQLDVDFTRASDLSPRSALLDLIRHLCFKYGDVSIAELSMNDGQLTSSILEAFDVESNTLSAYYRVNLGNSNDHHDVGVDQLIHPRIQQLELDLEADLAAQGIETGSCEVVLASSIENLKHAMVIAKIEGMILLVLEEDENELEALHAALAQSAEANLQLRFTFVDSPSSKLIAVLGRTGQQEQRIQSEICVLLRSASHRRSPWVSSLLESLRTHGFSISIESLQTGLPDGNIVDHFIVIDDGPDPILSDSVCFNSVKTLLKHPTRGLWICPDLPDQMHQITGFARTAHAENSQLQMATIHSAVNFPDDEISTQRLVQVMKFCFSRFEVSDADTLSEREYRIDSTGTVMIPRLRSNDRLNQIVSGTANENEQQVEMCRFIDSSQRLIHFPDYKSKARTVSLFVEDQDIQAWDSGEDDIEIQARAFHLNRSYRTNTKTILGGTINRVGSAVRDFMPGDHVIAIGPSFGANKIRIHQDHVVHLPPDMDITDTIGLLPSLLAAYYALQELARLKAAAQVLVCGALTAAGRGIVAMAQSIGCHIEVLAEDYAESQKIMGTFGIKADQVVMAGTHIRSPGRDNNLRGGLDVIVLADDRDVPPEMMRRLKVFGHVISMRHPSQSSNLPRTIRNATISFCDVEDIVLLDAEVLVNILSNVAPVLQRISRPGHNVFTCDVSEIVEALQLLDSGVHPAITLTADYNSVVPTNVQLRKATDFWEDCDGAIVIAGGLGDIGRRLMHLMAGRGARHFITLSRKVVRDEDRDVLLSQLQSIRAGCHLYCLRCDITSEADIRDVATKIVGLGLPPVIGVIQSTVILQDRTLDSMSFEDFLVPTRAKIDGTLLLKKLLVSPKTRFFLMLSSAATIVGTSGQGNYNAGNAVQDAISQTYSAANCQFMTLSIGWIEDAVATIDHKARMQGLRRAGLRSITSSELSRYLDHALDAAMNKKRLAHTIIGFDNDSLTQAASANGNCNIHAAIFRHVYSRREKKTFAPETETLTLDQVVANGDHKAIVDFVADSIVARLTQVLSTDAMRIHRENGSILDLGLDSLIAIEMRNWIMHTFDAPIQSSEILQDQTIFSLAQRVSDRSRKLSCDSNGHTRADAPDTQPLGSRVDKQPNGIHVALPAMPLPKIEDTLRQLQESRRAVDSKADQKALADSIADFLQTEAPGLQSRLETVGPDQIADNYDRQVHLERRDPVQDSGLFTLIHPVEAPAHSQAMRAAVLTVAGIQFARNLTSGTLGADAARSLKARSNLSDWTFYATRRPGLDIDENICFAPNDNVAVLSRGRVFQLKIDDPSLPLSVSAMHASFLQILEVQPGIEPRVGILTADDRDSWALLRQSLESNPANTEMFACLDTCAFIVCLDDEAPLTPGQRFTQFLLNGQRPFSNRWLDKPVQFAVTANGLSAGIYEHSKVDGLDGRLVHRQVVKALMSSRSDLSPGQVNGHVETGSAAESYTVRELYWNCSSNVKERIQCLEADFSAPSSPYGPIEHKLLTVQNLGRSFMRSHGAIPNSTAHVCIILALYLVDGRFRAAWEPVSLAGFFRGRRDYIQTLTPSMRKFVETITALIKMHGDLNAQDQATLEQARSRLREAATAHSKMVAVASRGGGFVNNLYAIRGVLTDAGNGSKDLPALFETSAWHATKWIGPGQDLKIGFEPWEEDEDVEGVAGRGVHRWREAGFLLHGEKGILVQCDVSKNDIDFNVSTRPGYADLVCTALESAANVIRHLLAGQQGDTH

SEQ ID NO: 10935 - DNA, 2264 bp, Muscodor strobelii
  misc_feature: SGI EST ID NO. CUFF.25857.0
  misc_feature: Variant of the nucleotide sequence at SEQ ID NO 10933
cactcactcttgatcaagttgtcgcgaacggtgatcacaaggcaatagtcgattttgtcgccgactcgatcgtggcaagactgacgcaggtcctgtccaccgatgctatgcgtattcatcgtgagaacggctcgatcttggatctgggtcttgactcccttattgcaatagagatgcgcaattggatcatgcatacctttgacgcacccatacagtcttcagaaatccttcaagaccagaccatcttttcgcttgcacaacgggtatctgatcgatcgcgaaaactctcatgcgactcaaacgggcatacaagggccgatgccccagatacgcaacccctaggaagccgtgttgataaacaacctaacgggatccacgttgcccttccggcaatgccgctccctaagattgaagatacgcttcggcaattgcaagagtctcgtcgcgccgtcgactccaaggctgaccaaaaagcactcgccgattccattgccgatttccttcaaacagaagcccccggtctacagtcgcgactggagaccgtagggccggatcaaatagcagataattatgatagacaagtccatcttgagcgacgcgatcctgtccaagattctggccttttcacgcttattcaccccgtcgaagcacccgcacattctcaagctatgcgggcggcagttttgacggtagcaggtattcaatttgcgcgcaacttaacctcaggtacactcggcgcagacgctgctcgttcattgaaagcaaggagcaacttgtcggattggactttctacgctacacggagaccagggcttgatatcgatgagaacatatgctttgctccaaatgacaatgttgccgtgttgagtcgtgggcgcgttttccagctgaagatagacgacccatcattgcccctgagtgtgtccgccatgcatgcctcttttttgcagattcttgaagtgcagcccgggatagaaccccgcgtgggtattctcactgccgacgacagagattcatgggctttgctgcgacagagtctcgagtcgaaccctgcaaatacagagatgtttgcttgcttggacacgtgcgcattcatcgtgtgtctagacgatgaagcgccgctcacacccgggcaacgttttacccaattccttctcaacggccaaagacccttttccaatagatggcttgacaagcccgtacaatttgccgtgactgctaatggcctgtctgctggtatttatgaacactcgaaggttgacggcctggacggaaggttggttcatcgtcaagttgtgaaagctctcatgtcctccaggagcgacctatcaccaggacaggtcaacggacatgtagaaacagggtcagcagcagagtcatacactgtccgagagctttattggaattgtagcagtaatgtgaaagagcgcatccagtgcttggaagctgatttctcagcgccgtcttcaccatatgggcccattgagcacaagctcttgacagttcaaaacctagggcgctcgttcatgcgcagtcatggtgccattcccaactccactgcacatgtctgtatcattcttgcactgtatctggttgatggccgtttccgtgcggcatgggagccggtgtctctggctggattcttccgtggcaggcgtgattacatccagaccttgacgccatcgatgcggaaatttgtcgaaacgataacagcgttgattaaaatgcatggagacctcaacgcgcaagatcaagccactcttgaacaagcacgttcgcgtttgcgagaagccgcgacggcgcactccaagatggtagcggttgcctcacgaggcggtggctttgtcaataatctatacgcaatacgtggcgtcttgacagacgcggggaatgggtcgaaggacttgccagccctcttcgaaacaagcgcctggcatgcaacaaagtggattgggccaggacaggatctcaagattggctttgagccttgggaggaggacgaggatgtggaaggtgttgctgggagaggagttcatagatggagagaggccggattcctcttgcatggagaaaaaggtattcttgtgcaatgcgatgtctctaaaaatgacatagacttcaacgtgtcaactcgacctggctatgcggatcttgtctgcaccgctctcgaaagcgcagcaaatgttatcagacatctgctagctggtcaacaaggggacacacactaggtgtaagccatatcatcaattggtatctatgcagaa

SEQ ID NO: 10936 - DNA, 2790 bp, Muscodor strobelii
  misc_feature: SGI cDNA ID NO. 563493
  misc_feature: Encodes the peptide sequence at SEQ ID NO 10937
atggatcccttgagtgcggtaggtctagcagctagcgtagtccagttcgttagcttcgcgtcgcaccttgtttctcgcacgaaggagattcacgcatcagcgtcagggcagacggaggaggcaattacagttgaaacgacgtacgccactcttcatgacttgagcaagcgccttgaaatctctgcaaagcgagatccaaggctggagatcgtccagggaaataatgatttcatcaggcacgtctttgccatcaacgatttatcccgcatctgtgctagtgaatgccagaaattgttggacatggtggccaaattgaaagcttgcaacggcgggacacagcggcgatggcaagctatcaagatcgcattcaagtctgtgtacaaaggaagcgagttggaggagctggaacagaggctccaacacactcaaatcacgctcacgctgcatgtgtgctctttgactaacctttggcatgcggattttagtaaacatttgaatcagtttcgtatcgaaagcatggagctcaatgcccagcactccacgaaactaaacaacatcgcgcaggcactcgataggctctctgcactaatcgcatcagctcgatcgattacaacgccaaatggtttcataccaaaagacatcgcatctttagaagaacagatgacgcgcttgtctctctcaaaatcagatgtgaacagagagaatacaatactcagatctctcagctttgatagtagacctgtccgtcatagctcgatcgctgaggccacgcggcacaccttcgagtgggcgctccaacaaactagacatcgacgtgggaattcggctgagagtcacctactcaaatggcttagagagggcgatggctttttctgggttacaggtaaaccaggttctggaaagtcaacgttcatcaagtacgtggcggatagcccagtcactttgtcagcccttgctcaatggtcatatcccaagcgacccgtaatagcaagccattacttttggagtgctgggaccccattgcaaaagtctcagaaaggcctcatccagacccttctctacggaatattttgccagctgccagatctcattgagatagcgtgcagcgaacgttgggctaaaccaattgagaaactagaattcgagccttggactcttccggaacttgatcgtatcttgcagcgtgttgccagtttcgatgatatccccaataagttttgtttcttcgttgatggactagacgaatacgacggagatcatgtagacttttgtcagaccttacataaacttggacagtcaccacatatcaaaatatgtgtgtctagtcgaccttggaacgtgttcaacgattcatttggccacaatagtcaagactcacaactccacatccacgaactgacgcgttacgacatccgggaatatgctcaacagcgactgcgtgatcatccacgctggaaagaacttgacggagagacgaccagagggtcttggatcatcgacgagatcactaatcgagcttcaggagtattcctatgggtctttctagtcacgaaagagctccgcaatggtcttagtgagtacgatagcttttcagatattcaagagcgcctaaacagcatccccagcaatctagaagccttcttcaaacagattcttcagtctgtcgacgtattctaccataaaaagatggctgcaacgctgcagcttgcgctagctgcatcatggcccgctccggttgccgtttatgggtttctagacgacgaatataatgatgtaaactatgcacttaagcttccagtgcagactatggaagccagtcaaggcgccgcgaagcggaagttagtgatgcatcgtcttagcagccgctgtaaagggcttattgatgtgaaccgaaaaacgctttgcgttgagttcctccacagaagcgtaatggacttcttacgcacagaagagatgtcggaattcttaaggaagaaaggccctataggctttgatgcaagcatctcactaataagagcgtatactgcatacatcaagactaccaaattccggcaattcgttgataggactgctttcaaccaacatactgcctccaccttaatgcaagccatacgcgaggtgatgacgcaagctgaagagactcagtgtgcagtagaagacatgtactatccgcttctggacgaactagatcgctgcatcccagaaatgcaaatgaaacagcaagcaagattgaatgtatggggcaacccttcgaaccctgttgcacttttctttcgtgaagcagtcgttgatactagcttggcagggtatctcggatacatcctgccaaatgagccaaactacttctccgacttcgaaagacccgttctctcttatgttctagactcagtcaatgaaagcgagctacctacgtctcagatcagaaggaagatccgcctggtccgttgcttattggagaacggatgtgaccctaacgcagtgtactacgactcaactgatatcactcatcggcagaggacggcgtggattgattacaccacgcaattgagctcaaaaaggggtgataatcaagagtcgacacagatatccagctcagagcgaccagacgtaaaagaattgccatcgttgttgctgcagcatggcgcagatccgacgctctattcttgctcgtctggaacgtcgctgggagtaggggccagacccacttcgataaagagatctgtagggccatacaccatggataacggcgatatgcctgccaataagcggctcaagcaaaagactacgtga

SEQ ID NO: 10937 - protein, 929 aa, Muscodor strobelii
  misc_feature: SGI Peptide ID NO. 563493
  misc_feature (1)..(683): NCBI GI: 256725921 Blast Desc: NECHADRAFT_82115 [Nectria haematococca mpVI 77-13-4]
  misc_feature (1)..(893): NCBI GI: 256730922 Blast Desc: NECHADRAFT_84637 [Nectria haematococca mpVI 77-13-4]
  misc_feature (177)..(685): NCBI GI: 171678826 Blast Desc: protein product [Podospora anserina] gi|170937483|emb|CAP62141.1| protein product [Podospora anserina]
  misc_feature (276)..(790): NCBI GI: 171687547 Blast Desc: protein product [Podospora anserina] gi|170943735|emb|CAP69387.1| protein product [Podospora anserina]
  misc_feature (1)..(805): NCBI GI: 225684243 Blast Desc: conserved [Paracoccidioides brasiliensis Pb03]
  misc_feature (1)..(886): NCBI GI: 226293863 Blast Desc: conserved [Paracoccidioides brasiliensis Pb18]
  misc_feature (1)..(895): NCBI GI: 46111055 Blast Desc: FG02409.1 [Gibberella zeae PH-1]
  misc_feature (2)..(885): NCBI GI: 169616506 Blast Desc: SNOG_11426 [Phaeosphaeria nodorum SN15] gi|160703200|gb|EAT81134.2| SNOG_11426 [Phaeosphaeria nodorum SN15]
  misc_feature (1)..(810): NCBI GI: 261190024 Blast Desc: conserved [Ajellomyces dermatitidis SLH14081] gi|239591250|gb|EEQ73831.1| conserved [Ajellomyces dermatitidis SLH14081]
  misc_feature (7)..(899): NCBI GI: 256730066 Blast Desc: NECHADRAFT_82694 [Nectria haematococca mpVI 77-13-4]
MDPLSAVGLAASVVQFVSFASHLVSRTKEIHASASGQTEEAITVETTYATLHDLSKRLEISAKRDPRLEIVQGNNDFIRHVFAINDLSRICASECQKLLDMVAKLKACNGGTQRRWQAIKIAFKSVYKGSELEELEQRLQHTQITLTLHVCSLTNLWHADFSKHLNQFRIESMELNAQHSTKLNNIAQALDRLSALIASARSITTPNGFIPKDIASLEEQMTRLSLSKSDVNRENTILRSLSFDSRPVRHSSIAEATRHTFEWALQQTRHRRGNSAESHLLKWLREGDGFFWVTGKPGSGKSTFIKYVADSPVTLSALAQWSYPKRPVIASHYFWSAGTPLQKSQKGLIQTLLYGIFCQLPDLIEIACSERWAKPIEKLEFEPWTLPELDRILQRVASFDDIPNKFCFFVDGLDEYDGDHVDFCQTLHKLGQSPHIKICVSSRPWNVFNDSFGHNSQDSQLHIHELTRYDIREYAQQRLRDHPRWKELDGETTRGSWIIDEITNRASGVFLWVFLVTKELRNGLSEYDSFSDIQERLNSIPSNLEAFFKQILQSVDVFYHKKMAATLQLALAASWPAPVAVYGFLDDEYNDVNYALKLPVQTMEASQGAAKRKLVMHRLSSRCKGLIDVNRKTLCVEFLHRSVMDFLRTEEMSEFLRKKGPIGFDASISLIRAYTAYIKTTKFRQFVDRTAFNQHTASTLMQAIREVMTQAEETQCAVEDMYYPLLDELDRCIPEMQMKQQARLNVWGNPSNPVALFFREAVVDTSLAGYLGYILPNEPNYFSDFERPVLSYVLDSVNESELPTSQIRRKIRLVRCLLENGCDPNAVYYDSTDITHRQRTAWIDYTTQLSSKRGDNQESTQISSSERPDVKELPSLLLQHGADPTLYSCSSGTSLGVGARPTSIKRSVGPYTMDNGDMPANKRLKQKTT

SEQ ID NO: 10938 - DNA, 4159 bp, Muscodor strobelii
  misc_feature: SGI EST ID NO. CUFF.25867.0
  misc_feature: Variant of the nucleotide sequence at SEQ ID NO 10936
ctgctagtgcaaacccgcacttcacgagtaatgcaggtgtttaccttacaaaatcaacctgcctcactagcgcgccaagccttttcacctacctacctacataccctgtagctgaaccaacaccgcctcaatttggtgttgtaccgtgttgcgctcggagcagcgcctcatttccccccctccaatgtagtacgcaagatgaggtgcgatcgggagcctgcctttgtcggcgtgaaatcaatttcgcaatatgtccttgttcgcgacgcaatcagcatgagatttgcagacccatgaaaaactcataagagtcgctacctcgcgctcggccataaagaagcgcctcaagcgccacagacaacgcagctggtgaaccttcctatcagtgtcttcttcaattgcgtcgatcaattgagaaatacctaatggccgtctcataggcatcatcaaatccctgcgcctcccttttcgaccagcggccattacggctcaataaccgttccatttccaatattgacctatctggaccatggatcccttgagtgcggtaggtctagcagctagcgtagtccagttcgttagcttcgcgtcgcaccttgtttctcgcacgaaggagattcacgcatcagcgtcagggcagacggaggaggcaattacagttgaaacgacgtacgccactcttcatgacttgagcaagcgccttgaaatctctgcaaagcgagatccaaggctggagatcgtccagggaaataatgatttcatcaggcacgtctttgccatcaacgatttatcccgcatctgtgctagtgaatgccagaaattgttggacatggtggccaaattgaaagcttgcaacggcgggacacagcggcgatggcaagctatcaagatcgcattcaagtctgtgtacaaaggaagcgagttggaggagctggaacagaggctccaacacactcaaatcacgctcacgctgcatgtgtgctctttgactaacctttggcatgcggattttagtaaacatttgaatcagtttcgtatcgaaagcatggagctcaatgcccagcactccacgaaactaaacaacatcgcgcaggcactcgataggctctctgcactaatcgcatcagctcgatcgattacaacgccaaatggtttcataccaaaagacatcgcatctttagaagaacagatgacgcgcttgtctctctcaaaatcagatgtgaacagagagaatacaatactcagatctctcagctttgatagtagacctgtccgtcatagctcgatcgctgaggccacgcggcacaccttcgagtgggcgctccaacaaactagacatcgacgtgggaattcggctgagagtcacctactcaaatggcttagagagggcgatggctttttctgggttacaggtaaaccaggttctggaaagtcaacgttcatcaagtacgtggcggatagcccagtcactttgtcagcccttgctcaatggtcatatcccaagcgacccgtaatagcaagccattacttttggagtgctgggaccccattgcaaaagtctcagaaaggcctcatccagacccttctctacggaatattttgccagctgccagatctcattgagatagcgtgcagcgaacgttgggctaaaccaattgagaaactagaattcgagccttggactcttccggaacttgatcgtatcttgcagcgtgttgccagtttcgatgatatccccaataagttttgtttcttcgttgatggactagacgaatacgacggagatcatgtagacttttgtcagaccttacataaacttggacagtcaccacatatcaaaatatgtgtgtctagtcgaccttggaacgtgttcaacgattcatttggccacaatagtcaagactcacaactccacatccacgaactgacgcgttacgacatccgggaatatgctcaacagcgactgcgtgatcatccacgctggaaagaacttgacggagagacgaccagagggtcttggatcatcgacgagatcactaatcgagcttcaggagtattcctatgggtctttctagtcacgaaagagctccgcaatggtcttagtgagtacgatagcttttcagatattcaagagcgcctaaacagcatccccagcaatctagaagccttcttcaaacagattcttcagtctgtcgacgtattctaccataaaaagatggctgcaacgctgcagcttgcgctagctgcatcatggcccgctccggttgccgtttatgggtttctagacgacgaatataatgatgtaaactatgcacttaagcttccagtgcagactatggaagccagtcaaggcgccgcgaagcggaagttagtgatgcatcgtcttagcagccgctgtaaagggcttattgatgtgaaccgaaaaacgctttgcgttgagttcctccacagaagcgtaatggacttcttacgcacagaagagatgtcggaattcttaaggaagaaaggccctataggctttgatgcaagcatctcactaataagagcgtatactgcatacatcaagactaccaaattccggcaattcgttgataggactgctttcaaccaacatactgcctccaccttaatgcaagccatacgcgaggtgatgacgcaagctgaagagactcagtgtgcagtagaagacatgtactatccgcttctggacgaactagatcgctgcatcccagaaatgcaaatgaaacagcaagcaagattgaatgtatggggcaacccttcgaaccctgttgcacttttctttcgtgaagcagtcgttgatactagcttggcagggtatctcggatacatcctgccaaatgagccaaactacttctccgacttcgaaagacccgttctctcttatgttctagactcagtcaatgaaagcgagctacctacgtctcagatcagaaggaagatccgcctggtccgttgcttattggagaacggatgtgaccctaacgcagtgtactacgactcaactgatatcactcatcggcagaggacggcgtggattgattacaccacgcaattgagctcaaaaaggggtgataatcaagagtcgacacagatatccagctcagagcgaccagacgtaaaagaattgccatcgttgttgctgcagcatggcgcagatccgacgctctattcttgctcgtctggaacgtcgctgggagtaggggccagacccacttcgataaagagatctgtagggccatacaccatggataacggcgatatgcctgccaataagcggctcaagcaaaagactacgtgagaatgtacgaagcagaaaatcgggtcgaggatctggtctggttgtcgtcttatgcatgcaagagaggtatctattcactacaattcgggctaccagggactcggcgaatttcatcctccttcactgtttgtgtcttgtattgttttcagttatcaatgtatggtacctggtacaacattgtgttactaaaaggccgtcatacgttatagcgcttactgtcaccagaacttcatcttgttcatattgtgaggcttattcgcttaggggggctggatataagggactaatctactaacacgctgcatgtgaggtaacaatctcgtctaagccgactccttcccgtagactcactcccgggcgcctcttcatcttcatctctactccagactgccttggaaatatgctcacgtgtacggaccactccttcttcgggtctacaagttcgaactcatacaaagtgacaagcgtcgcaacagttttatatacctcaagcatgcccagattttgaccgatgcacttgcgaagaccccctccgaatgacaagtcattgttgttcatctccgtcaaccgttgtctatgctcagtctcgttctccccgttagcttcatctcgcagccatctttctatcatacaatcgagtcagttatcactgtctttaggatattcaagtgatgagaaggccaattttgaatgttcacttttgattgccttgggagaggatcaaatcaaccggctcccaagatttacctcgtgaggaaaatacagactctggatgcttacctgggcgaaagtcttccgcgtcttggccccatgtttgtttgttgcgatgcaagacccaag

SEQ ID NO: 10939 - DNA, 3579 bp, Muscodor strobelii
  misc_feature: SGI cDNA ID NO. 563494
  misc_feature: Encodes the peptide sequence at SEQ ID NO 10940
atgttcacgcccgccgttaccccataccgatccatgctatatgctcttggaaatactcccgctgccagcctcacgagagcttttccgaatgggatcgatgcagatatcttattgcttggatgtggcgacgtccgcaacattctctacacggcatattgtgaacaagggcttccaaaacggaagttggacattacgtgctgcgatattgagactggtattattgcacgaaatgttgtcatactgtcactcctcattgatggagtaaatcctgatacagccatggacatatatttccatctgaacattcgtccagagtccctcgacattctccaacgccacacgaccaaattatcttctcttatggagagtatcgaaacgtggcggaatggagcttatgggaaattcatcacgttttgcgatcaaggttcactcgagcttgcgcgggggatgatcatcaagtttgcggagcccaagacaacttcggaagcgaaagctgatctgtcaaagcgactagaccacacaagagagtgcttcaagacactacatggcggtaatatgcatggcgactttcaaactttgacaggattgcgttccgcagcacctctagcccagtccgccattaaatatgcgcaactcccttacgaccactactggaaaactgggaccttcgtaaccgattcttctccattgcctaatccattattcgtacagacgctttccgagaacacgattttacattatggaacagatccaactcttgggtttcatctggcaacggctttcgcagagttggcgcctgcctcgccgcttcgacccaaaggctcaaaagaacacggcctgaacagaatagttgaggcagcgagggtgcaattccatgaatgggcatccgcgtaccaagctatgtataagaattacgtcgtcgttcgattcgccgtcgccgatgcatccaccttcggtcacgtcatgcaacatgcttccactaagtcaagcaaagccgtcaatttgtttcgccgtcgactagatgcgtctcacttggtgctaagtccaaaagactatggtgaagccggagatgccccgtcgtctttcgatattgtcgacacatccaatcttattgaccatctcggtgcaatcaacctgctcattgcaactgcacctctgctcaaagattcggctcgatctactctgtacctcgagaccttggtcaagtccgcagccacgaacaaggctcatttcgatactctgttaaaaggtcacacaccaactatctcgcttctgctaggattagctccagttgaatactgggcttcgagcacgactatctcgtcatttgatgagctaatgattggcttgtctctcgcaagagaaaacggaacacagtctcattcacgattgtcgttcaagatagccaaatacttcctgagcggaacatcaagtcgtagtgatttaaatgtgaaggcgctctctctagctaagttagcttttggggtctaccacaaaatgttccgatatgaagatcccgttgatatgatgaacctctcccgggcagaaatattacatgacaagacagccttagccttcccagtctatcatcgaggtagtttcgtgtctttcacgaagctcataagtgccaatgtgtctaccgatcttcccctcttttggaaacatctgctagtactcataaagcaagacagtcgtcgttacgctcttcagtattaccaggagtttatggttcaactgcacatccaaggcttgcatactgtagctgcacttaccgttggggctgaatcacggctgagttttctgggactagatacttgggactctgcgcccgaggtcgtgtgcgtgacgctggaagtccctcgcgagcgtttcaacgagttatatgtcagcgagagacagaagatatcaccacctaccctccggggcattgtggagctcggtggaacagactccaaacacttttttacctgtgttcaactcattttcggttcaattgatagaatggacgttgataaaaagggtactatttcgatttctgaagatacagggggctggcagggacgatcccctgtcactatttccttctactctccaactaacttgctatttacggacccttcgaatgtcaagatagggctcagcactcagcctactcttgccaatatgaatttacttgctggtttccagccaaacagcacgaacatctgcatggtaccccttaaagaagcttgtatttccaaatatcttcctggaatggacggataccctgcgacatgtgagggtgccacattaaaacatgtggactcgaccgaggaatcagtttccgacacaacaacaatgacgatgtctctgaatatgaccgacgagaaaatcgaaaccatctgcggccatgtagattttgtcactggaaaaggcaaggagctactttccaatggaaccccgatcgagatgaagcaatcctcgccgactactatagatatcgccttcggtgatggactctttgtgtatcccatccatttcccatctccagtttcacaggaaagcgccaaactacgcatcgcccgcacaacaggttacgtcgaaatccttgcgcctctcgccgatccgctgcgctccaaagcactaggactctcaacacttcccataagcctagaggaagacagtatccccgtactgtcgaacgggcaccaggtcaacctagattgtctccccatactgaatgtggaggcctcgatgaaaaggaaaaatgaatggctccaactcctaacgtccaaccagtttagtgtagcagagagggagatccgcggggaacatcccgcagaagccaagacaatgacaccgcgtatgaatctcaaagactcgctgtttacaatgttctgcctttcctcgggactccagggaggccagacgggtctattctcaatcaatcatggagacctcgggatctgcatgctcatattcgtgagcgcagtccgaatcgacggcgcggcaggcagcgtcgtcttggatgctacttgtcttccctttaccatgtctatcgtccagaacccatatctgtctgaattccttctctttctccgcgagcttgaaatctgcgccatcgacgtcgacgacaaagagatgcagctctggatgcggatgatacccgcactggcggaaagatgtcgtacctggaaccacaagaaatcatgcgaataccggaagaaaggggcgactatacctctgagcacgaagataggagaacaaatcatatgttcatgcggcaatggatatgtacccgacgaattcaagcatctgccggactgggatttagcaaagaaacatatggtaagacttgccattagcccgattttcgcggtggcgattcttgagacggtacttactaaggagcttgcggatgatgcgatgtctgagcctacgagggagaaatgtcgcaattgtcaggcgatcaccgggaagaaaacggagaagttgttgaagtgttcgagatgtaaggaggtttcttattgctcgactgagtgtcagaaggcagattggaaaacgcatagggcagaatgcaaacagcagactcttgtttag

SEQ ID NO: 10940 - protein, 1192 aa, Muscodor strobelii
  misc_feature: SGI Peptide ID NO. 563494
  misc_feature (1144)..(1186): Pfam Id: PF01753 Pfam Desc: MYND finger
  misc_feature (1)..(1187): NCBI GI: 46123869 Blast Desc: FG06312.1 [Gibberella zeae PH-1]
  misc_feature (1)..(1188): NCBI GI: 256732466 Blast Desc: NECHADRAFT_122473 [Nectria haematococca mpVI 77-13-4]
  misc_feature (1)..(1187): NCBI GI: 39944632 Blast Desc: MGG_04327 [Magnaporthe grisea 70-15] gi|145015066|gb|EDJ99634.1| MGG_04327 [Magnaporthe grisea 70-15]
  misc_feature (11)..(1189): NCBI GI: 238845315 Blast Desc: conserved [Microsporum canis CBS 113480]
  misc_feature (1)..(1186): NCBI GI: 225559243 Blast Desc: conserved [Ajellomyces capsulatus G186AR]
  misc_feature (1)..(1186): NCBI GI: 240282176 Blast Desc: conserved [Ajellomyces capsulatus H143]
  misc_feature (11)..(1187): NCBI GI: 240108142 Blast Desc: MYND finger family protein [Coccidioides posadasii C735 delta SOWgp]
  misc_feature (29)..(1186): NCBI GI: 225679992 Blast Desc: conserved [Paracoccidioides brasiliensis Pb03]
  misc_feature (372)..(1186): NCBI GI: 261354564 Blast Desc: conserved [Verticillium albo-atrum VaMs.102]
  misc_feature (57)..(1187): NCBI GI: 119187597 Blast Desc: CIMG_03846 [Coccidioides immitis RS]
MFTPAVTPYRSMLYALGNTPAASLTRAFPNGIDADILLLGCGDVRNILYTAYCEQGLPKRKLDITCCDIETGIIARNVVILSLLIDGVNPDTAMDIYFHLNIRPESLDILQRHTTKLSSLMESIETWRNGAYGKFITFCDQGSLELARGMIIKFAEPKTTSEAKADLSKRLDHTRECFKTLHGGNMHGDFQTLTGLRSAAPLAQSAIKYAQLPYDHYWKTGTFVTDSSPLPNPLFVQTLSENTILHYGTDPTLGFHLATAFAELAPASPLRPKGSKEHGLNRIVEAARVQFHEWASAYQAMYKNYVVVRFAVADASTFGHVMQHASTKSSKAVNLFRRRLDASHLVLSPKDYGEAGDAPSSFDIVDTSNLIDHLGAINLLIATAPLLKDSARSTLYLETLVKSAATNKAHFDTLLKGHTPTISLLLGLAPVEYWASSTTISSFDELMIGLSLARENGTQSHSRLSFKIAKYFLSGTSSRSDLNVKALSLAKLAFGVYHKMFRYEDPVDMMNLSRAEILHDKTALAFPVYHRGSFVSFTKLISANVSTDLPLFWKHLLVLIKQDSRRYALQYYQEFMVQLHIQGLHTVAALTVGAESRLSFLGLDTWDSAPEVVCVTLEVPRERFNELYVSERQKISPPTLRGIVELGGTDSKHFFTCVQLIFGSIDRMDVDKKGTISISEDTGGWQGRSPVTISFYSPTNLLFTDPSNVKIGLSTQPTLANMNLLAGFQPNSTNICMVPLKEACISKYLPGMDGYPATCEGATLKHVDSTEESVSDTTTMTMSLNMTDEKIETICGHVDFVTGKGKELLSNGTPIEMKQSSPTTIDIAFGDGLFVYPIHFPSPVSQESAKLRIARTTGYVEILAPLADPLRSKALGLSTLPISLEEDSIPVLSNGHQVNLDCLPILNVEASMKRKNEWLQLLTSNQFSVAEREIRGEHPAEAKTMTPRMNLKDSLFTMFCLSSGLQGGQTGLFSINHGDLGICMLIFVSAVRIDGAAGSVVLDATCLPFTMSIVQNPYLSEFLLFLRELEICAIDVDDKEMQLWMRMIPALAERCRTWNHKKSCEYRKKGATIPLSTKIGEQIICSCGNGYVPDEFKHLPDWDLAKKHMVRLAISPIFAVAILETVLTKELADDAMSEPTREKCRNCQAITGKKTEKLLKCSRCKEVSYCSTECQKADWKTHRAECKQQTLV

SEQ ID NO: 10941 - DNA, 5310 bp, Muscodor strobelii
  misc_feature: SGI EST ID NO. CUFF.25914.2
  misc_feature: Variant of the nucleotide sequence at SEQ ID NO 10939
gcgatcccttctttttgtcaaaattggttggccagagacatgtacttccatgctataacatttagcgaccgatacgattttgacgattttgacgattatccacggaactgcttgctcgagtagcccgagaccagtcggacaagtctcaccgcacattttgatctcgggacaatcgagaacctctttctctacagatttctgcaatatagtgcttgacttggaatagccacgcctggttgagcaactaatgcattgctctagttgggactttgactgaaattgcaggcagccacatcgtttggcgatactcgctccgaattagctgttccgccaacggtcatcatgttcacgcccgccgttaccccataccgatccatgctatatgctcttggaaatactcccgctgccagcctcacgagagcttttccgaatgggatcgatgcagatatcttattgcttggatgtggcgacgtccgcaacattctctacacggcatattgtgaacaagggcttccaaaacggaagttggacattacgtgctgcgatattgagactggtattattgcacgaaatgttgtcatactgtcactcctcattgatggagtaaatcctgatacagccatggacatatatttccatctgaacattcgtccagagtccctcgacattctccaacgccacacgaccaaattatcttctcttatggagagtatcgaaacgtggcggaatggagcttatgggaaattcatcacgttttgcgatcaaggttcactcgagcttgcgcgggggatgatcatcaagtttgcggagcccaagacaacttcggaagcgaaagctgatctgtcaaagcgactagaccacacaagagagtgcttcaagacactacatggcggtaatatgcatggcgactttcaaactttgacaggattgcgttccgcagcacctctagcccagtccgccattaaatatgcgcaactcccttacgaccactactggaaaactgggaccttcgtaaccgattcttctccattgcctaatccattattcgtacagacgctttccgagaacacgattttacattatggaacagatccaactcttgggtttcatctggcaacggctttcgcagagttggcgcctgcctcgccgcttcgacccaaaggctcaaaagaacacggcctgaacagaatagttgaggcagcgagggtgcaattccatgaatgggcatccgcgtaccaagctatgtataagaattacgtcgtcgttcgattcgccgtcgccgatgcatccaccttcggtcacgtcatgcaacatgcttccactaagtcaagcaaagccgtcaatttgtttcgccgtcgactagatgcgtctcacttggtgctaagtccaaaagactatggtgaagccggagatgccccgtcgtctttcgatattgtcgacacatccaatcttattgaccatctcggtgcaatcaacctgctcattgcaactgcacctctgctcaaagattcggctcgatctactctgtacctcgagaccttggtcaagtccgcagccacgaacaaggctcatttcgatactctgttaaaaggtcacacaccaactatctcgcttctgctaggattagctccagttgaatactgggcttcgagcacgactatctcgtcatttgatgagctaatgattggcttgtctctcgcaagagaaaacggaacacagtctcattcacgattgtcgttcaagatagccaaatacttcctgagcggaacatcaagtcgtagtgatttaaatgtgaaggcgctctctctagctaagttagcttttggggtctaccacaaaatgttccgatatgaagatcccgttgatatgatgaacctctcccgggcagaaatattacatgacaagacagccttagccttcccagtctatcatcgaggtagtttcgtgtctttcacgaagctcataagtgccaatgtgtctaccgatcttcccctcttttggaaacatctgctagtactcataaagcaagacagtcgtcgttacgctcttcagtattaccaggagtttatggttcaactgcacatccaaggcttgcatactgtagctgcacttaccgttggggctgaatcacggctgagttttctgggactagatacttgggactctgcgcccgaggtcgtgtgcgtgacgctggaagtccctcgcgagcgtttcaacgagttatatgtcagcgagagacagaagatatcaccacctaccctccggggcattgtggagctcggtggaacagactccaaacacttttttacctgtgttcaactcattttcggttcaattgatagaatggacgttgataaaaagggtactatttcgatttctgaagatacagggggctggcagggacgatcccctgtcactatttccttctactctccaactaacttgctatttacggacccttcgaatgtcaagatagggctcagcactcagcctactcttgccaatatgaatttacttgctggtttccagccaaacagcacgaacatctgcatggtaccccttaaagaagcttgtatttccaaatatcttcctggaatggacggataccctgcgacatgtgagggtgccacattaaaacatgtggactcgaccgaggaatcagtttccgacacaacaacaatgacgatgtctctgaatatgaccgacgagaaaatcgaaaccatctgcggccatgtagattttgtcactggaaaaggcaaggagctactttccaatggaaccccgatcgagatgaagcaatcctcgccgactactatagatatcgccttcggtgatggactctttgtgtatcccatccatttcccatctccagtttcacaggaaagcgccaaactacgcatcgcccgcacaacaggttacgtcgaaatccttgcgcctctcgccgatccgctgcgctccaaagcactaggactctcaacacttcccataagcctagaggaagacagtatccccgtactgtcgaacgggcaccaggtcaacctagattgtctccccatactgaatgtggaggcctcgatgaaaaggaaaaatgaatggctccaactcctaacgtccaaccagtttagtgtagcagagagggagatccgcggggaacatcccgcagaagccaagacaatgacaccgcgtatgaatctcaaagactcgctgtttacaatgttctgcctttcctcgggactccagggaggccagacgggtctattctcaatcaatcatggagacctcgggatctgcatgctcatattcgtgagcgcagtccgaatcgacggcgcggcaggcagcgtcgtcttggatgctacttgtcttccctttaccatgtctatcgtccagaacccatatctgtctgaattccttctctttctccgcgagcttgaaatctgcgccatcgacgtcgacgacaaagagatgcagctctggatgcggatgatacccgcactggcggaaagatgtcgtacctggaaccacaagaaatcatgcgaataccggaagaaaggggcgactatacctctgagcacgaagataggagaacaaatcatatgttcatgcggcaatggatatgtacccgacgaattcaagcatctgccggactgggatttagcaaagaaacatatggtaagacttgccattagcccgattttcgcggtggcgattcttgagacggtacttactaaggagcttgcggatgatgcgatgtctgagcctacgagggagaaatgtcgcaattgtcaggcgatcaccgggaagaaaacggagaagttgttgaagtgttcgagatgtaaggaggtttcttattgctcgactgagtgtcagaaggcagattggaaaacgcatagggcagaatgcaaacagcagactcttgtttagatactggacggggtgatttaatgatgcaggatgcatgagctggaaaatcgttgtagctgaagcgatgtagttattctcaggacgcaagatgaggtgtataagggtgttgatactccaaatgcagtacgttctgtcatggtttagggacaggtggcgtctaggaataactgataaacaggcctggagccctgtaactacagcgcccgcaccccctagcatcactgaaaattagcgaacatcgacccctagctcactaaccctaatagctagacgacactcggcgcgaatccattcagacacatttctacatctaaggaaatctaggtatctactagtattccagatgcatctcacagccgaccctcgtttggttaacatacgatccaaagtgataatcctacgcgggagcatttgcgccaaagataacgaagccatcgacaaggcagtggaaaggatgcagaagaaaagagagaagtggataaaaacaggaaaagaaggtggaaggctgggtagccggcggtagaataaccaagtaatcaatgaaggttgacaaaatgccttttaacgtcatgcgggacggagcagccactccttactctacatcacttacatacctaattgctgtatcacagatacagaatcatatcattacaatcagcagatgcttacctgagtacacattcacttacacatactcaccacatgatgtgtgggttatctgtgtctgcgttaataatgctctacacagttgggctttcttcttagccattcccatgatctctctcatgatctgggtctcatctgctctctctctcatcaacttctcattacacccgctgtcacgctctctcatcacacccgctgtcacgctctctccatcacccaacactcccctctctctgtttgttctgtttgttttgcagcaagcttcttttttttttttttttttgttctgtcgcacactaagtatgctcatctctctgatcactttctccagccataatgatgttcaggcgagcagatctaagagagggaagaatcggacctggtgtagtcacagattctctgattgtttttttcttttgattctttcttttgtagcacaccttctggtcgctcatctctctgccatcatttgcttccaagccactatcatgagtaggcgagccaagagaggaaagaatccaacttagatagttatagattctgtattgtttttttttttttcttctgtgtggtttgatgaacacacacaacacacatgcacacatactctgtcattcacttctctctgccaacaactcttttgccattttgatgaggcgagttggtctaagaagacaagacaagagaggaaagaatcgtggacatggtagtaccagattctgg

SEQ ID NO: 10942 - DNA, 1251 bp, Muscodor strobelii
  misc_feature: SGI cDNA ID NO. 563495
  misc_feature: Reduced expression when VOC is produced
  misc_feature: Encodes the peptide sequence at SEQ ID NO 10943
atgtttattggaggtctgaactgggagacaactgatgaatctcttcgtgactacttttcccagtttggcgaagtgaccgaatgcactgtcatgagagacggttctaccggacgctctcgtggattcggatttctcacgttcaaggatcccaagacagtcaacattgtcatggtcaaggagcatttcctagacggcaaattgattgaccccaaacgagctatccctcgcgatgagcaagagaaaacctccaagatcttcgttggcggcgtgagtcaggataccaccgagaccgagttcaaggactactttgcccggtttggccgcgttgtggatgcaacgctcatgatggacaaggacaccgggagaccccgcggcttcggattcgtcactttcgagaacgaagttggtgtcgaggcatgcctgaatactcctctggaaatccatggcaaagcgattgaggtcaagaaagcccaaccgcggggcaacatgcgagaggaagaggaggccgctagacgtggcaagttcaacaagaaaggtggcatggatgatcagagcaacgcccagaaccagatgggaaaccagatgaaccaaggtggtatgacgcctcaggtcatggctcagtacatgcagagaatgcaacaggtcatggccatgatgcaacagcaagcagccatgaaccgaggtatgggtatgaatcccgctatgatgcagatgatgcagatgcagcagatgcagcaaatgcagaaccagatggcccagggcggcggcaacaactccaataatcctatggcggggatgaaccaggccatgatgcagcaaatgcagaatcagatgatgggcaactccggaggtcagagtcaaggccagggcaacgatgagcagcagggctatggtgattacaaccagcagcaaatgtataaccaacgaggcggcggaggtcgacggggaggtcgcggtggatataaccagaactacggcaatatggggggcggcggtgggggcggtggtgatccgacctcgtgggagggcatgtatgacgacgtcccccagccaaactttaaccaaggaggacgtggaggtggatatcaccgtggccgaggcggctacaaccagaaccaggctccggctgaccccaaccaagcccctccgcccaacgctccgactggccccaaaaatgctggcaagcccggtgctaactatcgtggtggcggcagaggaggtagccgtggtttccacccttacggtcgctag

SEQ ID NO: 10943 - protein, 416 aa, Muscodor strobelii
  misc_feature: SGI Peptide ID NO. 563495
  misc_feature (85)..(154): Pfam Id: PF00076 Pfam Desc: RNA recognition motif. (a.k.a. RRM, RBD, or RNP domain)
  misc_feature (1)..(70): Pfam Id: PF00076 Pfam Desc: RNA recognition motif. (a.k.a. RRM, RBD, or RNP domain)
  misc_feature (1)..(234): NCBI GI: 46137515 Blast Desc: FG10273.1 [Gibberella zeae PH-1]
  misc_feature (1)..(233): NCBI GI: 256732041 Blast Desc: NECHADRAFT_41418 [Nectria haematococca mpVI 77-13-4]
  misc_feature (1)..(234): NCBI GI: 261351983 Blast Desc: nuclear polyadenylated RNA-binding protein [Verticillium albo-atrum VaMs.102]
  misc_feature (1)..(234): NCBI GI: 116197887 Blast Desc: CHGG_07099 [Chaetomium globosum CBS 148.51] gi|88178378|gb|EAQ85846.1| CHGG_07099 [Chaetomium globosum CBS 148.51]
  misc_feature (1)..(224): NCBI GI: 154296333 Blast Desc: BC1G_12993 [Botryotinia fuckeliana B05.10] gi|150843451|gb|EDN18644.1| BC1G_12993 [Botryotinia fuckeliana B05.10]
  misc_feature (1)..(224): NCBI GI: 156055736 Blast Desc: SS1G_05220 [Sclerotinia sclerotiorum 1980] gi|154703004|gb|EDO02743.1| SS1G_05220 [Sclerotinia sclerotiorum 1980]
  misc_feature (1)..(214): NCBI GI: 258574483 Blast Desc: UREG_00938 [Uncinocarpus reesii 1704] gi|237901689|gb|EEP76090.1| UREG_00938 [Uncinocarpus reesii 1704]
  misc_feature (1)..(225): NCBI GI: 259483749 Blast Desc: TPA: heterogeneous nuclear ribonucleoprotein HRP1 (AFU_orthologue; AFUA_2G06090) [Aspergillus nidulans FGSC A4]
  misc_feature (1)..(225): NCBI GI: 67900918 Blast Desc: AN7446.2 [Aspergillus nidulans FGSC A4] gi|40742836|gb|EAA62026.1| AN7446.2 [Aspergillus nidulans FGSC A4]
  misc_feature (1)..(168): NCBI GI: 171694297 Blast Desc: protein product [Podospora anserina] gi|170947097|emb|CAP73902.1| protein product [Podospora anserina]
  misc_feature: Useful for introducing or modulating the production of volatile compounds
MFIGGLNWETTDESLRDYFSQFGEVTECTVMRDGSTGRSRGFGFLTFKDPKTVNIVMVKEHFLDGKLIDPKRAIPRDEQEKTSKIFVGGVSQDTTETEFKDYFARFGRVVDATLMMDKDTGRPRGFGFVTFENEVGVEACLNTPLEIHGKAIEVKKAQPRGNMREEEEAARRGKFNKKGGMDDQSNAQNQMGNQMNQGGMTPQVMAQYMQRMQQVMAMMQQQAAMNRGMGMNPAMMQMMQMQQMQQMQNQMAQGGGNNSNNPMAGMNQAMMQQMQNQMMGNSGGQSQGQGNDEQQGYGDYNQQQMYNQRGGGGRRGGRGGYNQNYGNMGGGGGGGGDPTSWEGMYDDVPQPNFNQGGRGGGYHRGRGGYNQNQAPADPNQAPPPNAPTGPKNAGKPGANYRGGGRGGSRGFHPYGR

SEQ ID NO: 10944 - DNA, 2029 bp, Muscodor strobelii
  misc_feature: SGI EST ID NO. CUFF.25918.0
  misc_feature: Variant of the nucleotide sequence at SEQ ID NO 10942
aaaaatgtttattggaggtctgaactgggagacaactgatgaatctcttcgtgactacttttcccagtttggcgaagtgaccgaatgcactgtcatgagagacggttctaccggacgctctcgtggattcggatttctcacgttcaaggatcccaagacagtcaacattgtcatggtcaaggagcatttcctagacggcaaattgattgaccccaaacgagctatccctcgcgatgagcaagagaaaacctccaagatcttcgttggcggcgtgagtcaggataccaccgagaccgagttcaaggactactttgcccggtttggccgcgttgtggatgcaacgctcatgatggacaaggacaccgggagaccccgcggcttcggattcgtcactttcgagaacgaagttggtgtcgaggcatgcctgaatactcctctggaaatccatggcaaagcgattgaggtcaagaaagcccaaccgcggggcaacatgcgagaggaagaggaggccgctagacgtggcaagttcaacaagaaaggtggcatggatgatcagagcaacgcccagaaccagatgggaaaccagatgaaccaaggtggtatgacgcctcaggtcatggctcagtacatgcagagaatgcaacaggtcatggccatgatgcaacagcaagcagccatgaaccgaggtatgggtatgaatcccgctatgatgcagatgatgcagatgcagcagatgcagcaaatgcagaaccagatggcccagggcggcggcaacaactccaataatcctatggcggggatgaaccaggccatgatgcagcaaatgcagaatcagatgatgggcaactccggaggtcagagtcaaggccagggcaacgatgagcagcagggctatggtgattacaaccagcagcaaatgtataaccaacgaggcggcggaggtcgacggggaggtcgcggtggatataaccagaactacggcaatatggggggcggcggtgggggcggtggtgatccgacctcgtgggagggcatgtatgacgacgtcccccagccaaactttaaccaaggaggacgtggaggtggatatcaccgtggccgaggcggctacaaccagaaccaggctccggctgaccccaaccaagcccctccgcccaacgctccgactggccccaaaaatgctggcaagcccggtgctaactatcgtggtggcggcagaggaggtagccgtggtttccacccttacggtcgctagcaacctccgtcaggtcgcggaaaccaagagcattcgggtcaaaatcgttctgtcaagggaagcggttctggacccccgatcaacgccccgaccggccccagaaacacatcgaggaatccagctatccctggtcttaactacaatatgggcgattagaactcgtcctccaactggtattcttccaagtattctcataactaagacgacggagaaaaaggacaggacgagaaccgtagtgggcgaagttctggaaaccgccgtttcttatctttggagaagtctacgtcgcttggtcagagttcatccggataagggattgacaatgaccggttgcttgaccgcatttctcttcacactgaggccctcctcagtcttacgttgcaataccccgatacgacatatctcctgtttgcaaatgaccaagctgaagctgcctgctcatttgttcatttgcttgtacttatacatgttgccctattggcataatacggacggctagatgcttttggtctcaggaccaccgccctagcatcttgtggaaagaaagaaagaaaaaacatgaagagaaacgcatcacctgaaagaaaatggaaattgcatatggagcatccgagggttcaattggaatctctcgagatgatggtacagaaggttcaggatcaggattgatgataggccctgatcaatactagtaaaacagactgcgcagactcggaatcaggaaatgcgcgggtttcagctgaatggcatgtagttgctgaatacgaggattac

SEQ ID NO: 10945 - DNA, 510 bp, Muscodor strobelii
  misc_feature: SGI cDNA ID NO. 563496
  misc_feature: Encodes the peptide sequence at SEQ ID NO 10946
atggctgaagaaaacttcgaggatgatctcttcgccgacttgtacgacgacaacgacgcttcggccgctccggcttctgcccctgcgcctgtcccggctgccgctcctgtccctccttctgccgctgagtcgaagcaggagcccgccgacgagtacatgcccgatgagcacaactacggtggcgcagagaacggctatggagacaaccaggacgagcactacgaagatgacgacgacgatatcgatttcaacctgggcaacggccctaccaacaacgccgcttctacacagtcgtacaaagaggagtcccccggcccctctttccacaccacacgcggccctagctccaaggaagacgggcaacggccctacacacttggagtgatggaattctcgatactgcggggagccgctagtatcaagaatgctgtggagtgtggtcttggggcatcgccaccggcagagagaagagctggttcactgtcctggatcaaggctggagggtcatga

SEQ ID NO: 10946 - protein, 169 aa, Muscodor strobelii
  misc_feature: SGI Peptide ID NO. 563496
  misc_feature (4)..(120): NCBI GI: 116197887 Blast Desc: CHGG_07099 [Chaetomium globosum CBS 148.51] gi|88178378|gb|EAQ85846.1| CHGG_07099 [Chaetomium globosum CBS 148.51]
  misc_feature (1)..(120): NCBI GI: 156055734 Blast Desc: [Sclerotinia sclerotiorum 1980] gi|154703003|gb|EDO02742.1| [Sclerotinia sclerotiorum 1980]
  misc_feature (1)..(85): NCBI GI: 154296333 Blast Desc: BC1G_12993 [Botryotinia fuckeliana B05.10] gi|150843451|gb|EDN18644.1| BC1G_12993 [Botryotinia fuckeliana B05.10]
MAEENFEDDLFADLYDDNDASAAPASAPAPVPAAAPVPPSAAESKQEPADEYMPDEHNYGGAENGYGDNQDEHYEDDDDDIDFNLGNGPTNNAASTQSYKEESPGPSFHTTRGPSSKEDGQRPYTLGVMEFSILRGAASIKNAVECGLGASPPAERRAGSLSWIKAGGS

SEQ ID NO: 10947 - DNA, 1709 bp, Muscodor strobelii
  misc_feature: SGI EST ID NO. CUFF.25925.0
  misc_feature: Variant of the nucleotide sequence at SEQ ID NO 10945
ctggagagctgcctacgccgatttttcttgaacccccaacacccattttccgacgtatcatttctactcatccgccatctccccatcctgcctcccttctcgctggtgtccttctttctataaggcctgccctcctctcctctctgcggtgttcataacatttgcaaccagaccggcgaccgacaagtccacacatctccttctgccatctactgatcgcatcacactgcactatactgcaccgcatcacgcgcacttgcctttccttgaccatcggggtgcagcccgcccatcgtcacgatggctgaagaaaacttcgaggatgatctcttcgccgacttgtacgacgacaacgacgcttcggccgctccggcttctgcccctgcgcctgtcccggctgccgctcctgtccctccttctgccgctgagtcgaagcaggagcccgccgacgagtacatgcccgatgagcacaactacggtggcgcagagaacggctatggagacaaccaggacgagcactacgaagatgacgacgacgatatcgatttcaacctgggcaacggccctaccaacaacgccgcttctacacagtcgtacaaagaggagtcccccggcccctctttccacaccacacgcggccctagctccaaggaagacgggtaagtttgttttgtttttcgtgaccctttccccaatgcatgtgccaggcaacggccctacacacttggagtgatggaattctcgatactgcggggagccgctagtatcaagaatgctgtggagtgtggtcttggggcatcgccaccggcagagagaagagctggttcactgtcctggatcaaggctggagggtcatgagacaagaaggactggctacctggcttctacatgtccaactagcatcacagaagagctgctggagtgctgcatgccacatcggctggcaatcgaaggctaggcaagtgatgacagcaccatcacagcttctaggttcatcaaggaagacaggggaccatgtgcgggaagaatgcacgcacactctcgtcacctgataggaccactggataagaaaagactcgaccttagtcagtgcaagagtgcaagactctctccatactgccgtccatagccacctgtcaaagatgtgctcatagggcccgacatgacaagggtacacctgctctgaggatgtagcaaagaagattggcagcgaatagcgctcgagttagatgacctagcttgacgatagcaaaagaacaacgaagacaagatttcgacacaatccttccggtcactaccatctgcattcccttgtccatctgagcactgttgatgtggtcttgtggtctggccatgatttagaatgcacaggaccccccatctcgccgtacacatccattatcactatcgccgacaacatgagagggctcaaggcacagaccgaatcagggattagggcattttgggaagacgactatgcgcgtatcaattcatcgataagtcgacaggccaccacagattcctcggctctagccacgggaactctaccgaccgatgatcgcagcggtgtagatgatgcatgttcaagttttggtctggagtgttggaataagctgcatcaatgcctcatggttgctacatcatggccaccctgccatgtttgcccagaagcaatcgcaaacatctaactcacaaaaactgatttggcc

SEQ ID NO: 10948 - DNA, 1773 bp, Muscodor strobelii
  misc_feature: SGI cDNA ID NO. 563497
  misc_feature: Encodes the peptide sequence at SEQ ID NO 10949
atgttctcatcttccggcagtgggaagaagcctccccagcaggagatggttcaggttgacaggtccgagtccgcatcgcccttctggcacgctcctcgagagagcacctccaaacgagccggtcgagatggcaatctggtagtaggggcggcttattcccatgctgacatgctcaagttcgactccttaaacatatccggaccctctgcgaattcgaaatcaccgtcccccacgaccaagaagacacgaacgagcgatgtcggctctacctcatacaagcccagctcttcgcactccactccaccgctcaaatcctacttcaacttcttgtcaaccacgaattccgactggaacgtcgaagaccctgaagccgacgatgagtacggctacgaggacgacgacggagacgacttcggcctccccagcctttccaacatgaagcgccgctcccgccgcgcagccgccgcgagagatgccgatccaacttctcgagagcccccggcggcttcaggcaacacattcgaccagacaggtcgacgttactcggatagcgccgacatcgccatcgaaagacctagcctttcatatccaatgcccaaaaagacagagggaaagatattaaggccacagtacaaagacattctgaaagatcctgcaaatgcattacacctcatagaccacccgagtaccccggctaatgccacgccgagagagatagacaccataaactcccgagtcaccaagataaacaagttcaagaagatcctccaagcaaccaccatcccaataacagacctcagagcgttagcatggagcggggtgcccgaagaagtccgtgcaatgacatggcagcttctactgagctatctacccacgagtagcgaacgccgtgtcgcgacgttagagcgcaagcgcagagaatatctcgatggcgtcagtcaagccttcgagcgtggcggcgccaagcccaatgcgacaggtcgctccagaggtctcgacgaagccatatggcaccagatcagcatcgatgtgcccaggacgaatccacatatcgagctctacagctacgaagcaacacagcggtctctcgaacgcatcttgtacgtttgggcaatacgacatccagcaagtggctacgtgcagggcataaatgacttggtgtcgccattttggcaagtctttctagggagctacatcacggacaacgacattgaaagtggcatggatcctggccagcttccgaaggctgtacttgacgcggtcgaggctgactcatactggtgcttgaccaagctactagacggtatccaagatcattacattgtggcacagcccggcatacagaggcaagttgctgcgcttcgagatctgaccgctagaatcgacgaaagactggccaagcatcttgagagcgagcaggtcgaattcatccaattcagtttccgctggatgaactgtctgctcatgagggagatcagtgttcgaaacactattcgcatgtgggacacctatcttgccgaagagcaaggcttttcggaattccacctctatgtgtgcgctgcattcttggtcaaatggtcggccaagctagtcaagatggacttccaagagatcatgatgttcctccaagctttaccaacaaaagattggacagaaaaggacatcgaacttttgctcagcgaggctttcatttggcagagcttattcaagaattcggctgctcatttacggggtcagccgactaggaatgcagccataaacatgcagctgtaa

SEQ ID NO: 10949 - protein, 590 aa, Muscodor strobelii
  misc_feature: SGI Peptide ID NO. 563497
  misc_feature (20)..(576): NCBI GI: 145605768 Blast Desc: MGG_06874 [Magnaporthe grisea 70-15] gi|145013561|gb|EDJ98202.1| MGG_06874 [Magnaporthe grisea 70-15]
  misc_feature (7)..(577): NCBI GI: 242765440 Blast Desc: GTPase activating protein (Gyp1), [Talaromyces stipitatus ATCC 10500] gi|218724171|gb|EED23588.1| GTPase activating protein (Gyp1), [Talaromyces stipitatus ATCC 10500]
  misc_feature (24)..(588): NCBI GI: 189210890 Blast Desc: TBC1 domain family member 22A [Pyrenophora tritici-repentis Pt-1C-BFP] gi|187977869|gb|EDU44495.1| TBC1 domain family member 22A [Pyrenophora tritici-repentis Pt-1C-BFP]
  misc_feature (1)..(571): NCBI GI: 156055732 Blast Desc: SS1G_05218 [Sclerotinia sclerotiorum 1980] gi|154703002|gb|EDO02741.1| SS1G_05218 [Sclerotinia sclerotiorum 1980]
  misc_feature (9)..(577): NCBI GI: 240105800 Blast Desc: TBC domain containing protein [Coccidioides posadasii C735 delta SOWgp]
  misc_feature (7)..(577): NCBI GI: 212528808 Blast Desc: GTPase activating protein (Gyp1), [Penicillium marneffei ATCC 18224] gi|210073959|gb|EEA28046.1| GTPase activating protein (Gyp1), [Penicillium marneffei ATCC 18224]
  misc_feature (18)..(577): NCBI GI: 261194982 Blast Desc: GTPase activating protein [Ajellomyces dermatitidis SLH14081] gi|239587767|gb|EEQ70410.1| GTPase activating protein [Ajellomyces dermatitidis SLH14081]
  misc_feature (138)..(571): NCBI GI: 154296335 Blast Desc: BC1G_12994 [Botryotinia fuckeliana B05.10] gi|150843452|gb|EDN18645.1| BC1G_12994 [Botryotinia fuckeliana B05.10]
  misc_feature (95)..(577): NCBI GI: 226282506 Blast Desc: GTPase-activating protein GYP1 [Paracoccidioides brasiliensis Pb01]
  misc_feature (18)..(577): NCBI GI: 225563098 Blast Desc: GTPase activating protein GYP1 [Ajellomyces capsulatus G186AR]
MFSSSGSGKKPPQQEMVQVDRSESASPFWHAPRESTSKRAGRDGNLVVGAAYSHADMLKFDSLNISGPSANSKSPSPTTKKTRTSDVGSTSYKPSSSHSTPPLKSYFNFLSTTNSDWNVEDPEADDEYGYEDDDGDDFGLPSLSNMKRRSRRAAAARDADPTSREPPAASGNTFDQTGRRYSDSADIAIERPSLSYPMPKKTEGKILRPQYKDILKDPANALHLIDHPSTPANATPREIDTINSRVTKINKFKKILQATTIPITDLRALAWSGVPEEVRAMTWQLLLSYLPTSSERRVATLERKRREYLDGVSQAFERGGAKPNATGRSRGLDEAIWHQISIDVPRTNPHIELYSYEATQRSLERILYVWAIRHPASGYVQGINDLVSPFWQVFLGSYITDNDIESGMDPGQLPKAVLDAVEADSYWCLTKLLDGIQDHYIVAQPGIQRQVAALRDLTARIDERLAKHLESEQVEFIQFSFRWMNCLLMREISVRNTIRMWDTYLAEEQGFSEFHLYVCAAFLVKWSAKLVKMDFQEIMMFLQALPTKDWTEKDIELLLSEAFIWQSLFKNSAAHLRGQPTRNAAINMQL

SEQ ID NO: 10950 - DNA, 5241 bp, Muscodor strobelii
  misc_feature: SGI EST ID NO. CUFF.26095.0
  misc_feature: Variant of the nucleotide sequence at SEQ ID NO 10948
gggcatataactggatagtggtgaagcaaagccgccaagagaaggggaagcgacgtggtacctgagccacggacggccagtctgaagcattaagttactccatggaccctccattgtcgagtctgaacatcccactttgtactggtgccatcgcccgcccacacatcaccacccacggcggccaaggctctttgcaaacaacgatgcaattatagtcttgcagcccctcaaaactgtcatcatgttctcatcttccggcagtgggaagaagcctccccagcaggagatggttcaggttgacaggtccgagtccgcatcgcccttctggcacgctcctcgagagagcacctccaaacgagccggtcgagatggcaatctggtagtaggggcggcttattcccatgctgacatgctcaagttcgactccttaaacatatccggaccctctgcgaattcgaaatcaccgtcccccacgaccaagaagacacgaacgagcgatgtcggctctacctcatacaagcccagctcttcgcactccactccaccgctcaaatcctacttcaacttcttgtcaaccacgaattccgactggaacgtcgaagaccctgaagccgacgatgagtacggctacgaggacgacgacggagacgacttcggcctccccagcctttccaacatgaagcgccgctcccgccgcgcagccgccgcgagagatgccgatccaacttctcgagagcccccggcggcttcaggcaacacattcgaccagacaggtcgacgttactcggatagcgccgacatcgccatcgaaagacctagcctttcatatccaatgcccaaaaagacagagggaaagatattaaggccacagtacaaagacattctgaaagatcctgcaaatgcattacacctcatagaccacccgagtaccccggctaatgccacgccgagagagatagacaccataaactcccgagtcaccaagataaacaagttcaagaagatcctccaagcaaccaccatcccaataacagacctcagagcgttagcatggagcggggtgcccgaagaagtccgtgcaatgacatggcagcttctactgagctatctacccacgagtagcgaacgccgtgtcgcgacgttagagcgcaagcgcagagaatatctcgatggcgtcagtcaagccttcgagcgtggcggcgccaagcccaatgcgacaggtcgctccagaggtctcgacgaagccatatggcaccagatcagcatcgatgtgcccaggacgaatccacatatcgagctctacagctacgaagcaacacagcggtctctcgaacgcatcttgtacgtttgggcaatacgacatccagcaagtggctacgtgcagggcataaatgacttggtgtcgccattttggcaagtctttctagggagctacatcacggacaacgacattgaaagtggcatggatcctggccagcttccgaaggctgtacttgacgcggtcgaggctgactcatactggtgcttgaccaagctactagacggtatccaagatcattacattgtggcacagcccggcatacagaggcaagttgctgcgcttcgagatctgaccgctagaatcgacgaaagactggccaagcatcttgagagcgagcaggtcgaattcatccaattcagtttccgctggatgaactgtctgctcatgagggagatcagtgttcgaaacactattcgcatgtgggacacctatcttgccgaagagcaaggcttttcggaattccacctctatgtgtgcgctgcattcttggtcaaatggtcggccaagctagtcaagatggacttccaagagatcatgatgttcctccaagctttaccaacaaaagattggacagaaaaggacatcgaacttttgctcagcgaggctttcatttggcagagcttattcaagaattcggctgctcatttacggggtcagccgactaggaatgcagccataaacatgcagctgtaaatacattgcattcattgccttcagagtcatccaaggattgcgagagaagaaaatcgcaccttatgagcctttgcgcgggcaggagtattggcgttccggatattcatggcgaagcattataccagaactacggacaaaaataaagcgagcatgcaacatgctttccagatagagagccgagcagtgttgtttgaagcatctgtgcatcttggtcaaatagctaagacctagcgaggcgtcttggacatgcctggtttaccgagttgcttcgcagataatcaatccaatgcccaaatcaaagccctaccatagaattgtatatcatctattgcagttattgtgtggctaactactgtatgcgagaggagggtcgtatgcgcacgcatttcgtacgtatttcggataaggaccaacacactgtgaagaccttccgtgatttattctgaagtgtcgctcgttttcatgtgaaaacgaatgagggaagagtacaacgcaagttgatattttatacacaacacatggcaatctattacacttttccacacgccttacacaatgatatatggctttgtctccgtaatggaactatcacttcccaagcccttcgagcagccttttctcgcgacaccagcagccaatttttatcttcgtatttattcaattacgtgcgatacccaacctcactcaacttctacatatctaaccctcaacatcgacgataaaagcccccgtcagtgtcttgttgacatccacagtcacactatcaaccccatttctcttgcacttcgccttcccactcttccccaaccccaagaacgtaaccttactcaacttcacgtccttagtatatccaaaagtcccactaaccttcagcacaccatgtgcatacttaaagctaatctgcgaagtattcttctgctgcaaactcacaccatcatctagatacagacttccgctcgccttcccatctctacccacggcgacgacgagttcaaagggcttcgtcctgacttcggtggtcgtcatgcctgcttcggcgcgaataggataaataacaccaccacggaaaaagagtgggatatcagtccattcttgattctcgacttcgatgttcttggccgctccttcgatcttcttatgtgtgtaccagtcgtagaaaacatcatcggggagatagatagaagcgctggtctcgttctctcccgtgacgggggctacgaggataccggggccgaagaaatactgcaggtcgagaccgtatgtgttcttgtcgttgggatacaaaaacatcatcggatttatcgccggtgttccatcgacggattgttgatgcagaacggtgtagaagtaatccagaagtcggtaccgaatcgcgatgttcttttgcgctgactcggtggttgctggccatctgtacagctcctggggtatactgcctaattcattgtgaacgcggtagaatggcgcgaaagcgctcaaagccgcccaccgagcgcacagttgttctgtggtgttccctccgaagccacaggtatccgtccccaccatggggacttggtacacggctgcgaacgcgagcatactgcggatggcgagtcggtattcatcccagtttgagatattatctcctagccacttccctacatgtttaccagcgccagcgaaggtagagcgcgtgatgatcatgggtctaacttcgggccgacgcgcgatcatggcgtcgcgggaggcggaagacatcatcgtgccgaagatattgtgcgtgtcgtacattgccagaccgttttgatggatcacgtcggtgtttacggtcttgttggagattccgccttcggctgcgttccaggagtccatgtaggcggctttgttgtggattgcgtatttggggaataagaggtcccggccgggcaggccaagagctttgccgggttctgcggctttggtaatgaggtgggggtaagatgtgcgtggtgggaagccggaacggggtagttctacttcgcgttttgaggcgtcgcagccttcgggctgaaagtcgcacgcgaatccggggagagggcgtggtggtgtgcggatggctggtggctcgggtgggaatccgccggagttggcgattgtgtatgggtcgtcgcaagggaagttgcatgggaagtttgacggttcgttcagatcgatccagagcgcgtcgatatcgacgccggtgtctttgtcgaagaacatggcaaattcgttgttccagaacttcgtgatgttctctgagaaccagtcagggaaagccgtaataccaggccagacgacaccttcccagatagagccattggctctcagaaggaagacgttgtcctcgataccacgttgcaacgagcctgggaagtcttgaacagcgacttgagggtctaccatcatgacatagtgttggtcgtgatcatgcagataaccgacaagctcacgcatcatcttgatgttgaacctctcgggatccagcgagaagactcttcgtcgatacatatagtcgatatcagtccacatagtctcgagcggaatggcggcttggctgtaattatagacgacctcagcaacctcgaatgcatcttggtagccatatctgcagttgtggaaaccaagaccccagtagggcatcattgctggtgtgccagcgacttcagcgtactgctgtgccacttcgaccatgctaggtccggcgacgaagtagaagtcgagaacaccaccgagagtgttgtactcgagatactgatcacttccgtcggtgttgttgatcttaacatccatgccattggagttcaggaagaagacaccgtgggcaccagattcgcgaagctcgtagtatacgggatggttgccgtacaaatttgcgccagttggtacagagtatgcgtcttgggaccagaaagtacgaatatagtctgtagtattcagtctgaagggatctgagtgctctccaagaccataaagattgggatcatctggaagactagttctcaggcgcaagtattgtgtctcgaataccaagctagcggccgatgtgtcgaacaaaatctcattagagtctgaacgagagatgctgaaactgaacgggttctcgacgtagtcaaacttgagagccgactttttcttgttcacgccctggctctcggggcgcggaaagacagattcggggacttggtagacattgttggcagggtcttgaattttcacatgaactctcg

SEQ ID NO: 10951 - DNA, 2754 bp, Muscodor strobelii
  misc_feature: SGI cDNA ID NO. 563498
  misc_feature: Elevated expression when VOC is produced
  misc_feature: Encodes the peptide sequence at SEQ ID NO 10952
atggcgagtctcttgttcatggcagttgccgcctcggcttctgctctcacagcctctagctaccctactagtaatcctctctccgcttgccctggttacaaggcatccaacgtcaagaccacacactctgggctgactgcggacttgaagcttgctggaaaagcctgcaatgcatatggagctgacctgaaggatttgactctggaggtctcgtacgacactgattcgagagttcatgtgaaaattcaagaccctgccaacaatgtctaccaagtccccgaatctgtctttccgcgccccgagagccagggcgtgaacaagaaaaagtcggctctcaagtttgactacgtcgagaacccgttcagtttcagcatctctcgttcagactctaatgagattttgttcgacacatcggccgctagcttggtattcgagacacaatacttgcgcctgagaactagtcttccagatgatcccaatctttatggtcttggagagcactcagatcccttcagactgaatactacagactatattcgtactttctggtcccaagacgcatactctgtaccaactggcgcaaatttgtacggcaaccatcccgtatactacgagcttcgcgaatctggtgcccacggtgtcttcttcctgaactccaatggcatggatgttaagatcaacaacaccgacggaagtgatcagtatctcgagtacaacactctcggtggtgttctcgacttctacttcgtcgccggacctagcatggtcgaagtggcacagcagtacgctgaagtcgctggcacaccagcaatgatgccctactggggtcttggtttccacaactgcagatatggctaccaagatgcattcgaggttgctgaggtcgtctataattacagccaagccgccattccgctcgagactatgtggactgatatcgactatatgtatcgacgaagagtcttctcgctggatcccgagaggttcaacatcaagatgatgcgtgagcttgtcggttatctgcatgatcacgaccaacactatgtcatgatggtagaccctcaagtcgctgttcaagacttcccaggctcgttgcaacgtggtatcgaggacaacgtcttccttctgagagccaatggctctatctgggaaggtgtcgtctggcctggtattacggctttccctgactggttctcagagaacatcacgaagttctggaacaacgaatttgccatgttcttcgacaaagacaccggcgtcgatatcgacgcgctctggatcgatctgaacgaaccgtcaaacttcccatgcaacttcccttgcgacgacccatacacaatcgccaactccggcggattcccacccgagccaccagccatccgcacaccaccacgccctctccccggattcgcgtgcgactttcagcccgaaggctgcgacgcctcaaaacgcgaagtagaactaccccgttccggcttcccaccacgcacatcttacccccacctcattaccaaagccgcagaacccggcaaagctcttggcctgcccggccgggacctcttattccccaaatacgcaatccacaacaaagccgcctacatggactcctggaacgcagccgaaggcggaatctccaacaagaccgtaaacaccgacgtgatccatcaaaacggtctggcaatgtacgacacgcacaatatcttcggcacgatgatgtcttccgcctcccgcgacgccatgatcgcgcgtcggcccgaagttagacccatgatcatcacgcgctctaccttcgctggcgctggtaaacatgtagggaagtggctaggagataatatctcaaactgggatgaataccgactcgccatccgcagtatgctcgcgttcgcagccgtgtaccaagtccccatggtggggacggatacctgtggcttcggagggaacaccacagaacaactgtgcgctcggtgggcggctttgagcgctttcgcgccattctaccgcgttcacaatgaattaggcagtataccccaggagctgtacagatggccagcaaccaccgagtcagcgcaaaagaacatcgcgattcggtaccgacttctggattacttctacaccgttctgcatcaacaatccgtcgatggaacaccggcgataaatccgatgatgtttttgtatcccaacgacaagaacacatacggtctcgacctgcagtatttcttcggccccggtatcctcgtagcccccgtcacgggagagaacgagaccagcgcttctatctatctccccgatgatgttttctacgactggtacacacataagaagatcgaaggagcggccaagaacatcgaagtcgagaatcaagaatggactgatatcccactctttttccgtggtggtgttatttatcctattcgcgccgaagcaggcatgacgaccaccgaagtcaggacgaagccctttgaactcgtcgtcgccgtgggtagagatgggaaggcgagcggaagtctgtatctagatgatggtgtgagtttgcagcagaagaatacttcgcagattagctttaagtatgcacatggtgtgctgaaggttagtgggacttttggatatactaaggacgtgaagttgagtaaggttacgttcttggggttggggaagagtgggaaggcgaagtgcaagagaaatggggttgatagtgtgactgtggatgtcaacaagacactgacgggggcttttatcgtcgatgttgagggttag

SEQ ID NO: 10952 - protein, 917 aa, Muscodor strobelii
  misc_feature: SGI Peptide ID NO. 563498
  misc_feature (248)..(802): Pfam Id: PF01055 Pfam Desc: Glycosyl hydrolases family 31
  misc_feature (1)..(910): NCBI GI: 164425288 Blast Desc: NCU04674 [Neurospora crassa OR74A] gi|28950062|emb|CAD70816.1| related to alpha-glucosidase b [Neurospora crassa] gi|157070867|gb|EAA29981.2| NCU04674 crassa
  misc_feature (9)..(915): NCBI GI: 171691651 Blast Desc: protein product [Podospora anserina] gi|170945774|emb|CAP72574.1| protein product [Podospora anserina]
  misc_feature (27)..(881): NCBI GI: 41529276 Blast Desc: alpha-glucosidase [Acremonium implicatum]
  misc_feature (4)..(903): NCBI GI: 170295863 Blast Desc: alpha-glucosidase [Thermomyces lanuginosus]
  misc_feature (1)..(897): NCBI GI: 239612671 Blast Desc: alpha-glucosidase [Ajellomyces dermatitidis ER-3]
  misc_feature (1)..(898): NCBI GI: 261191496 Blast Desc: alpha-glucosidase [Ajellomyces dermatitidis SLH14081] gi|239589922|gb|EEQ72565.1| alpha-glucosidase [Ajellomyces dermatitidis SLH14081]
  misc_feature (26)..(889): NCBI GI: 225561376 Blast Desc: alpha-glucosidase [Ajellomyces capsulatus G186AR]
  misc_feature (30)..(915): NCBI GI: 119494481 Blast Desc: alpha-glucosidase, [Neosartorya fischeri NRRL 181] gi|119412298|gb|EAW22239.1| alpha-glucosidase, [Neosartorya fischeri NRRL 181]
  misc_feature (30)..(915): NCBI GI: 70996472 Blast Desc: alpha-glucosidase [Aspergillus fumigatus Af293] gi|66850626|gb|EAL90953.1| alpha-glucosidase, [Aspergillus fumigatus Af293] gi|159131725|gb|EDP56838.1| alpha-glucosidase,
  misc_feature (26)..(886): NCBI GI: 156065989 Blast Desc: SS1G_01005 [Sclerotinia sclerotiorum 1980] gi|154691864|gb|EDN91602.1| SS1G_01005 [Sclerotinia sclerotiorum 1980]
  misc_feature (28)..(854): SWISSPROT Homolog: EC 3.2.1.20 Alpha-glucosidase
  misc_feature: Useful for introducing or modulating the production of volatile compounds
MASLLFMAVAASASALTASSYPTSNPLSACPGYKASNVKTTHSGLTADLKLAGKACNAYGADLKDLTLEVSYDTDSRVHVKIQDPANNVYQVPESVFPRPESQGVNKKKSALKFDYVENPFSFSISRSDSNEILFDTSAASLVFETQYLRLRTSLPDDPNLYGLGEHSDPFRLNTTDYIRTFWSQDAYSVPTGANLYGNHPVYYELRESGAHGVFFLNSNGMDVKINNTDGSDQYLEYNTLGGVLDFYFVAGPSMVEVAQQYAEVAGTPAMMPYWGLGFHNCRYGYQDAFEVAEVVYNYSQAAIPLETMWTDIDYMYRRRVFSLDPERFNIKMMRELVGYLHDHDQHYVMMVDPQVAVQDFPGSLQRGIEDNVFLLRANGSIWEGVVWPGITAFPDWFSENITKFWNNEFAMFFDKDTGVDIDALWIDLNEPSNFPCNFPCDDPYTIANSGGFPPEPPAIRTPPRPLPGFACDFQPEGCDASKREVELPRSGFPPRTSYPHLITKAAEPGKALGLPGRDLLFPKYAIHNKAAYMDSWNAAEGGISNKTVNTDVIHQNGLAMYDTHNIFGTMMSSASRDAMIARRPEVRPMIITRSTFAGAGKHVGKWLGDNISNWDEYRLAIRSMLAFAAVYQVPMVGTDTCGFGGNTTEQLCARWAALSAFAPFYRVHNELGSIPQELYRWPATTESAQKNIAIRYRLLDYFYTVLHQQSVDGTPAINPMMFLYPNDKNTYGLDLQYFFGPGILVAPVTGENETSASIYLPDDVFYDWYTHKKIEGAAKNIEVENQEWTDIPLFFRGGVIYPIRAEAGMTTTEVRTKPFELVVAVGRDGKASGSLYLDDGVSLQQKNTSQISFKYAHGVLKVSGTFGYTKDVKLSKVTFLGLGKSGKAKCKRNGVDSVTVDVNKTLTGAFIVDVEG

SEQ ID NO: 10953 - DNA, 3775 bp, Muscodor strobelii
  misc_feature: SGI EST ID NO. CUFF.26096.1
  misc_feature: Variant of the nucleotide sequence at SEQ ID NO 10951
cttggctttaagtcgtttgagtggctcgatcttacgaggaagcaacagggctctcgcatcttacaatggcgagtctcttgttcatggcagttgccgcctcggcttctgctctcacagcctctagctaccctactagtaatcctctctccgcttgccctggttacaaggcatccaacgtcaagaccacacactctgggctgactgcggacttgaagcttgctggaaaagcctgcaatgcatatggagctgacctgaaggatttgactctggaggtctcgtacgacactgattcgagagttcatgtgaaaattcaagaccctgccaacaatgtctaccaagtccccgaatctgtctttccgcgccccgagagccagggcgtgaacaagaaaaagtcggctctcaagtttgactacgtcgagaacccgttcagtttcagcatctctcgttcagactctaatgagattttgttcgacacatcggccgctagcttggtattcgagacacaatacttgcgcctgagaactagtcttccagatgatcccaatctttatggtcttggagagcactcagatcccttcagactgaatactacagactatattcgtactttctggtcccaagacgcatactctgtaccaactggcgcaaatttgtacggcaaccatcccgtatactacgagcttcgcgaatctggtgcccacggtgtcttcttcctgaactccaatggcatggatgttaagatcaacaacaccgacggaagtgatcagtatctcgagtacaacactctcggtggtgttctcgacttctacttcgtcgccggacctagcatggtcgaagtggcacagcagtacgctgaagtcgctggcacaccagcaatgatgccctactggggtcttggtttccacaactgcagatatggctaccaagatgcattcgaggttgctgaggtcgtctataattacagccaagccgccattccgctcgagactatgtggactgatatcgactatatgtatcgacgaagagtcttctcgctggatcccgagaggttcaacatcaagatgatgcgtgagcttgtcggttatctgcatgatcacgaccaacactatgtcatgatggtagaccctcaagtcgctgttcaagacttcccaggctcgttgcaacgtggtatcgaggacaacgtcttccttctgagagccaatggctctatctgggaaggtgtcgtctggcctggtattacggctttccctgactggttctcagagaacatcacgaagttctggaacaacgaatttgccatgttcttcgacaaagacaccggcgtcgatatcgacgcgctctggatcgatctgaacgaaccgtcaaacttcccatgcaacttcccttgcgacgacccatacacaatcgccaactccggcggattcccacccgagccaccagccatccgcacaccaccacgccctctccccggattcgcgtgcgactttcagcccgaaggctgcgacgcctcaaaacgcgaagtagaactaccccgttccggcttcccaccacgcacatcttacccccacctcattaccaaagccgcagaacccggcaaagctcttggcctgcccggccgggacctcttattccccaaatacgcaatccacaacaaagccgcctacatggactcctggaacgcagccgaaggcggaatctccaacaagaccgtaaacaccgacgtgatccatcaaaacggtctggcaatgtacgacacgcacaatatcttcggcacgatgatgtcttccgcctcccgcgacgccatgatcgcgcgtcggcccgaagttagacccatgatcatcacgcgctctaccttcgctggcgctggtaaacatgtagggaagtggctaggagataatatctcaaactgggatgaataccgactcgccatccgcagtatgctcgcgttcgcagccgtgtaccaagtccccatggtggggacggatacctgtggcttcggagggaacaccacagaacaactgtgcgctcggtgggcggctttgagcgctttcgcgccattctaccgcgttcacaatgaattaggcagtataccccaggagctgtacagatggccagcaaccaccgagtcagcgcaaaagaacatcgcgattcggtaccgacttctggattacttctacaccgttctgcatcaacaatccgtcgatggaacaccggcgataaatccgatgatgtttttgtatcccaacgacaagaacacatacggtctcgacctgcagtatttcttcggccccggtatcctcgtagcccccgtcacgggagagaacgagaccagcgcttctatctatctccccgatgatgttttctacgactggtacacacataagaagatcgaaggagcggccaagaacatcgaagtcgagaatcaagaatggactgatatcccactctttttccgtggtggtgttatttatcctattcgcgccgaagcaggcatgacgaccaccgaagtcaggacgaagccctttgaactcgtcgtcgccgtgggtagagatgggaaggcgagcggaagtctgtatctagatgatggtgtgagtttgcagcagaagaatacttcgcagattagctttaagtatgcacatggtgtgctgaaggttagtgggacttttggatatactaaggacgtgaagttgagtaaggttacgttcttggggttggggaagagtgggaaggcgaagtgcaagagaaatggggttgatagtgtgactgtggatgtcaacaagacactgacgggggcttttatcgtcgatgttgagggttagatatgtagaagttgagtgaggttgggtatcgcacgtaattgaataaatacgaagataaaaattggctgctggtgtcgcgagaaaaggctgctcgaagggcttgggaagtgatagttccattacggagacaaagccatatatcattgtgtaaggcgtgtggaaaagtgtaatagattgccatgtgttgtgtataaaatatcaacttgcgttgtactcttccctcattcgttttcacatgaaaacgagcgacacttcagaataaatcacggaaggtcttcacagtgtgttggtccttatccgaaatacgtacgaaatgcgtgcgcatacgaccctcctctcgcatacagtagttagccacacaataactgcaatagatgatatacaattctatggtagggctttgatttgggcattggattgattatctgcgaagcaactcggtaaaccaggcatgtccaagacgcctcgctaggtcttagctatttgaccaagatgcacagatgcttcaaacaacactgctcggctctctatctggaaagcatgttgcatgctcgctttatttttgtccgtagttctggtataatgcttcgccatgaatatccggaacgccaatactcctgcccgcgcaaaggctcataaggtgcgattttcttctctcgcaatccttggatgactctgaaggcaatgaatgcaatgtatttacagctgcatgtttatggctgcattcctagtcggctgaccccgtaaatgagcagccgaattcttgaataagctctgccaaatgaaagcctcgctgagcaaaagttcgatgtccttttctgtccaatcttttgttggtaaagcttggaggaacatcatgatctcttggaagtccatcttgactagcttggccgaccatttgaccaagaatgcagcgcacacatagaggtggaattccgaaaagccttgctcttcgg

SEQ ID NO: 10954 - DNA, 1155 bp, Muscodor strobelii
  misc_feature: SGI cDNA ID NO. 563499
  misc_feature: Elevated expression when VOC is produced
  misc_feature: Encodes the peptide sequence at SEQ ID NO 10955
atggactcctggaacgcagccgaaggcggaatctccaacaagaccgtaaacaccgacgtgatccatcaaaacggtctggcaatgtacgacacgcacaatatcttcggcacgatgatgtcttccgcctcccgcgacgccatgatcgcgcgtcggcccgaagttagacccatgatcatcacgcgctctaccttcgctggcgctggtaaacatgtagggaagtggctaggagataatatctcaaactgggatgaataccgactcgccatccgcagtatgctcgcgttcgcagccgtgtaccaagtccccatggtggggacggatacctgtggcttcggagggaacaccacagaacaactgtgcgctcggtgggcggctttgagcgctttcgcgccattctaccgcgttcacaatgaattaggcagtataccccaggagctgtacagatggccagcaaccaccgagtcagcgcaaaagaacatcgcgattcggtaccgacttctggattacttctacaccgttctgcatcaacaatccgtcgatggaacaccggcgataaatccgatgatgtttttgtatcccaacgacaagaacacatacggtctcgacctgcagtatttcttcggccccggtatcctcgtagcccccgtcacgggagagaacgagaccagcgcttctatctatctccccgatgatgttttctacgactggtacacacataagaagatcgaaggagcggccaagaacatcgaagtcgagaatcaagaatggactgatatcccactctttttccgtggtggtgttatttatcctattcgcgccgaagcaggcatgacgaccaccgaagtcaggacgaagccctttgaactcgtcgtcgccgtgggtagagatgggaaggcgagcggaagtctgtatctagatgatggtgtgagtttgcagcagaagaatacttcgcagattagctttaagtatgcacatggtgtgctgaaggttagtgggacttttggatatactaaggacgtgaagttgagtaaggttacgttcttggggttggggaagagtgggaaggcgaagtgcaagagaaatggggttgatagtgtgactgtggatgtcaacaagacactgacgggggcttttatcgtcgatgttgagggttag

SEQ ID NO: 10955 - protein, 384 aa, Muscodor strobelii
  misc_feature: SGI Peptide ID NO. 563499
  misc_feature (1)..(269): Pfam Id: PF01055 Pfam Desc: Glycosyl hydrolases family 31
  misc_feature (2)..(269): Pfam Id: PF01055 Pfam Desc: Glycosyl hydrolases family 31
  misc_feature (1)..(382): NCBI GI: 171691651 Blast Desc: protein product [Podospora anserina] gi|170945774|emb|CAP72574.1| protein product [Podospora anserina]
  misc_feature (1)..(377): NCBI GI: 164425288 Blast Desc: NCU04674 [Neurospora crassa OR74A] gi|28950062|emb|CAD70816.1| related to alpha-glucosidase b [Neurospora crassa] gi|157070867|gb|EAA29981.2| NCU04674 crassa
  misc_feature (9)..(382): NCBI GI: 119494481 Blast Desc: alpha-glucosidase, [Neosartorya fischeri NRRL 181] gi|119412298|gb|EAW22239.1| alpha-glucosidase, [Neosartorya fischeri NRRL 181]
  misc_feature (1)..(353): NCBI GI: 156065989 Blast Desc: SS1G_01005 [Sclerotinia sclerotiorum 1980] gi|154691864|gb|EDN91602.1| SS1G_01005 [Sclerotinia sclerotiorum 1980]
  misc_feature (9)..(382): NCBI GI: 70996472 Blast Desc: alpha-glucosidase [Aspergillus fumigatus Af293] gi|66850626|gb|EAL90953.1| alpha-glucosidase, [Aspergillus fumigatus Af293] gi|159131725|gb|EDP56838.1| alpha-glucosidase,
  misc_feature (9)..(370): NCBI GI: 170295863 Blast Desc: alpha-glucosidase [Thermomyces lanuginosus]
  misc_feature (7)..(374): NCBI GI: 115397527 Blast Desc: ATEG_05177 [Aspergillus terreus NIH2624] gi|114192546|gb|EAU34246.1| ATEG_05177 [Aspergillus terreus NIH2624]
  misc_feature (2)..(348): NCBI GI: 41529276 Blast Desc: alpha-glucosidase [Acremonium implicatum]
  misc_feature (9)..(382): NCBI GI: 121700773 Blast Desc: alpha-glucosidase, [Aspergillus clavatus NRRL 1] gi|119396794|gb|EAW07225.1| alpha-glucosidase, [Aspergillus clavatus NRRL 1]
  misc_feature (5)..(356): NCBI GI: 225561376 Blast Desc: alpha-glucosidase [Ajellomyces capsulatus G186AR]
  misc_feature (11)..(353): SWISSPROT Homolog: EC 3.2.1.20 Alpha-glucosidase
  misc_feature: Useful for introducing or modulating the production of volatile compounds
MDSWNAAEGGISNKTVNTDVIHQNGLAMYDTHNIFGTMMSSASRDAMIARRPEVRPMIITRSTFAGAGKHVGKWLGDNISNWDEYRLAIRSMLAFAAVYQVPMVGTDTCGFGGNTTEQLCARWAALSAFAPFYRVHNELGSIPQELYRWPATTESAQKNIAIRYRLLDYFYTVLHQQSVDGTPAINPMMFLYPNDKNTYGLDLQYFFGPGILVAPVTGENETSASIYLPDDVFYDWYTHKKIEGAAKNIEVENQEWTDIPLFFRGGVIYPIRAEAGMTTTEVRTKPFELVVAVGRDGKASGSLYLDDGVSLQQKNTSQISFKYAHGVLKVSGTFGYTKDVKLSKVTFLGLGKSGKAKCKRNGVDSVTVDVNKTLTGAFIVDVEG

SEQ ID NO: 10956 - DNA, 3775 bp, Muscodor strobelii; identical to SEQ ID NO: 10953
  misc_feature: SGI EST ID NO. CUFF.26096.1
  misc_feature: Variant of the nucleotide sequence at SEQ ID NO 10954

SEQ ID NO: 10957 - DNA, 1341 bp, Muscodor strobelii
  misc_feature: SGI cDNA ID NO. 563500
  misc_feature: Encodes the peptide sequence at SEQ ID NO 10958
atgcgttccttgcgggcaggtcttttcttactcgccgcgtcagcggtcaatgcctcgctgcagatcgttccgggcgcgacatggacggcgaccaaccaagccgcacatgtgcaagcccacggctcaggaataatcaaagtcggatcaacatactatatggtaggcgaagacaaaacaggcggctcagctttccagaacatcaactgctactcatctaccgatctcgtacaatggacgtacgtcggagcgctcctctctcgaacaagctctggcgatcttggaccgaatagagtagtcgagcgtccgaaagtcatatacaatgactcgaccaaaaaatacgtcctctggatgcatattgatgacagcagctatggcgaggcaaaggtcggtgtcgcgacaagcaacagtgtgtgtagtggttattcgtacattggaagttggcgtccgcttggcttccagagtcgcgatatgggattgtttaaggatgacgatgggaaagcatatttgcttactgaggatcgagcaaacggtctccgcattgatgccttgaatagcgactacaccaacgtaacttcagcaactcaccttttcggctcttacgaagcaccagcaatgtttaagaaagacggaacatatttcatgtttgcttctcatcttagcggttgggatccgaacgacaatgtctacgctaccgcaacctcgatctctgggccatggtcgtcattcgctactttcgctccatccggctcaaatacgttctcttcgcagacaaattacatcctaccctttggttctggtgcgatctatatgggcgatcgctgggtgtcgtcgaacctgatgaggagcacttacgtctggcttccactcacgatcaacggtaagacagctagcatggcagaccaagtgaactgggtaccgaacgtatcagccggtacatggaccgtaggtccatcggaggtctggccggaggctgaagcagctacgatcgcaaacggtgccaaagtagcttcgtgttcggcatgcagtgggacccaagacgtcggatacatcggcggctcatccggtggttctgtcacattctctggcgtagccagtagtgcgtcgacgaagagcactattcgcgtcaagtaccttaatggagattcgacgcagcggtacgcaactgtgacggtgaatggtgcgagccagaagttggctttcttgcctacggttggaggcacccctggcagcagcacgctgaatgcgaacctcaattcggggagctcaaacactattgtgatcacgacgacggatggcacgtatgggcctgatattgataggattatggtgccgtcgacctga

SEQ ID NO: 10958 - protein, 446 aa, Muscodor strobelii
  misc_feature: SGI Peptide ID NO. 563500
  misc_feature (1)..(446): NCBI GI: 119483992 Blast Desc: glycosyl hydrolase family 43 protein [Neosartorya fischeri NRRL 181] gi|119410055|gb|EAW20002.1| glycosyl hydrolase family 43 protein [Neosartorya fischeri NRRL 181]
  misc_feature (4)..(444): NCBI GI: 242804018 Blast Desc: glycosyl hydrolase family 43 protein [Talaromyces stipitatus ATCC 10500] gi|218717636|gb|EED17057.1| glycosyl hydrolase family 43 protein [Talaromyces stipitatus ATCC 10500]
  misc_feature (11)..(446): NCBI GI: 70982855 Blast Desc: glycosyl hydrolase family 43 protein [Aspergillus fumigatus Af293] gi|66844580|gb|EAL84917.1| glycosyl hydrolase family 43 protein [Aspergillus fumigatus Af293]
  misc_feature (11)..(446): NCBI GI: 159123839 Blast Desc: conserved [Aspergillus fumigatus A1163]
  misc_feature (1)..(444): NCBI GI: 189193481 Blast Desc: galactan 1,3-beta-galactosidase [Pyrenophora tritici-repentis Pt-1C-BFP] gi|187978643|gb|EDU45269.1| galactan 1,3-beta-galactosidase [Pyrenophora tritici-repentis Pt-1C-BFP]
  misc_feature (2)..(444): NCBI GI: 212539650 Blast Desc: glycosyl hydrolase family 43 protein [Penicillium marneffei ATCC 18224] gi|210067279|gb|EEA21371.1| glycosyl hydrolase family 43 protein [Penicillium marneffei ATCC 18224]
  misc_feature (8)..(445): NCBI GI: 256728240 Blast Desc: NECHADRAFT_64756 [Nectria haematococca mpVI 77-13-4]
  misc_feature (20)..(443): NCBI GI: 169786153 Blast Desc: [Aspergillus oryzae RIB40] gi|83776285|dbj|BAE66404.1| protein product [Aspergillus oryzae]
  misc_feature (9)..(446): NCBI GI: 121714849 Blast Desc: glycosyl hydrolase family 43 protein [Aspergillus clavatus NRRL 1] gi|119403190|gb|EAW13608.1| glycosyl hydrolase family 43 protein [Aspergillus clavatus NRRL 1]
  misc_feature (1)..(445): NCBI GI: 261357683 Blast Desc: glycosyl hydrolase family 43 protein [Verticillium albo-atrum VaMs.102]
MRSLRAGLFLLAASAVNASLQIVPGATWTATNQAAHVQAHGSGIIKVGSTYYMVGEDKTGGSAFQNINCYSSTDLVQWTYVGALLSRTSSGDLGPNRVVERPKVIYNDSTKKYVLWMHIDDSSYGEAKVGVATSNSVCSGYSYIGSWRPLGFQSRDMGLFKDDDGKAYLLTEDRANGLRIDALNSDYTNVTSATHLFGSYEAPAMFKKDGTYFMFASHLSGWDPNDNVYATATSISGPWSSFATFAPSGSNTFSSQTNYILPFGSGAIYMGDRWVSSNLMRSTYVWLPLTINGKTASMADQVNWVPNVSAGTWTVGPSEVWPEAEAATIANGAKVASCSACSGTQDVGYIGGSSGGSVTFSGVASSASTKSTIRVKYLNGDSTQRYATVTVNGASQKLAFLPTVGGTPGSSTLNANLNSGSSNTIVITTTDGTYGPDIDRIMVPST

SEQ ID NO: 10959 - DNA, 169 bp, Muscodor strobelii
  misc_feature: SGI EST ID NO. CUFF.25884.0
  misc_feature: Variant of the nucleotide sequence at SEQ ID NO 10957
ttcttactcgccgcgtcagcggtcaatgcctcgctgcagatcgttccgggcgcgacatggacggcgaccaaccaagccgcacatgtgcaagcccacggctcaggaataatcaaagtcggatcaacatactatatggtaggcgaagacaaaacaggcggctcagctttcc

SEQ ID NO: 10960 - DNA, 2577 bp, Muscodor strobelii
  misc_feature: SGI cDNA ID NO. 563501
  misc_feature: Elevated expression when VOC is produced
  misc_feature: Encodes the peptide sequence at SEQ ID NO 10961
atggatcaacccgccaccaagaagagaaggctagcccccaaggtcgagccgcaacccaacccttctcactatgcgcctcagccatcgccgtctgttgctgcttcccctgctatcaatagtgccgcctcttacgcccatgaaccagctcctccggttcagcattatcaagtttcagaagctcctcgaccggtagcagaacgcaatgaattcgaatccttcgcgagacatctgcaagatgcagctatgcttatatatcgtcaaagtcaaaaaccgtcgtacgagaatgtatcagtgctattgttgagctgggaggacgacaatgccgccgagcaagacatcctgggcctcgagcaggtctttcgcgaacgatataactaccgaactgagagatatactattcctgccgtagcaaatgctagtatcaagcttggggttcgcgtagcatccttcctggagcctgcaggccaagacactctactcattgtgcattacgcgggctatggcttcgtggacgcggacaaacatttgtattgggcatgtaatccggggggaaacgtaccgaaactcagatgggacgggtttcgttgcctcattgaagagtcatcgtcagacgtgcttctactgttggatagttgcaccgtgaggggcccgcccgcgatcgtgggcaacagcacgaagcaagtgatagcggcaagcatccctgaacactatgctcgagattctgtagcaaggtccttcacggccaaccttgcagaagcctttttgcaactgagcggtgggaagcctttcacttcagagcttctctaccaagaagctgcgcgattgagacatcatgaactcctccaagttcctggaatcacgaacggaatgagcgccaaaaccacattaatgctagacaagctaccgctgctatacaatatcaattccggaaaggggcagagcctgagtctctgtccactcgtacaagctgcctcgcctcaatcccaacatccggagctaaccttgctgcaaccgcgtgaaatgagcgctctccaccctagcgcgcttgcggacctggcattcgaagaaccgagagttctggtctgtacaacattcgtcggcgaggctacaccagatatgtcgtcgttctatcactggctccagaatgcgcccagcgctggacctaggatcgccgttgaaggcatgttcttaggaccccctaccatgctgctcatatctatgcccagcgctgtttggagtgtcgtcgaacatgataaagtctgttgctttctgggacatattaactctcataacatgacgcatctctacaaagaactggttggttctatgccgctgaataatgcgttggccagagatacagatgacggcagaatactcctcgaggcgagggaggtagttaaagctacgccggctacgactcgacgacacgtgttgcccgaaacaccacgcaccgaaggtcggaatagagtcaactcgatggctttatctcaaaatccctctgctcaagggatgccctaccccatcaatacaccaggaaccgctatttcgaggaaagcggatgtggaagattccgctgaaatgcaggaggcagccgagcaactcaaggcattgagccacgttcgccatgcgagcgatgatatctcctccgcacgccctcaacattcgcctggcatacgagccgcagatccaaagttggaagagaggtcgacggttgacggcaatgaaaaggccacgatcgagctgtattatgcagatcagacaacgccatcctcgagatccaagcaagggcgaagacggtccatccagaagcctatcgtcaagcaagaaactagatgtggccattgcagtcatgccccttttaaagactcatcctctcttcgcaaacacattgccgctgctcacacgcgcccatttccttgcgcattcgcttttgcaggttgtccgagcacatttgggtcgaaaaatgaatggaagagacatattgcttctcaacatttgtgtttacaatattaccgatgctcggcctgcccacaatcgtcaattgaaggaaaggggaacgaattcaaccgcaaagacctcttcacacagcacctacgccgtatgcatgctccgtttgctattaagaaatccatcaataaaagtgatggaaagttgcaagcagaatgggaagatcatgtcaaaagcatgcagcaatcttgtttggtcacgcggcggaagcctccacaacggtcagcttgtccaaaacctggatgcacaagtacttttgaaggaccaacatcctgggatgagtggaccgaacatgttggtcgtcacatggaaaaaggagagtctggaatcggtgttgatcgtcttctgtccaaatgggctttagatgagggcatcattgaacggaaagatgacggcgagtatcgcctttgcagcggtgccggaagtggctcagaaaaagagcacgtcaacgacagcataaatcataagagcaacagtacagactatctcgaagacagcaacaagcgagaccacgaagaacgcacgattgttgcagcgagtacgattgtggataaaatggatatggattga

SEQ ID NO: 10961 - protein, 858 aa, Muscodor strobelii
  misc_feature: SGI Peptide ID NO. 563501
  misc_feature (1)..(858): NCBI GI: 261355758 Blast Desc: conserved [Verticillium albo-atrum VaMs.102]
  misc_feature (6)..(807): NCBI GI: 46111507 Blast Desc: FG02635.1 [Gibberella zeae PH-1]
  misc_feature (1)..(858): NCBI GI: 39945988 Blast Desc: MGG_08114 [Magnaporthe grisea 70-15] gi|145019357|gb|EDK03585.1| MGG_08114 [Magnaporthe grisea 70-15]
  misc_feature (3)..(858): NCBI GI: 171691653 Blast Desc: protein product [Podospora anserina] gi|170945775|emb|CAP72575.1| protein product [Podospora anserina]
  misc_feature (4)..(858): NCBI GI: 85092078 Blast Desc: NCU04673 [Neurospora crassa OR74A] gi|28920618|gb|EAA29980.1| conserved [Neurospora crassa OR74A] gi|28950061|emb|CAD70815.1| [Neurospora crassa]
  misc_feature (3)..(839): NCBI GI: 156044716 Blast Desc: SS1G_10462 [Sclerotinia sclerotiorum 1980] gi|154694850|gb|EDN94588.1| SS1G_10462 [Sclerotinia sclerotiorum 1980]
  misc_feature (3)..(841): NCBI GI: 154291947 Blast Desc: BC1G_14276 [Botryotinia fuckeliana B05.10] gi|150846377|gb|EDN21570.1| BC1G_14276 [Botryotinia fuckeliana B05.10]
  misc_feature (3)..(858): NCBI GI: 116179734 Blast Desc: CHGG_00495 [Chaetomium globosum CBS 148.51] gi|88184792|gb|EAQ92260.1| CHGG_00495 [Chaetomium globosum CBS 148.51]
  misc_feature (612)..(808): NCBI GI: 154310435 Blast Desc: BC1G_07138 [Botryotinia fuckeliana B05.10] gi|150851469|gb|EDN26662.1| BC1G_07138 [Botryotinia fuckeliana B05.10]
  misc_feature (612)..(774): NCBI GI: 156056072 Blast Desc: SS1G_05388 [Sclerotinia sclerotiorum 1980] gi|154703172|gb|EDO02911.1| SS1G_05388 [Sclerotinia sclerotiorum 1980]
  misc_feature: Useful for introducing or modulating the production of volatile compounds
MDQPATKKRRLAPKVEPQPNPSHYAPQPSPSVAASPAINSAASYAHEPAPPVQHYQVSEAPRPVAERNEFESFARHLQDAAMLIYRQSQKPSYENVSVLLLSWEDDNAAEQDILGLEQVFRERYNYRTERYTIPAVANASIKLGVRVASFLEPAGQDTLLIVHYAGYGFVDADKHLYWACNPGGNVPKLRWDGFRCLIEESSSDVLLLLDSCTVRGPPAIVGNSTKQVIAASIPEHYARDSVARSFTANLAEAFLQLSGGKPFTSELLYQEAARLRHHELLQVPGITNGMSAKTTLMLDKLPLLYNINSGKGQSLSLCPLVQAASPQSQHPELTLLQPREMSALHPSALADLAFEEPRVLVCTTFVGEATPDMSSFYHWLQNAPSAGPRIAVEGMFLGPPTMLLISMPSAVWSVVEHDKVCCFLGHINSHNMTHLYKELVGSMPLNNALARDTDDGRILLEAREVVKATPATTRRHVLPETPRTEGRNRVNSMALSQNPSAQGMPYPINTPGTAISRKADVEDSAEMQEAAEQLKALSHVRHASDDISSARPQHSPGIRAADPKLEERSTVDGNEKATIELYYADQTTPSSRSKQGRRRSIQKPIVKQETRCGHCSHAPFKDSSSLRKHIAAAHTRPFPCAFAFAGCPSTFGSKNEWKRHIASQHLCLQYYRCSACPQSSIEGKGNEFNRKDLFTQHLRRMHAPFAIKKSINKSDGKLQAEWEDHVKSMQQSCLVTRRKPPQRSACPKPGCTSTFEGPTSWDEWTEHVGRHMEKGESGIGVDRLLSKWALDEGIIERKDDGEYRLCSGAGSGSEKEHVNDSINHKSNSTDYLEDSNKRDHEERTIVAASTIVDKMDMD

SEQ ID NO: 10962 - DNA, 4479 bp, Muscodor strobelii
  misc_feature: SGI EST ID NO. CUFF.25890.0
  misc_feature: Variant of the nucleotide sequence at SEQ ID NO 10960
cgcggctcggaggggggaaggctggcacggcggcatgtacgaggtcaagtatcgtgcgcatagtcgagtgtggatggtgctgtagttgcatttgctgtgaagcagacaggtgggggcttgctaggctgcgacgattttgtccaatcaccacggggccgacctggcctcgcgaagggtggctatggcccccgctgtattctgtgctgtaagttgagcgatccctctcgcgaatcctgattcaccgtgaatttgcctatccatgcttgtgctggtgctgctccatgctatccgagaccactcctcattcgtttgtcccatcatgggcgacatggcccaagcagctgaggagatacgagcatcaaaaagagattatacccaaacagaccagtggacgggaaggctgctcgagcgaggccagcgagcgccactgagttcatgatccaccgcctcggagggcgctgtgcacatcgagcgagtgacgatggcgacgatgctaccaaaagcggcacgaggagtattatacatgaaggagtataccgctcgtaagatatgctttctttggctcgtttcgtctcgtctcgtggacgaatggtaggctggcaggctgcttcccgcgcatcgcaagtaaaagggaaggtcagaatatcgaatagagcgtgcgtgtccacaatccctcccaccctctctcactgatgcgtctatcactcatcaattagcgacaacctacctgcatcaagcgccgtccacttgaattcgagcttgatatgggacagccgtgatatcccgtctcctctttcttgttgttaccttacccgtctattacagttgttactgcctacatctgaacacagctcttctctaccgtgtatatggttcctgggttcaagctgacttgcactcgtacccttcgcccaaaaaaagaagggccccgacccagaagggtgtcgttctaaattcgaaacctttcctagcccagccaagtcagacgacgccaattcacccattaccaattctcccacagccgccaggtctgagaggaagtgcatacagtgtcataatctatacgccttgctaaataagctgtctcacccgcctgcgcgcccgcctcactaggttcagacactcagtcagcacacgctaccttgagaacatccttgtgtccccaattccagccttgcgtgtagcctttccgtcaagcgtccagcctgatttcccactcccaccttcccacgcacctctcccacacacacctttgctttcgtcctcggcaataggttcccctctctccagattgcccattccattgtccattcgacactcttttccagccaacttagattcagatagttgtactttgccatatgtcggatcttcttgtctaaatgacttccgttcctatgcctcattgtccccgtgagacccttgccaccattgttgggacatcccccattttgtagctggatttctgctgacggcgtcctccgccgtgtctgtctcgacctgccgctcattgtgtccaaacaccactcccaacccgaggccaatggatcaacccgccaccaagaagagaaggctagcccccaaggtcgagccgcaacccaacccttctcactatgcgcctcagccatcgccgtctgttgctgcttcccctgctatcaatagtgccgcctcttacgcccatgaaccagctcctccggttcagcattatcaagtttcagaagctcctcgaccggtagcagaacgcaatgaattcgaatccttcgcgagacatctgcaagatgcagctatgcttatatatcgtcaaagtcaaaaaccgtcgtacgagaatgtatcagtgctattgttgagctgggaggacgacaatgccgccgagcaagacatcctgggcctcgagcaggtctttcgcgaacgatataactaccgaactgagagatatactattcctgccgtagcaaatgctagtatcaagcttggggttcgcgtagcatccttcctggagcctgcaggccaagacactctactcattgtgcattacgcgggctatggcttcgtggacgcggacaaacatttgtattgggcatgtaatccggggggaaacgtaccgaaactcagatgggacgggtttcgttgcctcattgaagagtcatcgtcagacgtgcttctactgttggatagttgcaccgtgaggggcccgcccgcgatcgtgggcaacagcacgaagcaagtgatagcggcaagcatccctgaacactatgctcgagattctgtagcaaggtccttcacggccaaccttgcagaagcctttttgcaactgagcggtgggaagcctttcacttcagagcttctctaccaagaagctgcgcgattgagacatcatgaactcctccaagttcctggaatcacgaacggaatgagcgccaaaaccacattaatgctagacaagctaccgctgctatacaatatcaattccggaaaggggcagagcctgagtctctgtccactcgtacaagctgcctcgcctcaatcccaacatccggagctaaccttgctgcaaccgcgtgaaatgagcgctctccaccctagcgcgcttgcggacctggcattcgaagaaccgagagttctggtctgtacaacattcgtcggcgaggctacaccagatatgtcgtcgttctatcactggctccagaatgcgcccagcgctggacctaggatcgccgttgaaggcatgttcttaggaccccctaccatgctgctcatatctatgcccagcgctgtttggagtgtcgtcgaacatgataaagtctgttgctttctgggacatattaactctcataacatgacgcatctctacaaagaactggttggttctatgccgctgaataatgcgttggccagagatacagatgacggcagaatactcctcgaggcgagggaggtagttaaagctacgccggctacgactcgacgacacgtgttgcccgaaacaccacgcaccgaaggtcggaatagagtcaactcgatggctttatctcaaaatccctctgctcaagggatgccctaccccatcaatacaccaggaaccgctatttcgaggaaagcggatgtggaagattccgctgaaatgcaggaggcagccgagcaactcaaggcattgagccacgttcgccatgcgagcgatgatatctcctccgcacgccctcaacattcgcctggcatacgagccgcagatccaaagttggaagagaggtcgacggttgacggcaatgaaaaggccacgatcgagctgtattatgcagatcagacaacgccatcctcgagatccaagcaagggcgaagacggtccatccagaagcctatcgtcaagcaagaaactagatgtggccattgcagtcatgccccttttaaagactcatcctctcttcgcaaacacattgccgctgctcacacgcgcccatttccttgcgcattcgcttttgcaggttgtccgagcacatttgggtcgaaaaatgaatggaagagacatattgcttctcaacatttgtgtttacaatattaccgatgctcggcctgcccacaatcgtcaattgaaggaaaggggaacgaattcaaccgcaaagacctcttcacacagcacctacgccgtatgcatgctccgtttgctattaagaaatccatcaataaaagtgatggaaagttgcaagcagaatgggaagatcatgtcaaaagcatgcagcaatcttgtttggtcacgcggcggaagcctccacaacggtcagcttgtccaaaacctggatgcacaagtacttttgaaggaccaacatcctgggatgagtggaccgaacatgttggtcgtcacatggaaaaaggagagtctggaatcggtgttgatcgtcttctgtccaaatgggctttagatgagggcatcattgaacggaaagatgacggcgagtatcgcctttgcagcggtgccggaagtggctcagaaaaagagcacgtcaacgacagcataaatcataagagcaacagtacagactatctcgaagacagcaacaagcgagaccacgaagaacgcacgattgttgcagcgagtacgattgtggataaaatggatatggattgacatgatatatgagaaatttgtcaaaaaaggaaaacgcaaacttatttttttcaacctcgccatcggtattcaacctcggcgaactatatacttatttcgtatataactggctggcaaggggaagaaaaacagcaaatatgctggtgccggcgatgcactttcgatagatacgatcaacgcgttacgacattcatgaacaatatttagctacgtcgcttcttcccctggtattcttattgtatgcatatatacatgacgaagggagacgatgtataaatacgatattatctaaacaaatgcaaccacaactgctattcaacgctgtacgaagtggcagataaatgaatactacatacttg

SEQ ID NO: 10963 - DNA, 1656 bp, Muscodor strobelii
  misc_feature: SGI cDNA ID NO. 563502
  misc_feature: Encodes the peptide sequence at SEQ ID NO 10964
atgaggaagtttggaaacatctacctgattgcggcaacgtctgtgattggtggcgccctcttcggcttcgatatctcgtccatgagtgctatcatcgccacagagccgtacaaatgccaatataacgcccagggcaacgacccggtcacgggagcatgccgaggtcccgatgccagtctccaaggcggcatcgtcgcatcgatgcctgctggctcttggcttggtgctttgttttcaggctttatatctgatcgtttcggccgaaagacatcgatacaaatcggagctttaatctggattgtagggtcgatcgacgtacctatgttgatcgcaggtagggtcataaacggcttctccgtcggtatctgttctgcccaggtccccgtgtatatctcggagatttcgcctgcttcgaagcgagggttgcttatcgggatgcagcaatgggctatcacatggggtatagccatcatgttcttcgtctgctatggatcatcattccttaaaggcgcagctgcattccgcttaccttgggggttgcagattgtgcccgcggccttgctgttcgtcggcctttgcatcctccctgagagccccagatggttggcgaagaaagacaaatgggacgagatgaatcaggtgttgacgcttgtgcatggaaagggaaatccgaatgcaccgatagtgatcgaagaggctgcggagatccagcgcgtcataaatatcgacgcccagaacgctaacgtatcgtggttcgagcttgttcgtccaaatatgatcaaccgtacacatatcgggctcttcactcaaatatggagccaactgacggggatgaatgtgatgatgtactatatcgcctacatattcatcatggcaggattaggtgacaacttattgccaagcggcatacagtttatcatcaatgtggttatgactgtacctgctttgatgtggcaggatgcttggggtcgacgtccgactatgttggtcggcgcatttctgatgtgtcttttcatgtcactcaatgccgggctgtttgctgtgtattcacgaccagctacccccaatgaccatttcagcacagatgccatttcaatggtgatcggaggtgctcccgcaaaggctatcattgcttcgacttatctgttcgttgcttcatttgcgtcaacgtggggtccagcatcatggacatatcctcctgagctctacccccttcgtgtacgcgggaaggccgtagctctggctacttcagggaactgggctttcaactttgctctcgcatattttgtgccaatttcatttgcgactatcacatggaagacatacgtcctgtttgcagtgttctgcgcatccatgttcgtccacgtattttttatgttccccgaaacggccaacaagcgactcgaggagatcgcagccatcttcgaggacaggggccccggatctatcaagtatgttgggacaccggcctggaaaactcacaatgatcgacgtgcggcgctcgggttcgagcaccaaggaggtgtcaatctgaaggatctcgagggtggaaatgtcgccaacaatccgaattcaagcggggatctgaaagacgacactgttcaagcagagaatgagtctccaactacctctcctagaacagccccaggtgagtga

SEQ ID NO: 10964 - protein, 551 aa, Muscodor strobelii
  misc_feature: SGI Peptide ID NO. 563502
  misc_feature (10)..(427): Pfam Id: PF07690 Pfam Desc: Major Facilitator Superfamily
  misc_feature (10)..(475): Pfam Id: PF00083 Pfam Desc: Sugar (and other) transporter
  misc_feature (10)..(339): Pfam Id: PF00083 Pfam Desc: Sugar (and other) transporter
  misc_feature (375)..(475): Pfam Id: PF00083 Pfam Desc: Sugar (and other) transporter
  misc_feature (5)..(495): NCBI GI: 145243150 Blast Desc: An11g01100 [Aspergillus niger] gi|134078787|emb|CAK96900.1| protein product [Aspergillus niger]
  misc_feature (5)..(515): NCBI GI: 226294199 Blast Desc: high-affinity glucose transporter [Paracoccidioides brasiliensis Pb18]
  misc_feature (5)..(515): NCBI GI: 226278926 Blast Desc: high-affinity glucose transporter [Paracoccidioides brasiliensis Pb01]
  misc_feature (5)..(526): NCBI GI: 240106975 Blast Desc: Sugar transporter family protein [Coccidioides posadasii C735 delta SOWgp]
  misc_feature (5)..(526): NCBI GI: 119174880 Blast Desc: CIMG_09387 [Coccidioides immitis RS]
  misc_feature (5)..(525): NCBI GI: 169772699 Blast Desc: [Aspergillus oryzae RIB40] gi|238490618|ref|XP_002376546.1| sugar transporter, [Aspergillus flavus NRRL3357] gi|83768679|dbj|BAE58816.1| protein product
  misc_feature (5)..(507): NCBI GI: 154282995 Blast Desc: HCAG_02464 [Ajellomyces capsulatus NAm1] gi|150410473|gb|EDN05861.1| HCAG_02464 [Ajellomyces capsulatus NAm1]
  misc_feature (5)..(516): NCBI GI: 121699732 Blast Desc: sugar transporter [Aspergillus clavatus NRRL 1] gi|119396273|gb|EAW06705.1| sugar transporter [Aspergillus clavatus NRRL 1]
  misc_feature (5)..(515): NCBI GI: 225684541 Blast Desc: high-affinity glucose transporter [Paracoccidioides brasiliensis Pb03]
  misc_feature (1)..(527): NCBI GI: 85092824 Blast Desc: NCU08152 [Neurospora crassa OR74A] gi|28921004|gb|EAA30327.1| NCU08152 [Neurospora crassa OR74A]
MRKFGNIYLIAATSVIGGALFGFDISSMSAIIATEPYKCQYNAQGNDPVTGACRGPDASLQGGIVASMPAGSWLGALFSGFISDRFGRKTSIQIGALIWIVGSIDVPMLIAGRVINGFSVGICSAQVPVYISEISPASKRGLLIGMQQWAITWGIAIMFFVCYGSSFLKGAAAFRLPWGLQIVPAALLFVGLCILPESPRWLAKKDKWDEMNQVLTLVHGKGNPNAPIVIEEAAEIQRVINIDAQNANVSWFELVRPNMINRTHIGLFTQIWSQLTGMNVMMYYIAYIFIMAGLGDNLLPSGIQFIINVVMTVPALMWQDAWGRRPTMLVGAFLMCLFMSLNAGLFAVYSRPATPNDHFSTDAISMVIGGAPAKAIIASTYLFVASFASTWGPASWTYPPELYPLRVRGKAVALATSGNWAFNFALAYFVPISFATITWKTYVLFAVFCASMFVHVFFMFPETANKRLEEIAAIFEDRGPGSIKYVGTPAWKTHNDRRAALGFEHQGGVNLKDLEGGNVANNPNSSGDLKDDTVQAENESPTTSPRTAPGE

SEQ ID NO: 10965 - DNA, 1409 bp, Muscodor strobelii
  misc_feature: SGI EST ID NO. CUFF.25896.0
  misc_feature: Variant of the nucleotide sequence at SEQ ID NO 10963
tgcgagcttcgataggggctattttaattcaagtttccaagctgacctgtggttgaatagtactatatcgcctacatattcatcatggcaggattaggtgacaacttattgccaagcggcatacagtttatcatcaatgtggttatgactgtacctgctttgatgtggcaggatgcttggggtcgacgtccgactatgttggtcggcgcatttctgatgtgtcttttcatgtcactcaatgccgggctgtttgctgtgtattcacgaccagctacccccaatgaccatttcagcacagatgccatttcaatggtgatcggaggtgctcccgcaaaggctatcattgcttcgacttatctgttcgttgcttcatttgcgtcaacgtggggtccagcatcatggacatatcctcctgagctctacccccttcgtgtacgcgggaaggccgtagctctggctacttcagggaactgggctttcaactttgctctcgcgtaagtaagaaaaaaaagggcgcctggtcctcaattgcgtcatattttgtgccaatttcatttgcgactatcacatggaagacatacgtcctgtttgcagtgttctgcgcatccatgttcgtccacgtattttttatgttccccgaaacggccaacaagcgactcgaggagatcgcagccatcttcgaggacaggggccccggatctatcaagtatgttgggacaccggcctggaaaactcacaatgatcgacgtgcggcgctcgggttcgagcaccaaggaggtgtcaatctgaaggatctcgagggtggaaatgtcgccaacaatccgaattcaagcggggatctgaaagacgacactgttcaagcagagaatgagtctccaactacctctcctagaacagccccaggtgagtgacaagatcattggccaggaactatgtcatatgtcaaaattcgagagcaagcggcgtagagcaagcagcatatttgttatgtcgaagcagctgatgcgatggatttcgatatttgtcttgactaggcctaacaggtgtcgggtgggttcatcggaattgctgttatttgatcctcaccagttgatcgtgttcgggatcacgaacaggggtttcgtatctgttctagtcaaagatgcacaaatgcacgatcccaatagcatgtgggaatcgcatggaagagctcgatgaagtagatacctctcaaggtagaatcacgatgtaaacaggcgagttccagacacgtgcttctcgatcaactcaatgcaaccttgttaggcgagattgagttgcaggaatcctgctatcctaaagcactttattgagcacgggttgtaagtattgatcgatgcaggtatcgcttccagataaaaggatcacaagttaacgctattgaatcgaga

SEQ ID NO: 10966 - DNA, 1905 bp, Muscodor strobelii
  misc_feature: SGI cDNA ID NO. 563503
  misc_feature: Reduced expression when VOC is produced
  misc_feature: Encodes the peptide sequence at SEQ ID NO 10967
atggagtcagattcctcgctgaagaggaaagacaccaccaagggtcctcccttgaggattctcagcttagatggtggaggagtccgaggttactccatgcttatcatactccaagagttgatgcaccgaacgtatgtcgagatggaggggaaagccccgcgtcgcgaacagatcccgaagccgtgcgaccacttcgatttgatcgtaggaaccggtactggcggtctcattgctatcatgctgggccgtctacgtctgaatctggagcaatgtaaagagttatatgtggaaatgacccgcatggtcttcgaaacggataagacgatcgctggaataccctatcgctccacactattcaaggcttcgatgctggaacaggcgatcaaggccgccgtcagagagcataccgtctcagatggcgaaggcaacgacggcaccgctcctggtcccgtcaatccgctatctgcggcttcgcgatcaagtgctggtagcccaagacgtaatcacagcaacgctagtactgttagcttcagcgcgaggggcccttcagcccaaggccgatctctgtttcgtggtggctcaggcgaccccaacgcaaagctatacgattcaagagaaaacaggacaaagaccgctgtaacggccgtgtacagaggcactcgcagaggtggtgaacctgcaattcttcggtcatatgactcgcgaaaagagcctgcacccgagtatgattgcaagatatgggaagccggacgagcaacgagtgccatcggtctagcctttaagcccattcagattggacagtcgattttccacgacgatggcgcgggcactttcaatccttcaccgcaggctttagatgaggcaactgtcaacgagtggccaggtcgcgaggttggtgttttcgtcagtgttggaacggggagacgtcctaagagctcgggagaaaaccaccatgtgtggtatgaaggctttatgggcgggtatgccgaagcaaggaataaactgatcgctaaaatcgaaggctgtgaaacgatacacgagcgaatgaagaaagagcttctgatgaaacggggtgtcaatatcgagaactactaccgattcaacgtcgaggttggcgtgggcgaattcgccatgaatgaatggcatcgactcggagatatcagcacaggaacaagggcgtaccttggtcgagaagccgaacaaaggatggtccaaggctcatcaacaaagctggcaaagattcatcgagcaatactgcgcttcaacaggatgagcaatgcaccagatattattgcaactccggcctctgctactgcctccgcctacatcgatgacaccccattggcagttgagctgccgggcgatatgccttcgtcttttcccaccttgccagttcggcagggcagcccaccaagcagacagtcctatgaatctgggactgaccaccttccggtcccaaatacgccatcgccaaggagctcgggtgagcgagtcacccattcgagtggccatccttcccctgcttcaatgaacacgcacgcgcatcaaccgggatcgaataagcccctgccagctggtcccaagtctccgcgcgacgatcagcctgaccgatttgtcgtcaatgctcccacaccagcccaatatcgccaagcttctggagccgacaagattgccattatgggatctgacgagtacccacgcaggcagaatccggtccagcaacatcaacctcaccgcatcgagccgccaccactaccgcccaaaactcctctgcccggaaacgaaagggtcgggaatggacgtccaccgcccgcaggccagaagccacctccataccccttggatgacgttggtccaccgccggcggtagacatgacaaggaaaccgaatttcagaggccgttaa

SEQ ID NO: 10967 - protein, 634 aa, Muscodor strobelii
  misc_feature: SGI Peptide ID NO. 563503
  misc_feature (21)..(285): Pfam Id: PF01734 Pfam Desc: Patatin-like phospholipase
  misc_feature (21)..(139): Pfam Id: PF01734 Pfam Desc: Patatin-like phospholipase
  misc_feature (4)..(634): NCBI GI: 171691659 Blast Desc: protein product [Podospora anserina] gi|170945778|emb|CAP72578.1| protein product [Podospora anserina]
  misc_feature (7)..(634): NCBI GI: 256726261 Blast Desc: [Nectria haematococca mpVI 77-13-4]
  misc_feature (7)..(634): NCBI GI: 28950058 Blast Desc: conserved [Neurospora crassa]
  misc_feature (7)..(634): NCBI GI: 46111505 Blast Desc: FG02634.1 [Gibberella zeae PH-1]
  misc_feature (1)..(631): NCBI GI: 154304459 Blast Desc: BC1G_09105 [Botryotinia fuckeliana B05.10] gi|150854085|gb|EDN29277.1| BC1G_09105 [Botryotinia fuckeliana B05.10]
  misc_feature (7)..(634): NCBI GI: 116179740 Blast Desc: CHGG_00498 [Chaetomium globosum CBS 148.51] gi|88184795|gb|EAQ92263.1| CHGG_00498 [Chaetomium globosum CBS 148.51]
  misc_feature (41)..(634): NCBI GI: 164425290 Blast Desc: NCU04670 [Neurospora crassa OR74A] gi|157070868|gb|EAA29977.2| conserved [Neurospora crassa OR74A]
  misc_feature (41)..(629): NCBI GI: 145612123 Blast Desc: MGG_08112 [Magnaporthe grisea 70-15] gi|145019355|gb|EDK03583.1| MGG_08112 [Magnaporthe grisea 70-15]
  misc_feature (6)..(489): NCBI GI: 71000882 Blast Desc: Patatin-like serine hydrolase [Aspergillus fumigatus Af293] gi|66852760|gb|EAL93084.1| Patatin-like serine hydrolase, [Aspergillus fumigatus Af293] gi|159129219|gb|EDP54333.1| serine
  misc_feature (1)..(505): NCBI GI: 242776124 Blast Desc: Patatin-like serine hydrolase, [Talaromyces stipitatus ATCC 10500] gi|218722402|gb|EED21820.1| Patatin-like serine hydrolase, [Talaromyces stipitatus ATCC 10500]
  misc_feature: Useful for introducing or modulating the production of volatile compounds
MESDSSLKRKDTTKGPPLRILSLDGGGVRGYSMLIILQELMHRTYVEMEGKAPRREQIPKPCDHFDLIVGTGTGGLIAIMLGRLRLNLEQCKELYVEMTRMVFETDKTIAGIPYRSTLFKASMLEQAIKAAVREHTVSDGEGNDGTAPGPVNPLSAASRSSAGSPRRNHSNASTVSFSARGPSAQGRSLFRGGSGDPNAKLYDSRENRTKTAVTAVYRGTRRGGEPAILRSYDSRKEPAPEYDCKIWEAGRATSAIGLAFKPIQIGQSIFHDDGAGTFNPSPQALDEATVNEWPGREVGVFVSVGTGRRPKSSGENHHVWYEGFMGGYAEARNKLIAKIEGCETIHERMKKELLMKRGVNIENYYRFNVEVGVGEFAMNEWHRLGDISTGTRAYLGREAEQRMVQGSSTKLAKIHRAILRFNRMSNAPDIIATPASATASAYIDDTPLAVELPGDMPSSFPTLPVRQGSPPSRQSYESGTDHLPVPNTPSPRSSGERVTHSSGHPSPASMNTHAHQPGSNKPLPAGPKSPRDDQPDRFVVNAPTPAQYRQASGADKIAIMGSDEYPRRQNPVQQHQPHRIEPPPLPPKTPLPGNERVGNGRPPPAGQKPPPYPLDDVGPPPAVDMTRKPNFRGR

SEQ ID NO: 10968 - DNA, 2636 bp, Muscodor strobelii
  misc_feature: SGI EST ID NO. CUFF.26020.0
  misc_feature: Variant of the nucleotide sequence at SEQ ID NO 10966
ctgacctgaggacgtgacttctctctttcaatctacaaacacgccaaggttgtattgtttcattcaaaccaaaatttcacactcttgcggcacagatccatagttgtcgtcacacggcctactgtggctgcttgtctcgccctgtcaactttgatcgtcagagacgccccagctattacctctctgccgagatccaatacccctgcaacagttcgtcaccggacgagagcgctaagcaacagcgagcgcggggcctttgttatcgaattggaagcccaacttctcgacactttattttctatttctgtcttcctttgaagtgctgtcgctgccctgaatacactgcgcttcaactcgtcctccgatagacgccatccaaactcttcaaaatggagtcagattcctcgctgaagaggaaagacaccaccaagggtcctcccttgaggattctcagcttagatggtggaggagtccgaggttactccatgcttatcatactccaagagttgatgcaccgaacgtatgtcgagatggaggggaaagccccgcgtcgcgaacagatcccgaagccgtgcgaccacttcgatttgatcgtaggaaccggtactggcggtctcattgctatcatgctgggccgtctacgtctgaatctggagcaatgtaaagagttatatgtggaaatgacccgcatggtcttcgaaacggataagacgatcgctggaataccctatcgctccacactattcaaggcttcgatgctggaacaggcgatcaaggccgccgtcagagagcataccgtctcagatggcgaaggcaacgacggcaccgctcctggtcccgtcaatccgctatctgcggcttcgcgatcaagtgctggtagcccaagacgtaatcacagcaacgctagtactgttagcttcagcgcgaggggcccttcagcccaaggccgatctctgtttcgtggtggctcaggcgaccccaacgcaaagctatacgattcaagagaaaacaggacaaagaccgctgtaacggccgtgtacagaggcactcgcagaggtggtgaacctgcaattcttcggtcatatgactcgcgaaaagagcctgcacccgagtatgattgcaagatatgggaagccggacgagcaacgagtgccatcggtctagcctttaagcccattcagattggacagtcgattttccacgacgatggcgcgggcactttcaatccttcaccgcaggctttagatgaggcaactgtcaacgagtggccaggtcgcgaggttggtgttttcgtcagtgttggaacggggagacgtcctaagagctcgggagaaaaccaccatgtgtggtatgaaggctttatgggcgggtatgccgaagcaaggaataaactgatcgctaaaatcgaaggctgtgaaacgatacacgagcgaatgaagaaagagcttctgatgaaacggggtgtcaatatcgagaactactaccgattcaacgtcgaggttggcgtgggcgaattcgccatgaatgaatggcatcgactcggagatatcagcacaggaacaagggcgtaccttggtcgagaagccgaacaaaggatggtccaaggctcatcaacaaagctggcaaagattcatcgagcaatactgcgcttcaacaggatgagcaatgcaccagatattattgcaactccggcctctgctactgcctccgcctacatcgatgacaccccattggcagttgagctgccgggcgatatgccttcgtcttttcccaccttgccagttcggcagggcagcccaccaagcagacagtcctatgaatctgggactgaccaccttccggtcccaaatacgccatcgccaaggagctcgggtgagcgagtcacccattcgagtggccatccttcccctgcttcaatgaacacgcacgcgcatcaaccgggatcgaataagcccctgccagctggtcccaagtctccgcgcgacgatcagcctgaccgatttgtcgtcaatgctcccacaccagcccaatatcgccaagcttctggagccgacaagattgccattatgggatctgacgagtacccacgcaggcagaatccggtccagcaacatcaacctcaccgcatcgagccgccaccactaccgcccaaaactcctctgcccggaaacgaaagggtcgggaatggacgtccaccgcccgcaggccagaagccacctccataccccttggatgacgttggtccaccgccggcggtagacatgacaaggaaaccgaatttcagaggccgttaaattggtcttgttgatacactactacccatgctttacgattatataatgtcgacatagagagtcgaatgggatcttggcgtttcaagagaaggagatggatttcacgttataccaattggctcttcatgatttggtcaagaataccaaacgcgtcacgattctgatattgtacagttgtttccggttgataatggatccggcgtcctggaaatacctatcacggcgtctgtgtgcaagttgcaaatactctttatggttaaactgtcgataccctgttcctagtctagcttagatatacgatttgatgactcttattatgaatgacaattaacgtgcgcactt

SEQ ID NO: 10969 - DNA, 975 bp, Muscodor strobelii
  misc_feature: SGI cDNA ID NO. 563504
  misc_feature: Encodes the peptide sequence at SEQ ID NO 10970
atgtcttctatcaagagagtcgctatcctcggtgcctcgggcaacttcggcgctccaacaacagacgcgctcatcagcgctggcttcgacgtaactgtcataacgcgaccggactctacaagcgccttccaggggaaggtgcctgtagttcgcgtcgactatgctgatttcgaggctttgacgactgccctgctgggtcaggacgcggtcgtgaatatgcttggtccggggccatattccgcacggcaagggcactgtggtcgctgcgtattgtgctggcgtgaagaggtttattatggcatgtatctagcggcaactaacgcggaggaatcgacagtcaatgacttcggttggggcttgaacgataaagccctgccggagttcaaacctattggcgagatgcgcagggttgcttgggatgctgcgaaggagcatgcaaagagtgacgaagggaaggatgatgggttcagttggacaggtattacgattgggaatccgattgattgggctctgcggaaattcccaagaatggggttcaatgtcaatactcagacagcaacgatctttgatgacggaacagaggaattcacgggcacgacacttgaaggcattgctgagtccgttgttggcgttctttccaagcccactgagacgaagaatcgatttgttaaggtacggtcgatccaagtttcgcagaacacgttgcttgctgcgtttcagaaggtttcgggcaaggaatggacaattgagcgatcgacggcaaaggatgtgcttgacgaaggacgcagaaagcattcgcaaggattgggaggctggattttggatttgcttgtctttcagctgtacagtccgggcgagaagaggtgcattgttgcgagtcttgatgactcggataataagcttctgggtgtacgagaggagagtgctgaggaggttgtcaggaaagctttggggatgactactatggattcctag

SEQ ID NO: 10970 - protein, 324 aa, Muscodor strobelii
  misc_feature: SGI Peptide ID NO. 563504
  misc_feature (12)..(317): NCBI GI: 115388669 Blast Desc: conserved [Aspergillus terreus NIH2624] gi|114195924|gb|EAU37624.1| conserved [Aspergillus terreus NIH2624]
  misc_feature (1)..(317): NCBI GI: 121712531 Blast Desc: conserved [Aspergillus clavatus NRRL 1] gi|119402029|gb|EAW12451.1| conserved [Aspergillus clavatus NRRL 1]
  misc_feature (1)..(317): NCBI GI: 119473553 Blast Desc: NmrA-like family protein [Neosartorya fischeri NRRL 181] gi|119406805|gb|EAW16755.1| NmrA-like family protein [Neosartorya fischeri NRRL 181]
  misc_feature (2)..(321): NCBI GI: 256724412 Blast Desc: NECHADRAFT_54646 [Nectria haematococca mpVI 77-13-4]
  misc_feature (23)..(318): NCBI GI: 159128500 Blast Desc: conserved [Aspergillus fumigatus A1163]
  misc_feature (1)..(317): NCBI GI: 39951713 Blast Desc: MGG_01499 [Magnaporthe grisea 70-15] gi|145020659|gb|EDK04788.1| MGG_01499 [Magnaporthe grisea 70-15]
  misc_feature (23)..(318): NCBI GI: 70985719 Blast Desc: NmrA-like family protein [Aspergillus fumigatus Af293] gi|66845994|gb|EAL86327.1| NmrA-like family protein [Aspergillus fumigatus Af293]
  misc_feature (2)..(318): NCBI GI: 46127001 Blast Desc: FG07878.1 [Gibberella zeae PH-1]
  misc_feature (48)..(324): NCBI GI: 258570721 Blast Desc: [Uncinocarpus reesii 1704] gi|237904434|gb|EEP78835.1| [Uncinocarpus reesii 1704]
  misc_feature (1)..(314): NCBI GI: 240279125 Blast Desc: conserved [Ajellomyces capsulatus H143]
MSSIKRVAILGASGNFGAPTTDALISAGFDVTVITRPDSTSAFQGKVPVVRVDYADFEALTTALLGQDAVVNMLGPGPYSARQGHCGRCVLCWREEVYYGMYLAATNAEESTVNDFGWGLNDKALPEFKPIGEMRRVAWDAAKEHAKSDEGKDDGFSWTGITIGNPIDWALRKFPRMGFNVNTQTATIFDDGTEEFTGTTLEGIAESVVGVLSKPTETKNRFVKVRSIQVSQNTLLAAFQKVSGKEWTIERSTAKDVLDEGRRKHSQGLGGWILDLLVFQLYSPGEKRCIVASLDDSDNKLLGVREESAEEVVRKALGMTTMDS

SEQ ID NO: 10971 - DNA, 2333 bp, Muscodor strobelii
  misc_feature: SGI EST ID NO. CUFF.25965.0
  misc_feature: Variant of the nucleotide sequence at SEQ ID NO 10969
cttatatcctaagttttcaatttcctgtccgcattcattcattgatatcattatgtcttctatcaagagagtcgctatcctcggtgtaggtccgctctatttcatgacctcttgacacctctttagtttcaaccccgcctgagctgcacctcaatctcatccgcactataccttcatacctactcacgcacactcctaggcctcgggcaacttcggcgctccaacaacagacgcgctcatcagcgctggcttcgacgtaactgtcataacgcgaccggactctacaagcgccttccaggggaaggtgcctgtagttcgcgtcgactatgctgatttcgaggctttgacgactgccctgctgggtcaggacgcggtcgtgaatatgcttggtccggggccatattccgcacggcaagggcactgtggtcgctgcgtattgtgctggcgtgaagaggtttattagtgagtaggatctggcgtttggggctttgggtttgtattctgcatgtatcacgcgttgtacttctccatgtgtcacgaatcatgtattatgtcatgtgccatgtcttgtatctggaccgagaatagcagatggtgggattgaaagtggcatgtatctagcggcaactaacgcggaggaatcgacagtcaatgacttcggttggggcttgaacgataaagccctgccggagttcaaacctattggcgagatgcgcagggttgcttgggatgctgcgaaggagcatgcaaagagtgacgaagggaaggatgatgggttcagttggacaggtattacgattgggaatccgattgattgggctctgcggaaattcccaagaatggggttcaatgtcaatactcagacagcaacgatctttgatgacggaacagaggaattcacgggcacgacacttgaaggcattgctgagtccgttgttggcgttctttccaagcccactgagacgaagaatcgatttgttaaggtacggtcgatccaagtttcgcagaacacgttgcttgctgcgtttcagaaggtttcgggcaaggaatggacaattgagcgatcgacggcaaaggatgtgcttgacgaaggacgcagaaagcattcgcaaggattgggaggctggattttggatttgcttgtctttcagctgtacagtccgggcgagaagaggtgcattgttgcgagtcttgatgactcggataataagcttctgggtgtacgagaggagagtgctgaggaggttgtcaggaaagctttggggatgactactatggattcctagggaagggttattgatcgggctacatggtgttcaaccgtatgatactcttgaggattcgacttgaggatttacaacgcattcgattgatctccactgcatcccatccttttctctactagatattgcagacgagtcattggtcgtatcactcattctcgctgtgactatttacacatgtgaatgtaccacaatacagccatgatgaaaatgtctttaaaaagttatcttgccattgtctcgttatcatgatcgtcatcgttatctataatatcttcatggtcgtcatcaatcggtaatgcatatggatcccttggtctaagtagtgcaaagcacggtaggctaccacatgatgtcgtatctaatatttcctcttcgttctcaactgtatatccatctacatcgtgccgtcttcagtaaagggatcgttgatggtcactgctgcaaagttggacgggaaacaaatggtgctttcaaaatgtttgctgctttgaagcccgccttcttgaatttttgttgggatatcgtgaggccgatgaagaagattaagatcgagagaggcactgatgttgcgaagtagacaacgaatgtcccgccgctgatctggcccacgtcgggttgcatcgatagaacgccagcaatcagactgaacggaatgaagaatgtggcgagccaggtgagtctaccaatattgtgattgtcttgcaaagtcagccgagagtcttcgatcgtcatggccgccgttacgacaggtgtcaggcggtcgatgcgctgttgatgttcgtcgagtcgagcttggataagttcaaagtctgttttatattcgctgatggagttgaatcgcgtttgatccgaaaattgcgtgattgacgacatcccagtcaatgacctcgaatagttcggcgtcacaggacttggactttgattgcggctgatcgaggcttggaactcgcgatatggaaatgcgtgaacatgctgaattgtttcggttaccatctcgcggtaaagtggtatgaagcgccgccacatgtgtagtttctgcaaagcatc

SEQ ID NO: 10972 - DNA, 1848 bp, Muscodor strobelii
  misc_feature: SGI cDNA ID NO. 563505
  misc_feature: Elevated expression when VOC is produced
  misc_feature: Encodes the peptide sequence at SEQ ID NO 10973
atgtggtggaaccgacctgacctacaacacagtagtaagtatgaagattttggcgatgcgtacaacgacaagctgtacgaagagctagccaataaatgggctatagataccacagaccgaccgtacctagcatggatcaaaaacgacttggcagaaaatgggtggcatcatctcaggctactcgccgacttcatgtccgtcggaacagtaccacagcgatggaaacagatggaccccaaatcaaatgatccattgagagtacaagtagattctcaaaaaatgaccgatcggaacaaacgcttgaagaaaacaaaagtctcagtcttagactactacgagaccagagttgaacgacataagaccgttgaaaccccacaacatctaaaagaagagttagatagagatacgagcgatggcgttcaatttcgactctttgtagtcgaagatctgtcaagtgatgtaattgaggctttggggcagaagctcaagatcgagccagacgtattcagggcgcatattgccgatttcgcatggtacaatgtactcgatcgttggcgggatccgcctgttctcgacgttgtcagcaggtctcagaattggatgcagttgcgatatgtgacaattcggtacttcgaaaagccagaagacttcaaggaagctgttctcgaatcgatgaagtttaatattctaaggagaccggatgacgatcaaagcaacaaggcgtggtgggatcgcccggaggcgatcgtgggcttgacaaggtctagagcaacgttctggttacaacctgaagacttccaatcgaagtcaaaaactcgtataggcgttcttttactcgatccaacagtgacgacaggatctccattatggcgtgggcgaagagctccctggccgacacctgaatatccaaacaaatataccgaagaacctcctaaggaaggcagtttcttcgaagacttcatgttttgggcgcaacagcaagaagtattccataaacatacggggaatcccccatcaagagcccacgttccaatgcaggtgcttctgcatctcatctcatcagagtggctccaaatgtcggactacatcaagaccagattgaatcagctagattgggagctcgtaaagccagatgtcttcagacaagggaaacgccctgatggtacgtatagaaagaccccacgcgagttatttttgattgtattcctcagacatagtactgacttctttatagatgctttgcagaaactacacatgtggcggcgcttcataccactttaccgcgagatggtaaccgaaacaattcagcatgttcacgcatttccatatcgcgagttccaagcctcgatcagccgcaatcaaagtccaagtcctgtgacgccgaactattcgaggtcattgactgggatgtcgtcaatcacgcaattttcggatcaaacgcgattcaactccatcagcgaatataaaacagactttgaacttatccaagctcgactcgacgaacatcaacagcgcatcgaccgcctgacacctgtcgtaacggcggccatgacgatcgaagactctcggctgactttgcaagacaatcacaatattggtagactcacctggctcgccacattcttcattccgttcagtctgattgctggcgttctatcgatgcaacccgacgtgggccagatcagcggcgggacattcgttgtctacttcgcaacatcagtgcctctctcgatcttaatcttcttcatcggcctcacgatatcccaacaaaaattcaagaaggcgggcttcaaagcagcaaacattttgaaagcaccatttgtttcccgtccaactttgcagcagtga

SEQ ID NO: 10973 - protein, 615 aa, Muscodor strobelii
  misc_feature: SGI Peptide ID NO. 563505
  misc_feature (7)..(584): NCBI GI: 189205477 Blast Desc: conserved [Pyrenophora tritici-repentis Pt-1C-BFP] gi|187975166|gb|EDU41792.1| conserved [Pyrenophora tritici-repentis Pt-1C-BFP]
  misc_feature (106)..(592): NCBI GI: 169601992 Blast Desc: SNOG_03873 [Phaeosphaeria nodorum SN15] gi|160706053|gb|EAT89078.2| SNOG_03873 [Phaeosphaeria nodorum SN15]
  misc_feature (8)..(583): NCBI GI: 261358958 Blast Desc: conserved [Verticillium albo-atrum VaMs.102]
  misc_feature (8)..(579): NCBI GI: 212543973 Blast Desc: conserved [Penicillium marneffei ATCC 18224] gi|210067048|gb|EEA21141.1| conserved [Penicillium marneffei ATCC 18224]
  misc_feature (143)..(579): NCBI GI: 242788204 Blast Desc: conserved [Talaromyces stipitatus ATCC 10500] gi|218721318|gb|EED20737.1| conserved [Talaromyces stipitatus ATCC 10500]
  misc_feature (37)..(193): NCBI GI: 261359092 Blast Desc: [Verticillium albo-atrum VaMs.102]
  misc_feature (489)..(584): NCBI GI: 256725035 Blast Desc: NECHADRAFT_26045 [Nectria haematococca mpVI 77-13-4]
  misc_feature (114)..(579): NCBI GI: 189203797 Blast Desc: conserved [Pyrenophora tritici-repentis Pt-1C-BFP] gi|187985333|gb|EDU50821.1| conserved [Pyrenophora tritici-repentis Pt-1C-BFP]
  misc_feature (499)..(561): NCBI GI: 261359091 Blast Desc: conserved [Verticillium albo-atrum VaMs.102]
  misc_feature (491)..(561): NCBI GI: 169614692 Blast Desc: SNOG_10493 [Phaeosphaeria nodorum SN15] gi|111060767|gb|EAT81887.1| SNOG_10493 [Phaeosphaeria nodorum SN15]
  misc_feature: Useful for introducing or modulating the production of volatile compounds
MWWNRPDLQHSSKYEDFGDAYNDKLYEELANKWAIDTTDRPYLAWIKNDLAENGWHHLRLLADFMSVGTVPQRWKQMDPKSNDPLRVQVDSQKMTDRNKRLKKTKVSVLDYYETRVERHKTVETPQHLKEELDRDTSDGVQFRLFVVEDLSSDVIEALGQKLKIEPDVFRAHIADFAWYNVLDRWRDPPVLDVVSRSQNWMQLRYVTIRYFEKPEDFKEAVLESMKFNILRRPDDDQSNKAWWDRPEAIVGLTRSRATFWLQPEDFQSKSKTRIGVLLLDPTVTTGSPLWRGRRAPWPTPEYPNKYTEEPPKEGSFFEDFMFWAQQQEVFHKHTGNPPSRAHVPMQVLLHLISSEWLQMSDYIKTRLNQLDWELVKPDVFRQGKRPDGTYRKTPRELFLIVFLRHSTDFFIDALQKLHMWRRFIPLYREMVTETIQHVHAFPYREFQASISRNQSPSPVTPNYSRSLTGMSSITQFSDQTRFNSISEYKTDFELIQARLDEHQQRIDRLTPVVTAAMTIEDSRLTLQDNHNIGRLTWLATFFIPFSLIAGVLSMQPDVGQISGGTFVVYFATSVPLSILIFFIGLTISQQKFKKAGFKAANILKAPFVSRPTLQQ

SEQ ID NO: 10974 - DNA, 1256 bp, Muscodor strobelii
  misc_feature: SGI EST ID NO. CUFF.25969.0
  misc_feature: Variant of the nucleotide sequence at SEQ ID NO 10972
atgtgaaccgtccacaggttcatgatagcgccgagtgaaagttagatacaaaaagtacctattgtctggcgcaatgtggtggaaccgacctgacctacaacacagtagtaagtatgaagattttggcgatgcgtacaacgacaagctgtacgaagagctagccaataaatgggctatagataccacagaccgaccgtacctagcatggatcaaaaacgacttggcagaaaatgggtggcatcatctcaggctactcgccgacttcatgtccgtcggaacagtaccacagcgatggaaacagatggaccccaaatcaaatgatccattgagagtacaagtagattctcaaaaaatgaccgatcggaacaaacgcttgaagaaaacaaaagtctcagtcttagactactacgagaccagagttgaacgacataagaccgttgaaaccccacaacatctaaaagaagagttagatagagatacgagcgatggcgttcaatttcgactctttgtagtcgaagatctgtcaagtgatgtaattgaggctttggggcagaagctcaagatcgagccagacgtattcagggcgcatattgccgatttcgcatggtacaatgtactcgatcgttggcgggatccgcctgttctcgacgttgtcagcaggtctcagaattggatgcagttgcgatatgtgacaattcggtacttcgaaaagccagaagacttcaaggaagctgttctcgaatcgatgaagtttaatattctaaggagaccggatgacgatcaaagcaacaaggcgtggtgggatcgcccggaggcgatcgtgggcttgacaaggtctagagcaacgttctggttacaacctgaagacttccaatcgaagtcaaaaactcgtataggcgttcttttactcgatccaacagtgacgacaggatctccattatggcgtgggcgaagagctccctggccgacacctgaatatccaaacaaatataccgaagaacctcctaaggaaggcagtttcttcgaagacttcatgttttgggcgcaacagcaagaagtattccataaacatacggggaatcccccatcaagagcccacgttccaatgcaggtgcttctgcatctcatctcatcagagtggctccaaatgtcggactacatcaagaccagattgaatcagctagattgggagctcgtaaagccagatgtcttcagacaagggaaacgccctgatggtacgtatagaaagaccccac

SEQ ID NO: 10975 - DNA, 1314 bp, Muscodor strobelii
  misc_feature: SGI cDNA ID NO. 563506
  misc_feature: Encodes the peptide sequence at SEQ ID NO 10976
atgagagaagaacaccgcttcagagtcgtcatcgcgggtggtggcatcgttggcctggcactggcgaatgctttggaacaggctggtgtcgactttgtcttactcgagaagagaaatattgcaccagatctaggggcatcgatcggtctgctctgccacaatgctatgatatatgagcaactcggagtgatcgataagttcaacgctgcgacggtgccacttcttgaaagacttcacttcactgaaagtggctaccaattcgaagatggcgacgtattgaaaggtgtaggcagcaagacaaatcgtccttttcgcttcatggcaaggcgattttaccttcagactctatacgacaatctccgtgacaagtttaaggttcacagtatgattggggtgcagtcattcgtcgaacacgatcatggtctcactgtcactgcagataatggagagagatacgaaggtagcatcctagttggtgccgatggagtgaacagtgcagtcagacagcaaatggcacaagccgcagctgcaagcggtgatacagagagggctagagacctcatgagcccattcgccgtaaggtatagatcaatatatgctacatcaaagaacatcaatcgggatacaggcgaacccttcatgccaaatgggacagtccacgtcctataccatcgaggggtttcgggtgctgccgcgacaggcgttgatggactggtgttttggtttttgttcgttaaaaacatcgaagtcacgcacgttccaaactgccccacctactcagaacaagatctggaagcaacgattgaggagtttggccaccttgaacatggtcgaggatatagctttcgagatttgtggaacagcaaaatcaaagcctccatgtttcctatggaggaaggaaacgtgaagggctcgtggagtaatgggggcagggttgtacttttaggagattcggtgtcaaaggctacaatcaaccctggactagggggcaacactcatgtcgaaggtgtttgccacctcgtgaatgcaatagtcgagctcctggcgacttccacggtgccttctactggagaaatcactgaaatgttccgaaaatacgagaaacagcaccgacaacgtgccgagctcacagtgacgatgtccgggttccttacacgatatgaagcaatggaaacgtggtggacaagactgctcatgcacgtgatgaggcgacttcctaataatttgatgtcaacacttcttgctaggcatttcgctacagggccgctcttaagcttcctgcccgcacctgattcacgaaccccgaagaaatga

SEQ ID NO: 10976 - protein, 437 aa, Muscodor strobelii
  misc_feature: SGI Peptide ID NO. 563506
  misc_feature (6)..(381): Pfam Id: PF01494 Pfam Desc: FAD binding domain
  misc_feature (8)..(41): Pfam Id: PF01266 Pfam Desc: FAD dependent oxidoreductase
  misc_feature (6)..(39): Pfam Id: PF01494 Pfam Desc: FAD binding domain
  misc_feature (1)..(382): NCBI GI: 154324026 Blast Desc: BC1G_00412 [Botryotinia fuckeliana B05.10] gi|150842641|gb|EDN17834.1| BC1G_00412 [Botryotinia fuckeliana B05.10]
  misc_feature (1)..(435): NCBI GI: 49409615 Blast Desc: monooxygenase [Aspergillus flavus]
  misc_feature (1)..(393): NCBI GI: 121710708 Blast Desc: FAD binding domain protein [Aspergillus clavatus NRRL 1] gi|119401120|gb|EAW11544.1| FAD binding domain protein [Aspergillus clavatus NRRL 1]
  misc_feature (3)..(431): NCBI GI: 115398974 Blast Desc: ATEG_05898 [Aspergillus terreus NIH2624] gi|114191959|gb|EAU33659.1| ATEG_05898 [Aspergillus terreus NIH2624]
  misc_feature (7)..(428): NCBI GI: 119483958 Blast Desc: FAD binding domain protein [Neosartorya fischeri NRRL 181] gi|119410038|gb|EAW19985.1| FAD binding domain protein [Neosartorya fischeri NRRL 181]
  misc_feature (5)..(433): NCBI GI: 169779541 Blast Desc: [Aspergillus oryzae RIB40] gi|83772974|dbj|BAE63102.1| protein product [Aspergillus oryzae]
  misc_feature (1)..(430): NCBI GI: 212545611 Blast Desc: FAD-dependent monooxygenase, [Penicillium marneffei ATCC 18224] gi|210064479|gb|EEA18574.1| FAD-dependent monooxygenase, [Penicillium marneffei ATCC 18224]
  misc_feature (3)..(430): NCBI GI: 13021723 Blast Desc: AF279808_5 monooxygenase [Penicillium paxilli]
  misc_feature (4)..(391): NCBI GI: 238492247 Blast Desc: FAD-dependent monooxygenase, [Aspergillus flavus NRRL3357] gi|220695854|gb|EED52196.1| FAD-dependent monooxygenase, [Aspergillus flavus NRRL3357]
  misc_feature (4)..(391): NCBI GI: 169782614 Blast Desc: [Aspergillus oryzae RIB40] gi|83774513|dbj|BAE64636.1| protein product [Aspergillus oryzae]
MREEHRFRVVIAGGGIVGLALANALEQAGVDFVLLEKRNIAPDLGASIGLLCHNAMIYEQLGVIDKFNAATVPLLERLHFTESGYQFEDGDVLKGVGSKTNRPFRFMARRFYLQTLYDNLRDKFKVHSMIGVQSFVEHDHGLTVTADNGERYEGSILVGADGVNSAVRQQMAQAAAASGDTERARDLMSPFAVRYRSIYATSKNINRDTGEPFMPNGTVHVLYHRGVSGAAATGVDGLVFWFLFVKNIEVTHVPNCPTYSEQDLEATIEEFGHLEHGRGYSFRDLWNSKIKASMFPMEEGNVKGSWSNGGRVVLLGDSVSKATINPGLGGNTHVEGVCHLVNAIVELLATSTVPSTGEITEMFRKYEKQHRQRAELTVTMSGFLTRYEAMETWWTRLLMHVMRRLPNNLMSTLLARHFATGPLLSFLPAPDSRTPKK

SEQ ID NO: 10977 - DNA, 1601 bp, Muscodor strobelii
  misc_feature: SGI EST ID NO. CUFF.25932.0
  misc_feature: Variant of the nucleotide sequence at SEQ ID NO 10975
gcacaaccaaatgtcagcaacattccacattgatagcttacgaaatttctttctcgaaatattcatatctgaatctagtaaatcttggccatgagagaagaacaccgcttcagagtcgtcatcgcgggtggtggcatcgttggcctggcactggcgaatgctttggaacaggctggtgtcgactttgtcttactcgagaagagaaatattgcaccagatctaggggcatcgatcggtctgctctgccacaatgctatgatatatgagcaactcggagtgatcgataagttcaacgctgcgacggtgccacttcttgaaagacttcacttcactgaaagtggctaccaattcgaagatggcgacgtattgaaaggtgtaggcagcaagacaaatcgtccttttcgcttcatggcaaggcgattttaccttcagactctatacgacaatctccgtgacaagtttaaggttcacagtatgattggggtgcagtcattcgtcgaacacgatcatggtctcactgtcactgcagataatggagagagatacgaaggtagcatcctagttggtgccgatggagtgaacagtgcagtcagacagcaaatggcacaagccgcagctgcaagcggtgatacagagagggctagagacctcatgagcccattcgccgtaaggtatagatcaatatatgctacatcaaagaacatcaatcgggatacaggcgaacccttcatgccaaatgggacagtccacgtcctataccatcgaggggtttcgggtgctgccgcgacaggcgttgatggactggtgttttggtttttgttcgttaaaaacatcgaagtcacgcacgttccaaactgccccacctactcagaacaagatctggaagcaacgattgaggagtttggccaccttgaacatggtcgaggatatagctttcgagatttgtggaacagcaaaatcaaagcctccatgtttcctatggaggaaggaaacgtgaagggctcgtggagtaatgggggcagggttgtacttttaggagattcggtgtcaaaggctacaatcaaccctggactagggggcaacactcatgtcgaaggtgtttgccacctcgtgaatgcaatagtcgagctcctggcgacttccacggtgccttctactggagaaatcactgaaatgttccgaaaatacgagaaacagcaccgacaacgtgccgagctcacagtgacgatgtccgggttccttacacgatatgaagcaatggaaacgtggtggacaagactgctcatgcacgtgatgaggcgacttcctaataatttgatgtcaacacttcttgctaggcatttcgctacagggccgctcttaagcttcctgcccgcacctgattcacgaaccccgaagaaatgaatcgattcacccgcaggaaatggcgtgggttcaatgactctacgcagcgaaaccaggacgagaacttgggtctccttcatcgagcagtatgataatagaagctagaatcaatacgctctgactctcagggtagcaggcagtatgaatagccgctattgtgaaattagatttcctctttttttctcgttcgaccaccc

SEQ ID NO: 10978 - DNA, 1734 bp, Muscodor strobelii
  misc_feature: SGI cDNA ID NO. 563508
  misc_feature: Encodes the peptide sequence at SEQ ID NO 10979
atgcaagactacttgatatttggcctatgtgccgtcataatagtcaccattcttattcggaagctatacactactccctttccgggcattccatacaatctggaatcggccaaaagaatcacgggtgatatcccgaatatgctacccatcatgaaggctaccagcgagcgttctgtagcggtcttcgcagcatcgacccagaagctagcaacacctattgcccagttatttcttcctggcgaggctctcatcgtactggatgatccgcaagaggtcgaagatatcgtattgaatcgaaataaggagtttgacaaagggcctcgtgcaactagcgttatggcgccgatgttcccgaacggaactataggccaaagaacgactcctaggctcaaaatacaaaagcgattatgggctgatattatgagttccgaatttttactcaaagccgccggacctaacattcataatgctttttgtgaactcgtggatctctggcgattgaaagtatcaagctcacaggatactctgatgagagttcacgacgactttcaaaatgctgctttggatgccatatgggttgctgtagtgggcgagaaccccggattcatcagacacgagataaaaaagttgaaggcccaacaatctgacggcaaacattgtcagcttcagcctcctacaggattattcttgaaggatgaattggactatatcactcaggccatcatgagaaatgcggctgcggcattcccaaagtgggcctcgaaattcgaaacatacactcctcgataccggaagtcacgaaagaggatcacgacggaagtcgagcaagctatgcgtcggtcaataaagaggacacacgatactaagcacgacacatgtttgatagatctcgtacttcgacgtcaggctcaacaaatgaacaaggattgtgtaaagccgccagcagagccatggaaagacaagaatattcttgatgaaacgtttgtcatattagttggagttcgtatagttcttcaggcattaaaatatcgcactttactgacaatgggacttcagggccacgataccacggcaaatgcccttacatggttcgtgaggtacatggacatgttcccatctgctcaaacagagcttcgaaaagctcttaaagcagcgtttcccgtcaatcaattgccgtcattagacgatattctgaatgccagtatcccgtacctcgatgctgccttggaggaggtcgtacgcctagcagggatcgccaaagggagtgtccgggaggctcttgtagatacggagattctaggatataagataccgaagggcgcagagatatacatgagctatcatatcgatagagcacctgctcctatagactcatgcaagcgcagtaagagtagccaagcgacaattgaaaaatacggagatgtgttccagggctatgctgcccgagacctgcatatctttgagccgaagaggtggcttgtcaaagatgagcaaagtaatcgagacatctttaatcctcatgcattgccatccctcgcattcagcggaggatatagaggatgtgcgggacgaaagatggcatacatggagcttcgcattgccgtgacactgctcatcttgaactttgagtttatggagctgccgaaagagttccagaccctgtccgcaatcgagagattagttcgacaacccagtaaaccttatgctaagatcagagaggtacaagttcagtag

SEQ ID NO: 10979 - protein, 577 aa, Muscodor strobelii
  misc_feature: SGI Peptide ID NO. 563508
  misc_feature (40)..(571): Pfam Id: PF00067 Pfam Desc: Cytochrome P450
  misc_feature (353)..(446): Pfam Id: PF00067 Pfam Desc: Cytochrome P450
  misc_feature (487)..(571): Pfam Id: PF00067 Pfam Desc: Cytochrome P450
  misc_feature (6)..(572): NCBI GI: 171683027 Blast Desc: protein product [Podospora anserina] gi|170941473|emb|CAP67124.1| protein product [Podospora anserina]
  misc_feature (17)..(502): NCBI GI: 116201423 Blast Desc: CHGG_08596 [Chaetomium globosum CBS 148.51] gi|88177114|gb|EAQ84582.1| CHGG_08596 [Chaetomium globosum CBS 148.51]
  misc_feature (9)..(571): NCBI GI: 145606867 Blast Desc: MGG_03811 [Magnaporthe grisea 70-15] gi|145014497|gb|EDJ99065.1| MGG_03811 [Magnaporthe grisea 70-15]
  misc_feature (8)..(571): NCBI GI: 121711960 Blast Desc: Cytochrome P450 oxidoreductase, [Aspergillus clavatus NRRL 1] gi|119401747|gb|EAW12169.1| Cytochrome P450 oxidoreductase, [Aspergillus clavatus NRRL 1]
  misc_feature (17)..(573): NCBI GI: 169610165 Blast Desc: SNOG_08178 [Phaeosphaeria nodorum SN15] gi|111063334|gb|EAT84454.1| SNOG_08178 [Phaeosphaeria nodorum SN15]
  misc_feature (25)..(575): NCBI GI: 115390260 Blast Desc: [Aspergillus terreus NIH2624] gi|114195031|gb|EAU36731.1| [Aspergillus terreus NIH2624]
  misc_feature (2)..(570): NCBI GI: 91771577 Blast Desc: cytochrome P450 monooxygenase [Hypocrea virens]
  misc_feature (4)..(576): NCBI GI: 18026282 Blast Desc: cytochrome P450 [Gibberella zeae]
  misc_feature (4)..(576): NCBI GI: 18026284 Blast Desc: cytochrome P450 [Gibberella zeae]
  misc_feature (9)..(575): NCBI GI: 189191520 Blast Desc: cytochrome P450 monooxygenase [Pyrenophora tritici-repentis Pt-1C-BFP] gi|187973705|gb|EDU41204.1| cytochrome P450 monooxygenase [Pyrenophora tritici-repentis
MQDYLIFGLCAVIIVTILIRKLYTTPFPGIPYNLESAKRITGDIPNMLPIMKATSERSVAVFAASTQKLATPIAQLFLPGEALIVLDDPQEVEDIVLNRNKEFDKGPRATSVMAPMFPNGTIGQRTTPRLKIQKRLWADIMSSEFLLKAAGPNIHNAFCELVDLWRLKVSSSQDTLMRVHDDFQNAALDAIWVAVVGENPGFIRHEIKKLKAQQSDGKHCQLQPPTGLFLKDELDYITQAIMRNAAAAFPKWASKFETYTPRYRKSRKRITTEVEQAMRRSIKRTHDTKHDTCLIDLVLRRQAQQMNKDCVKPPAEPWKDKNILDETFVILVGVRIVLQALKYRTLLTMGLQGHDTTANALTWFVRYMDMFPSAQTELRKALKAAFPVNQLPSLDDILNASIPYLDAALEEVVRLAGIAKGSVREALVDTEILGYKIPKGAEIYMSYHIDRAPAPIDSCKRSKSSQATIEKYGDVFQGYAARDLHIFEPKRWLVKDEQSNRDIFNPHALPSLAFSGGYRGCAGRKMAYMELRIAVTLLILNFEFMELPKEFQTLSAIERLVRQPSKPYAKIREVQVQ

SEQ ID NO: 10980 - DNA, 847 bp, Muscodor strobelii
  misc_feature: SGI EST ID NO. CUFF.25944.0
  misc_feature: Variant of the nucleotide sequence at SEQ ID NO 10978
gccaaagggagtgtccgggaggctcttgtagatacggagattctaggatataagataccgaagggcgcagagatatacatgagctatcatatcgatagagcacctgctcctatagactcatgcaagcgcagtaagagtagccaagcgacaattgaaaaatacggagatgtgttccagggctatgctgcccgagacctgcatatctttgagccgaagaggtggcttgtcaaagatgagcaaagtaatcgagacatctttaatcctcatgcattgccatccctcgcattcagcggaggatatagaggatgtgcgggacgaaagatggcatacatggagcttcgcattgccgtgacactgctcatcttgaactttgagtttatggagctgccgaaagagttccagaccctgtccgcaatcgagagattagttcgacaacccagtaaaccttatgctaagatcagagaggtacaagttcagtagcgtctatagagcactgtcaaaacatccttgggagtggatggtacagcagagctttaggttcactataatatcaaataagcaagccgcattccgttgtatattacgcgatctaccactgttgctgcgacggctggaagcagttcacaatacgctctcggggggcatggtcgaatcgaggcccgggccaagtcattcctttgccagcactcacacaatgtgcaaatttttagatagatgttatttcaaatggaggttactcgattaactgctcggtgtctctgatacggagttcaatgtcgtccaggctcctacaaggcgattaaaactggcatcaacatgactcaaattcaagagcgggaaacgaaac

SEQ ID NO: 10981 - DNA, 1527 bp, Muscodor strobelii
  misc_feature: SGI cDNA ID NO. 563509
  misc_feature: Encodes the peptide sequence at SEQ ID NO 10982
atgaaggctaccagcgagcgttctgtagcggtcttcgcagcatcgacccagaagctagcaacacctattgcccagttatttcttcctggcgaggctctcatcgtactggatgatccgcaagaggtcgaagatatcgtattgaatcgaaataaggagtttgacaaagggcctcgtgcaactagcgttatggcgccgatgttcccgaacggaactataggccaaagaacgactcctaggctcaaaatacaaaagcgattatgggctgatattatgagttccgaatttttactcaaagccgccggacctaacattcataatgctttttgtgaactcgtggatctctggcgattgaaagtatcaagctcacaggatactctgatgagagttcacgacgactttcaaaatgctgctttggatgccatatgggttgctgtagtgggcgagaaccccggattcatcagacacgagataaaaaagttgaaggcccaacaatctgacggcaaacattgtcagcttcagcctcctacaggattattcttgaaggatgaattggactatatcactcaggccatcatgagaaatgcggctgcggcattcccaaagtgggcctcgaaattcgaaacatacactcctcgataccggaagtcacgaaagaggatcacgacggaagtcgagcaagctatgcgtcggtcaataaagaggacacacgatactaagcacgacacatgtttgatagatctcgtacttcgacgtcaggctcaacaaatgaacaaggattgtgtaaagccgccagcagagccatggaaagacaagaatattcttgatgaaacgtttgtcatattagttggaggccacgataccacggcaaatgcccttacatggttcgtgaggtacatggacatgttcccatctgctcaaacagagcttcgaaaagctcttaaagcagcgtttcccgtcaatcaattgccgtcattagacgatattctgaatgccagtatcccgtacctcgatgctgccttggaggaggtcgtacgcctagcagggatcgccaaagggagtgtccgggaggctcttgtagatacggagattctaggatataagataccgaagggcgcagagatatacatgagctatcatatcgatagagcacctgctcctatagactcatgcaagcgcagtaagagtagccaagcgacaattgaaaaatacggagatgtgttccagggctatgctgcccgagacctgcatatctttgagccgaagaggtggcttgtcaaagatgagcaaagtaatcgagacatctttaatcctcatgcattgccatccctcgcattcagcggaggatatagaggatgtgcgggacgaaagatggcatacatggagcttcgcattgccgtgacactgctcatcttgaactttgagtttatggagctgccgaaagagttccagaccctgtccgcaatcgagagattagttcgacaacccagtaaaccttatgctaagatcagagaggtacaagttcagtag

SEQ ID NO: 10982 - protein, 508 aa, Muscodor strobelii
  misc_feature: SGI Peptide ID NO. 563509
  misc_feature (1)..(502): Pfam Id: PF00067 Pfam Desc: Cytochrome P450
  misc_feature (270)..(377): Pfam Id: PF00067 Pfam Desc: Cytochrome P450
  misc_feature (418)..(502): Pfam Id: PF00067 Pfam Desc: Cytochrome P450
  misc_feature (1)..(503): NCBI GI: 171683027 Blast Desc: protein product [Podospora anserina] gi|170941473|emb|CAP67124.1| protein product [Podospora anserina]
  misc_feature (1)..(433): NCBI GI: 116201423 Blast Desc: CHGG_08596 [Chaetomium globosum CBS 148.51] gi|88177114|gb|EAQ84582.1| CHGG_08596 [Chaetomium globosum CBS 148.51]
  misc_feature (22)..(502): NCBI GI: 145606867 Blast Desc: MGG_03811 [Magnaporthe grisea 70-15] gi|145014497|gb|EDJ99065.1| MGG_03811 [Magnaporthe grisea 70-15]
  misc_feature (16)..(502): NCBI GI: 121711960 Blast Desc: Cytochrome P450 oxidoreductase, [Aspergillus clavatus NRRL 1] gi|119401747|gb|EAW12169.1| Cytochrome P450 oxidoreductase, [Aspergillus clavatus NRRL 1]
  misc_feature (16)..(506): NCBI GI: 115390260 Blast Desc: [Aspergillus terreus NIH2624] gi|114195031|gb|EAU36731.1| [Aspergillus terreus NIH2624]
  misc_feature (12)..(504): NCBI GI: 169610165 Blast Desc: SNOG_08178 [Phaeosphaeria nodorum SN15] gi|111063334|gb|EAT84454.1| SNOG_08178 [Phaeosphaeria nodorum SN15]
  misc_feature (18)..(501): NCBI GI: 91771577 Blast Desc: cytochrome P450 monooxygenase [Hypocrea virens]
  misc_feature (17)..(508): NCBI GI: 269856267 Blast Desc: cytochrome P450 monooxygenase [Fusarium sp. NRRL 13405]
  misc_feature (21)..(507): NCBI GI: 18026282 Blast Desc: cytochrome P450 [Gibberella zeae]
  misc_feature (21)..(507): NCBI GI: 18026284 Blast Desc: cytochrome P450 [Gibberella zeae]
MKATSERSVAVFAASTQKLATPIAQLFLPGEALIVLDDPQEVEDIVLNRNKEFDKGPRATSVMAPMFPNGTIGQRTTPRLKIQKRLWADIMSSEFLLKAAGPNIHNAFCELVDLWRLKVSSSQDTLMRVHDDFQNAALDAIWVAVVGENPGFIRHEIKKLKAQQSDGKHCQLQPPTGLFLKDELDYITQAIMRNAAAAFPKWASKFETYTPRYRKSRKRITTEVEQAMRRSIKRTHDTKHDTCLIDLVLRRQAQQMNKDCVKPPAEPWKDKNILDETFVILVGGHDTTANALTWFVRYMDMFPSAQTELRKALKAAFPVNQLPSLDDILNASIPYLDAALEEVVRLAGIAKGSVREALVDTEILGYKIPKGAEIYMSYHIDRAPAPIDSCKRSKSSQATIEKYGDVFQGYAARDLHIFEPKRWLVKDEQSNRDIFNPHALPSLAFSGGYRGCAGRKMAYMELRIAVTLLILNFEFMELPKEFQTLSAIERLVRQPSKPYAKIREVQVQ

SEQ ID NO: 10983 - DNA, 1179 bp, Muscodor strobelii
  misc_feature: SGI EST ID NO. CUFF.25947.0
  misc_feature: Variant of the nucleotide sequence at SEQ ID NO 10981
actattacttctcttccgcgatttatgctgagaaatgcaagactacttgatatttggcctatgtgccgtcataatagtcaccattcttattcggaagctatacactactccctttccgggcattccatacaatctggaatcggccaaaagaatcacgggtgatatcccgaatatgctacccatcatgaaggctaccagcgagcgttctgtagcggtcttcgcagcatcgacccagaagctagcaacacctattgcccagttatttcttcctggcgaggctctcatcgtactggatgatccgcaagaggtcgaagatatcgtattgaatcgaaataaggagtttgacaaagggcctcgtgcaactagcgttatggcgccgatgttcccgaacggaactataggccaaagaacgactcctaggctcaaaatacaaaagcgattatgggctgatattatgagttccgaatttttactcaaagccgccggacctaacattcataatgctttttgtgaactcgtggatctctggcgattgaaagtatcaagctcacaggatactctgatgagagttcacgacgactttcaaaatgctgctttggatgccatatgggttgctgtagtgggcgagaaccccggattcatcagacacgagataaaaaagttgaaggcccaacaatctgacggcaaacattgtcagcttcagcctcctacaggattattcttgaaggatgaattggactatatcactcaggccatcatgagaaatgcggctgcggcattcccaaagtgggcctcgaaattcgaaacatacactcctcgataccggaagtcacgaaagaggatcacgacggaagtcgagcaagctatgcgtcggtcaataaagaggacacacgatactaagcacgacacatgtttgatagatctcgtacttcgacgtcaggctcaacaaatgaacaaggattgtgtaaagccgccagcagagccatggaaagacaagaatattcttgatgaaacgtttgtcatattagttggaggccacgataccacggcaaatgcccttacatggttcgtgaggtacatggacatgttcccatctgctcaaacagagcttcgaaaagctcttaaagcagcgtttcccgtcaatcaattgccgtcattagacgatattctgaatgccag

SEQ ID NO: 10984 - DNA, 2928 bp, Muscodor strobelii
  misc_feature: SGI cDNA ID NO. 563510
  misc_feature: Elevated expression when VOC is produced
  misc_feature: Encodes the peptide sequence at SEQ ID NO 10985
atggcgtcactttcaggtgcttcagcaccagacactctttgcaatggcgccacagcaaaagcatcaagttccgtagagactattcaagatgatgcaattgactacgagcaaacgggatctgaggtattgcaggctgcaattcaagacgacgacgatggcgaaggcgagtcatatcatcacgtgaagagactggcatctgaggctcagtgggccgagggccagaagctcctagataaagagaaagaagcgggcattctctcaagacgctccaggcaagctattatccataccagtttcacagaattgaggattgagtcactcgaaagggagcttcaaaaaatgagggtcgacgtttacaatctaccaaagaaactcgaagtcaaagaaccagaggagaagtttccaacataccagcgtgtgctccgtcgttcagagcccgccgcttttaaaatcaaccgcatttctttcaagatccctatcagggaccgtccagtattggagacacaagcgatcaaagacgcccaggtatctgacaatcagcctgagcctggtcgccttcaccggcgaccaacaggactaggagaccggtcggagaattttcatgtcccagagagactgcgaattcgatcacgaccattgatccggcatattctcaacgtaactggaaccccatcgctatacgacctgggacctccaggagatgaagatgaacattcaagcatagtacttctcaaccctttcaagatactcgttaccttcgaggagaagatcagagatagcctcgtcgcgttggagaaagagtgcatccaggaggctgaaggacataagcttgcaagggataaccaaggctacgaaagcctggatctgctcctggatctgcaactactcatacaattcatggatgaggatatgcagccaatatgggaactgagacgcagcatcgaggatggaaccgcgacggacatatgttacgaagacctctggcatctcttcaaacgcggcgatatagtggttcagtcgagtagctcacatgcctatcgagttgtgaactttgcgggtggacggcctcctctagtagaccgactacaaggagaggaaaataagccagttgatgggtttgttgttgactgtctttctattcaatacgacggaacagattatgtcccccagctacgcagcttctctattaggccatttctgggaacacagcgtatcacctcactgtcggtctacccattgaagctggcagatcactcaaagaaactgcatctacaatataccatgcaaggaaaagttttcttagatctcataacaccacctttcctccacaagcatttgcgtggcaggactctggacgaaccacctcatgacatcgacgctcaaattattgtcgacatgagtatggccttaaatgtgaaacttgagtggcgaccatctacagataagatttcacaagacagcttcagggcaggcgacccacgcgagacgcaaatggcaccatggtgccgacattctgtgttctatgaagcctgctgtgggagtgatgtcgcattcaaagacttggatttggacagaagagaattgacaagatatgtccaggagaaccagcgcatgttgggtcctcgaaaggcagaagagcttagcgaggaagacttgatgcttctacctcacaaggttcatggtttcatcctcagaaatcgccagtgggtgactctgcagacaaaagacttgtcagacgtaacgtttcaaaatgagtttgacaagctcatgctacctcctgaacacaaatccgctattcaagcattagtgaaagttcacgagaatgctcgctcaaatgtcggggaaacttcgtccacaattggcactaacatagatcttgtcaaaggaaaaggagctggactcataatcttacttcatggcgaaccaggtgttgggaagacatctacagccgagtgcgtagctgatgacacgagtcggccactctttcccattacctgtggcgacatcggggaaacagcagtccaagttgaagaaaatctgcactataattttcgcttagctcacaaatggggatgtgttcttctgcttgatgaggcggacgtattcctagcgaagcgcagcaaaacggatctcagacgaaatgcagtcactagtgtattccttcgcagtcttgaatactattcaggaatcttgtttttgacgacaaatcgcgttggaagcattgaccctgctttcaaatctcgaatacacatcagcctcttttaccctaagtttactctcaagaaaacgctaaagatctatgaggtctacatcgagagaacccgtgatgagcaagagaaatcaaactcatccaactttatcataaacgataaagagattctgaaattcgccaaacgacacttccgggaaatggaaaaagaaggcctggatatctggaacggaagacaaattcgaaatgcatttcaggccgctattgctctcgttgaatacgatagtcaacaaataaaagcaggaagcccaaagccagtacttggagctacgcaatttcgaacagttgcggatagctcaaaggagttcgatcgatacctgcttgctacacttggagcaggagattcagatatcgctcaacgcgaagaatggagatttgatcgctttggcggccgcgatccagcacaagccgactctatgcaccgttacagcaacaaaacaatcaactctcgggagacacgaagtcgagtggatcaagaagatatgagtagcgacgaagatgagtctagcgatgatagctctagtgacgatggttctcgaaagaggcgtctggtcaagaagggtaaaggagcagacaaggccaggggtgatgaagcggattcgaagaacatggacgagttccgcgaattcttgaaatggaagcattcttcccgcaagtaa

SEQ ID NO: 10985 - protein, 975 aa, Muscodor strobelii
  misc_feature: SGI Peptide ID NO. 563510
  misc_feature (635)..(826): Pfam Id: PF00004 Pfam Desc: ATPase family associated with various cellular activities (AAA)
  misc_feature (635)..(773): Pfam Id: PF00004 Pfam Desc: ATPase family associated with various cellular activities (AAA)
  misc_feature (165)..(885): NCBI GI: 255950188 Blast Desc: Pc22g19580 [Penicillium chrysogenum Wisconsin 54-1255] gi|211592878|emb|CAP99246.1| Pc22g19580 [Penicillium chrysogenum Wisconsin 54-1255]
  misc_feature (292)..(897): NCBI GI: 225562337 Blast Desc: conserved [Ajellomyces capsulatus G186AR]
  misc_feature (292)..(928): NCBI GI: 154279082 Blast Desc: [Ajellomyces capsulatus NAm1] gi|150412297|gb|EDN07684.1| [Ajellomyces capsulatus NAm1]
  misc_feature (197)..(888): NCBI GI: 115402849 Blast Desc: conserved [Aspergillus terreus NIH2624] gi|114189347|gb|EAU31047.1| conserved [Aspergillus terreus NIH2624]
  misc_feature (200)..(885): NCBI GI: 225680865 Blast Desc: conserved [Paracoccidioides brasiliensis Pb03]
  misc_feature (200)..(897): NCBI GI: 226292566 Blast Desc: conserved [Paracoccidioides brasiliensis Pb18]
  misc_feature (200)..(885): NCBI GI: 226282273 Blast Desc: conserved [Paracoccidioides brasiliensis Pb01]
  misc_feature (292)..(897): NCBI GI: 240281176 Blast Desc: conserved [Ajellomyces capsulatus H143]
  misc_feature (204)..(904): NCBI GI: 145237766 Blast Desc: An07g04480 [Aspergillus niger] gi|134076004|emb|CAK48198.1| protein product [Aspergillus niger]
  misc_feature (201)..(909): NCBI GI: 67541855 Blast Desc: AN7091.2 [Aspergillus nidulans FGSC A4] gi|40742106|gb|EAA61296.1| AN7091.2 [Aspergillus nidulans FGSC A4]
  misc_feature: Useful for introducing or modulating the production of volatile compounds
MASLSGASAPDTLCNGATAKASSSVETIQDDAIDYEQTGSEVLQAAIQDDDDGEGESYHHVKRLASEAQWAEGQKLLDKEKEAGILSRRSRQAIIHTSFTELRIESLERELQKMRVDVYNLPKKLEVKEPEEKFPTYQRVLRRSEPAAFKINRISFKIPIRDRPVLETQAIKDAQVSDNQPEPGRLHRRPTGLGDRSENFHVPERLRIRSRPLIRHILNVTGTPSLYDLGPPGDEDEHSSIVLLNPFKILVTFEEKIRDSLVALEKECIQEAEGHKLARDNQGYESLDLLLDLQLLIQFMDEDMQPIWELRRSIEDGTATDICYEDLWHLFKRGDIVVQSSSSHAYRVVNFAGGRPPLVDRLQGEENKPVDGFVVDCLSIQYDGTDYVPQLRSFSIRPFLGTQRITSLSVYPLKLADHSKKLHLQYTMQGKVFLDLITPPFLHKHLRGRTLDEPPHDIDAQIIVDMSMALNVKLEWRPSTDKISQDSFRAGDPRETQMAPWCRHSVFYEACCGSDVAFKDLDLDRRELTRYVQENQRMLGPRKAEELSEEDLMLLPHKVHGFILRNRQWVTLQTKDLSDVTFQNEFDKLMLPPEHKSAIQALVKVHENARSNVGETSSTIGTNIDLVKGKGAGLIILLHGEPGVGKTSTAECVADDTSRPLFPITCGDIGETAVQVEENLHYNFRLAHKWGCVLLLDEADVFLAKRSKTDLRRNAVTSVFLRSLEYYSGILFLTTNRVGSIDPAFKSRIHISLFYPKFTLKKTLKIYEVYIERTRDEQEKSNSSNFIINDKEILKFAKRHFREMEKEGLDIWNGRQIRNAFQAAIALVEYDSQQIKAGSPKPVLGATQFRTVADSSKEFDRYLLATLGAGDSDIAQREEWRFDRFGGRDPAQADSMHRYSNKTINSRETRSRVDQEDMSSDEDESSDDSSSDDGSRKRRLVKKGKGADKARGDEADSKNMDEFREFLKWKHSSRK

SEQ ID NO: 10986 - DNA, 3109 bp, Muscodor strobelii
  misc_feature: SGI EST ID NO. CUFF.25953.0
  misc_feature: Variant of the nucleotide sequence at SEQ ID NO 10984
tagataaagagaaagaagcgggcattctctcaagacgctccaggcaagctattatccataccagtttcacagaattgaggattgagtcactcgaaagggagcttcaaaaaatgagggtcgacgtttacaatctaccaaagaaactcgaagtcaaagaaccagaggagaagtttccaacataccagcgtgtgctccgtcgttcagagcccgccgcttttaaaatcaaccgcatttctttcaagatccctatcagggaccgtccagtattggagacacaagcgatcaaagacgcccaggtatctgacaatcagcctgagcctggtcgccttcaccggcgaccaacaggactaggagaccggtcggagaattttcatgtcccagagagactgcgaattcgatcacgaccattgatccggcatattctcaacgtaactggaaccccatcgctatacgacctgggacctccaggagatgaagatgaacattcaagcatagtacttctcaaccctttcaagatactcgttaccttcgaggagaagatcagagatagcctcgtcgcgttggagaaagagtgcatccaggaggctgaaggacataagcttgcaagggataaccaaggctacgaaagcctggatctgctcctggatctgcaactactcatacaattcatggatgaggatatgcagccaatatgggaactgagacgcagcatcgaggatggaaccgcgacggacatatgttacgaagacctctggcatctcttcaaacgcggcgatatagtggttcagtcgagtagctcacatgcctatcgagttgtgaactttgcgggtggacggcctcctctagtagaccgactacaaggagaggaaaataagccagttgatgggtttgttgttgactgtctttctattcaatacgacggaacagattatgtcccccagctacgcagcttctctattaggccatttctgggaacacagcgtatcacctcactgtcggtctacccattgaagctggcagatcactcaaagaaactgcatctacaatataccatgcaaggaaaagttttcttagatctcataacaccacctttcctccacaagcatttgcgtggcaggactctggacgaaccacctcatgacatcgacgctcaaattattgtcgacatgagtatggccttaaatgtgaaacttgagtggcgaccatctacagataagatttcacaagacagcttcagggcaggcgacccacgcgagacgcaaatggcaccatggtgccgacattctgtgttctatgaagcctgctgtgggagtgatgtcgcattcaaagacttggatttggacagaagagaattgacaagatatgtccaggagaaccagcgcatgttgggtcctcgaaaggcagaagagcttagcgaggaagacttgatgcttctacctcacaaggttcatggtttcatcctcagaaatcgccagtgggtgactctgcagacaaaagacttgtcagacgtaacgtttcaaaatgagtttgacaagctcatgctacctcctgaacacaaatccgctattcaagcattagtgaaagttcacgagaatgctcgctcaaatgtcggggaaacttcgtccacaattggcactaacatagatcttgtcaaaggaaaaggagctggactcataatcttacttcatggcgaaccaggtgttgggaagacatctacagccgagtgcgtagctgatgacacgagtcggccactctttcccattacctgtggcgacatcggggaaacagcagtccaagttgaagaaaatctgcactataattttcgcttagctcacaaatggggatgtgttcttctgcttgatgaggcggacgtattcctagcgaagcgcagcaaaacggatctcagacgaaatgcagtcactagtgtattccttcgcagtcttgaatactattcaggaatcttgtttttgacgacaaatcgcgttggaagcattgaccctgctttcaaatctcgaatacacatcagcctcttttaccctaagtttactctcaagaaaacgctaaagatctatgaggtctacatcgagagaacccgtgatgagcaagagaaatcaaactcatccaactttatcataaacgataaagagattctgaaattcgccaaacgacacttccgggaaatggaaaaagaaggcctggatatctggaacggaaggtatgccttacatcacctagatagattgttaattatagttgttgatgaaaataatagacaaattcgaaatgcatttcaggccgctattgctctcgttgaatacgatagtcaacaaataaaagcaggaagcccaaagccagtacttggagctacgcaatttcgaacagttgcggatagctcaaaggagttcgatcgatacctgcttgctacacttggagcaggagattcagatatcgctcaacgcgaagaatggagatttgatcgctttggcggccgcgatccagcacaagccgactctatgcaccgttacagcaacaaaacaatcaactctcgggagacacgaagtcgagtggatcaagaagatatgagtagcgacgaagatgagtctagcgatgatagctctagtgacgatggttctcgaaagaggcgtctggtcaagaagggtaaaggagcagacaaggccaggggtgatgaagcggattcgaagaacatggacgagttccgcgaattcttgaaatggaagcattcttcccgcaagtaacggcgaaaatcgggttatcaatgcaagtttggtttgaatgtatagacacaaatattgttcaagcacgggacctgatgagatgtttcctgtaaaggtacaaatcacgcagtcgagtctcgtgaacacgtttcaaaatttttatagctgtaccttttcctattgtccatttagtcaaaagagtcctggattgagtgccctaataagattcgctatttcgtgctcatcttccacgtcacagggctccactgccgctcgcgtgttacccgagtatatagacaagctgacaatagcccctacccctacacctgacaattactccaccaatacgtcgtccaacacttgtaacattccaa

SEQ ID NO: 10987 - DNA, 1887 bp, Muscodor strobelii
  misc_feature: SGI cDNA ID NO. 563511
  misc_feature: Elevated expression when VOC is produced
  misc_feature: Encodes the peptide sequence at SEQ ID NO 10988
atggaggagcccgaaagaacacagtttctcttagcacggtcgcgtgtaccaacagatgatgccgcgagatttgttgagaacagggtcattgtacacgaacaaccgcgcgcggtttacagcgagagatgtggcagattcattacacttcaagaaggccaaagggaagaacaggagagcgcagaaatgtggagacaagccgatgaagaaatgcagagactgttcttgctattacgtgaagtacgagccaaatttgaccatacaatcggccatggagtcggcgacttggacgtgcgccactgtaaatgggagcaggtcatgaatgaggtgaaagaagcaggttaccgttggaaaacttcaccaccacggtcctccagagccatgcaatgtatcgacaaaattggccagaattcagcggctttcgagagctggttaggattgctaccggcaggtgactatggatcaattattgctggcggtttcacaatcgcaatttcggctgctacaagatatacgaagattgaagatgagatctaccaggcgttagaggagataccgcagatgatggaacactcccgacagtatatgcaaatatacgcagattatcgagatagtgctctcgagaagcaaacgttcaatctgtttagaagcattctgagggcactgatccaaatcatgcaattcttcaaagatagtacatttcggaaaatctccggatcgatcttcaaacaaggtgcctataaagaaaacctgttgaagagcttagacgaagttcgaaagcattcatcgaaaattcaggaagaagcaactcaataccttgcgtggagaggaagagagcataccaaaatgctccgagttgccgatgaaaaacaggatcaaggtctccaaaaacacgaccaagagcttcatatcctccaggctatatatgagctcctccgaactcatccaagcgtcgtcaaaaaacttaccagcaacctcgtagcccctcagaacgagtctgatacggacgatccggatgaagcaaatcagcggacttttgatcgtacggacaaactaggccctccaaacgcaagaaatgagctcgcaaaagaatccaccaaggagctgctcgttctcctgaggtataatccgagatccgcatctttagatgttgatagttgcctgagacgcggcaaggcgattctggaggcttcgaaagcacgaggagccgcaatggtgcaacacccaaagtttaaagagttcatggcggactacctagcatcgtcatacttactggtgaatgggaacgccgatcttgcgactgcagaaggcttgtctccgctcagcctgatttcagccaacctagtgagaatatcggagtcaatgaagcaatcctcacagccagtctttgtcgtcaagttcttttgtagtcagcatcggccattcgctcaacaatccgacgtgtctttgcccacgaccttgatgatgaatctactaggccaactggtcgagcagatgctagagaaagacgctgaggtcgacctctccgcgttgaaaataagtgattggcaaaaactagacggcctcaatctcaaagccctttgtgatctgtttcgcgaccttacatatcaactgccagaaaaggccgtgattctctgcgtgatcgacgaaatcaatctttatgaaatccaatcgcttgaaggagagaccgacagcaccattagaaggcttacgcgacttgttggaaagcatgacgatcgggtcttcaagctcctgttgacttgtcagggccgcgcattaggtgtctcgagatattttgtagaccatacgattgatctgcccacagatattgaaccagatgatttatcgtcatggaagatctcaacgatgggtacacagggagggtcataa

SEQ ID NO: 10988 - protein, 628 aa, Muscodor strobelii
  misc_feature: SGI Peptide ID NO. 563511
  misc_feature (102)..(587): NCBI GI: 189206646 Blast Desc: conserved [Pyrenophora tritici-repentis Pt-1C-BFP] gi|187975750|gb|EDU42376.1| conserved [Pyrenophora tritici-repentis Pt-1C-BFP]
  misc_feature (61)..(627): NCBI GI: 171690694 Blast Desc: protein product [Podospora anserina] gi|170945295|emb|CAP71407.1| protein product [Podospora anserina]
  misc_feature (59)..(627): NCBI GI: 256724620 Blast Desc: NECHADRAFT_48249 [Nectria haematococca mpVI 77-13-4]
  misc_feature (102)..(608): NCBI GI: 212544005 Blast Desc: conserved [Penicillium marneffei ATCC 18224] gi|210067064|gb|EEA21157.1| conserved [Penicillium marneffei ATCC 18224]
  misc_feature (60)..(588): NCBI GI: 115402847 Blast Desc: conserved [Aspergillus terreus NIH2624] gi|114189346|gb|EAU31046.1| conserved [Aspergillus terreus NIH2624]
  misc_feature (57)..(589): NCBI GI: 145228711 Blast Desc: An01g02260 [Aspergillus niger] gi|134054756|emb|CAK43596.1| protein product [Aspergillus niger]
  misc_feature (67)..(611): NCBI GI: 226292565 Blast Desc: conserved [Paracoccidioides brasiliensis Pb18]
  misc_feature (102)..(586): NCBI GI: 67541857 Blast Desc: AN7092.2 [Aspergillus nidulans FGSC A4] gi|40742107|gb|EAA61297.1| AN7092.2 [Aspergillus nidulans FGSC A4] gi|259483588|tpe|CBF79101.1| TPA: conserved [Aspergillus FGSC
  misc_feature (239)..(611): NCBI GI: 226282274 Blast Desc: conserved [Paracoccidioides brasiliensis Pb01]
  misc_feature (102)..(587): NCBI GI: 154302113 Blast Desc: [Botryotinia fuckeliana B05.10] gi|150855511|gb|EDN30703.1| [Botryotinia fuckeliana B05.10]
  misc_feature: Useful for introducing or modulating the production of volatile compounds
MEEPERTQFLLARSRVPTDDAARFVENRVIVHEQPRAVYSERCGRFITLQEGQREEQESAEMWRQADEEMQRLFLLLREVRAKFDHTIGHGVGDLDVRHCKWEQVMNEVKEAGYRWKTSPPRSSRAMQCIDKIGQNSAAFESWLGLLPAGDYGSIIAGGFTIAISAATRYTKIEDEIYQALEEIPQMMEHSRQYMQIYADYRDSALEKQTFNLFRSILRALIQIMQFFKDSTFRKISGSIFKQGAYKENLLKSLDEVRKHSSKIQEEATQYLAWRGREHTKMLRVADEKQDQGLQKHDQELHILQAIYELLRTHPSVVKKLTSNLVAPQNESDTDDPDEANQRTFDRTDKLGPPNARNELAKESTKELLVLLRYNPRSASLDVDSCLRRGKAILEASKARGAAMVQHPKFKEFMADYLASSYLLVNGNADLATAEGLSPLSLISANLVRISESMKQSSQPVFVVKFFCSQHRPFAQQSDVSLPTTLMMNLLGQLVEQMLEKDAEVDLSALKISDWQKLDGLNLKALCDLFRDLTYQLPEKAVILCVIDEINLYEIQSLEGETDSTIRRLTRLVGKHDDRVFKLLLTCQGRALGVSRYFVDHTIDLPTDIEPDDLSSWKISTMGTQGGS

SEQ ID NO: 10989 - DNA, 2297 bp, Muscodor strobelii
  misc_feature: SGI EST ID NO. CUFF.25958.1
  misc_feature: Variant of the nucleotide sequence at SEQ ID NO 10987
cgactgtcaaacaccaaagcagacaaagtgaatacatgatgcgttatttatcttacagacgaacagtcggtcaaaatggaggagcccgaaagaacacagtttctcttagcacggtcgcgtgtaccaacagatgatgccgcgagatttgttgagaacagggtcattgtacacgaacaaccgcgcgcggtttacagcgagagatgtggcagattcattacacttcaagaaggccaaagggaagaacaggagagcgcagaaatgtggagacaagccgatgaagaaatgcagagactgttcttgctattacgtgaagtacgagccaaatttgaccatacaatcggccatggagtcggcgacttggacgtgcgccactgtaaatgggagcaggtcatgaatgaggtgaaagaagcaggttaccgttggaaaacttcaccaccacggtcctccagagccatgcaatgtatcgacaaaattggccagaattcagcggctttcgagagctggttaggattgctaccggcaggtgactatggatcaattattgctggcggtttcacaatcgcaatttcggctgctacaagatatacgaagattgaagatgagatctaccaggcgttagaggagataccgcagatgatggaacactcccgacagtatatgcaaatatacgcagattatcgagatagtgctctcgagaagcaaacgttcaatctgtttagaagcattctgagggcactgatccaaatcatgcaattcttcaaagatagtacatttcggaaaatctccggatcgatcttcaaacaaggtgcctataaagaaaacctgttgaagagcttagacgaagttcgaaagcattcatcgaaaattcaggaagaagcaactcaataccttgcgtggagaggaagagagcataccaaaatgctccgagttgccgatgaaaaacaggatcaaggtctccaaaaacacgaccaagagcttcatatcctccaggctatatatgagctcctccgaactcatccaagcgtcgtcaaaaaacttaccagcaacctcgtagcccctcagaacgagtctgatacggacgatccggatgaagcaaatcagcggacttttgatcgtacggacaaactaggccctccaaacgcaagaaatgagctcgcaaaagaatccaccaaggagctgctcgttctcctgaggtataatccgagatccgcatctttagatgttgatagttgcctgagacgcggcaaggcgattctggaggcttcgaaagcacgaggagccgcaatggtgcaacacccaaagtttaaagagttcatggcggactacctagcatcgtcatacttactggtgaatgggaacgccgatcttgcgactgcagaaggcttgtctccgctcagcctgatttcagccaacctagtgagaatatcggagtcaatgaagcaatcctcacagccagtctttgtcgtcaagttcttttgtagtcagcatcggccattcgctcaacaatccgacgtgtctttgcccacgaccttgatgatgaatctactaggccaactggtcgagcagatgctagagaaagacgctgaggtcgacctctccgcgttgaaaataagtgattggcaaaaactagacggcctcaatctcaaagccctttgtgatctgtttcgcgaccttacatatcaactgccagaaaaggccgtgattctctgcgtgatcgacgaaatcaatctttatgaaatccaatcgcttgaaggagagaccgacagcaccattagaaggcttacgcgacttgttggaaagcatgacgatcgggtcttcaagctcctgttgacttgtcagggccgcgcattaggtgtctcgagatattttgtagaccatacgattgatctgcccacagatattgaaccagatgatttatcgtcatggaagatctcaacgatgggtacacagggagggtcataacgcatatatacaatgatcacctcactcatcataaaggaaataacgcgtgcttttcgatttctacctgaaattctttctgagtgacgcgagactcgaactagcctgtgacaacatcggacgttggacagtgcatcgtgattgggaccgaacacgattatgggtacctactaatctcactacgacaagattcaacacgacaggatgctccaaatgaacaagctgcgtcgcgctcacaatatattgacgtcgtggaaagataatcgatgcttagatcatgagatgtctagaagatagcatggcacatccatgatgcatgcctgaagtctgtatgagac

SEQ ID NO: 10990 - DNA, 717 bp, Muscodor strobelii
  misc_feature: SGI cDNA ID NO. 563512
  misc_feature: Encodes the peptide sequence at SEQ ID NO 10991
atgagcaacgagttgtcgtttcttgtggcatttgctactgtcttcggcgcttctgaggctatcaagcagatccaagctgatgcgaggaagaaagaacatctcagtcgcaagaacaatcttatcgtgcggtgtctcaagtcttgtgaatatagtgctacgcttgaaggaagacgtgttgtcctttctggagacaagctatacatagacacagggacacatcacgaccaagtatttggacacccttttgccggatattatctcccataccccgaatccagcgcttcaggtcttgtctcgacaatatgtgatgagccaccaattatgaactggatatatgtggatcgctggagccacgaactgaagttcggtacgcgagcttgggcagatgataactgggctgtgccatttgggtgctctcgccaagatcgaaggttgacctttgggagctgggaggggtttctcgcggttaaagaaggcgatttctgggcgctatattttgatgttgatcaagattgtctgaaggacaaagttgaagagggtactccagtgcttgaaattgagctgttgagggttgagatgcgcgttcctcgacctgagagggagcctgaagcgaatgggaagtctgatgatgtagaaaacgcagacggctcaaaggcggagccgaaggcgaacgggatggcgtccgatgagatattagaaggtcctccagtggattga

SEQ ID NO: 10991 - protein, 238 aa, Muscodor strobelii
  misc_feature: SGI Peptide ID NO. 563512
  misc_feature (5)..(235): NCBI GI: 169622154 Blast Desc: SNOG_14293 [Phaeosphaeria nodorum SN15] gi|111057044|gb|EAT78164.1| SNOG_14293 [Phaeosphaeria nodorum SN15]
  misc_feature (5)..(194): NCBI GI: 145608096 Blast Desc: MGG_12712 [Magnaporthe grisea 70-15] gi|145015600|gb|EDK00090.1| MGG_12712 [Magnaporthe grisea 70-15]
  misc_feature (5)..(194): NCBI GI: 189191052 Blast Desc: conserved [Pyrenophora tritici-repentis Pt-1C-BFP] gi|187973471|gb|EDU40970.1| conserved [Pyrenophora tritici-repentis Pt-1C-BFP]
  misc_feature (1)..(197): NCBI GI: 154301012 Blast Desc: BC1G_10644 [Botryotinia fuckeliana B05.10] gi|150856392|gb|EDN31584.1| BC1G_10644 [Botryotinia fuckeliana B05.10]
  misc_feature (5)..(204): NCBI GI: 46136621 Blast Desc: FG09826.1 [Gibberella zeae PH-1]
  misc_feature (5)..(204): NCBI GI: 256727567 Blast Desc: NECHADRAFT_34160 [Nectria haematococca mpVI 77-13-4]
  misc_feature (5)..(207): NCBI GI: 189196404 Blast Desc: conserved [Pyrenophora tritici-repentis Pt-1C-BFP] gi|187980419|gb|EDU47045.1| conserved [Pyrenophora tritici-repentis Pt-1C-BFP]
  misc_feature (5)..(196): NCBI GI: 258564927 Blast Desc: conserved [Uncinocarpus reesii 1704] gi|237906909|gb|EEP81310.1| conserved [Uncinocarpus reesii 1704]
  misc_feature (5)..(197): NCBI GI: 58268008 Blast Desc: CNE04670 [Cryptococcus neoformans var. neoformans JEC21] gi|134112437|ref|XP_775194.1| CNBE4670 [Cryptococcus neoformans var. neoformans B-3501A] gi|50257846|gb|EAL20547.1|
  misc_feature (5)..(196): NCBI GI: 119179488 Blast Desc: CIMG_08489 [Coccidioides immitis RS]
MSNELSFLVAFATVFGASEAIKQIQADARKKEHLSRKNNLIVRCLKSCEYSATLEGRRVVLSGDKLYIDTGTHHDQVFGHPFAGYYLPYPESSASGLVSTICDEPPIMNWIYVDRWSHELKFGTRAWADDNWAVPFGCSRQDRRLTFGSWEGFLAVKEGDFWALYFDVDQDCLKDKVEEGTPVLEIELLRVEMRVPRPEREPEANGKSDDVENADGSKAEPKANGMASDEILEGPPVD

SEQ ID NO: 10992 - DNA, 1084 bp, Muscodor strobelii
  misc_feature: SGI EST ID NO. CUFF.25978.1
  misc_feature: Variant of the nucleotide sequence at SEQ ID NO 10990
tctcgagtcacgaaagaccgatggaacggagtcgaacgatgaattgatcgagaccgatgttgtgctactacctggacgggaaactgcttccgatccgctgcatgtcatcgtgtgttacacttaggttgaggggtacatcggaacatatttagatccttatggatcagtcccagtggttgtgcaggctggtcgagacctccaggtcgttccatgattggcaacttcacagactatgagcaacgagttgtcgtttcttgtggcatttgctactgtcttcggcgcttctgaggctatcaagcagatccaagctgatgcgaggaagaaagaacatctcagtcgcaagaacaatcttatcgtgcggtgtctcaagtcttgtgaatatagtgctacgcttgaaggaagacgtgttgtcctttctggagacaagctatacatagacacagggacacatcacgaccaagtatttggacacccttttgccggatattatctcccataccccgaatccagcgcttcaggtcttgtctcgacaatatgtgatgagccaccaattatgaactggatatatgtggatcgctggagccacgaactgaagttcggtacgcgagcttgggcagatgataactgggctgtgccatttgggtgctctcgccaagatcgaaggttgacctttgggagctgggaggggtttctcgcggttaaagaaggcgatttctgggcgctatattttgatgttgatcaagattgtctgaaggacaaagttgaagagggtactccagtgcttgaaattgagctgttgagggttgagatgcgcgttcctcgacctgagagggagcctgaagcgaatgggaagtctgatgatgtagaaaacgcagacggctcaaaggcggagccgaaggcgaacgggatggcgtccgatgagatattagaaggtcctccagtggattgacagctatttgttcatccaaacccagtatggtcggattgagtgctgaatagtcataaaacataacttggaaatatctaacaatgcgtgtagggccttcgataacgtagttgatagggcgaacctcttcgatgactg

SEQ ID NO: 10993 - DNA, 312 bp, Muscodor strobelii
  misc_feature: SGI cDNA ID NO. 563513
  misc_feature: Elevated expression when VOC is produced
  misc_feature: Encodes the peptide sequence at SEQ ID NO 10994
atgtcttctcccgtcaagtccgctgccccggccccggcctcaagtatcctcgatcgcactggcaaccgagccaatagcgacgatgagcgcaatgggcacctaactcatcctcttcctcatccgaccggcctccctatgccgggactctcgggaagagccaactctcctactggaaacctcctcaaaggcccagtggacgacgacggcaagctcaagtccgccgcgctcatggtcggcatcaagctggatctcgaggccgaagtgcacctcacagcccgcgtgcgcggcgacatcctcgtcgggctctactag

SEQ ID NO: 10994 - protein, 103 aa, Muscodor strobelii
  misc_feature: SGI Peptide ID NO. 563513
  misc_feature (15)..(103): NCBI GI: 189191050 Blast Desc: conserved [Pyrenophora tritici-repentis Pt-1C-BFP] gi|187973470|gb|EDU40969.1| conserved [Pyrenophora tritici-repentis Pt-1C-BFP]
  misc_feature (1)..(103): NCBI GI: 46136623 Blast Desc: FG09827.1 [Gibberella zeae PH-1]
  misc_feature (33)..(103): NCBI GI: 256726990 Blast Desc: NECHADRAFT_76528 [Nectria haematococca mpVI 77-13-4]
  misc_feature (45)..(103): NCBI GI: 169622156 Blast Desc: SNOG_14294 [Phaeosphaeria nodorum SN15] gi|160704712|gb|EAT78165.2| SNOG_14294 [Phaeosphaeria nodorum SN15]
  misc_feature (35)..(103): NCBI GI: 154301014 Blast Desc: [Botryotinia fuckeliana B05.10] gi|150856393|gb|EDN31585.1| [Botryotinia fuckeliana B05.10]
  misc_feature: Useful for introducing or modulating the production of volatile compounds
MSSPVKSAAPAPASSILDRTGNRANSDDERNGHLTHPLPHPTGLPMPGLSGRANSPTGNLLKGPVDDDGKLKSAALMVGIKLDLEAEVHLTARVRGDILVGLY

SEQ ID NO: 10995 - DNA, 1103 bp, Muscodor strobelii
  misc_feature: SGI EST ID NO. CUFF.27176.1
  misc_feature: Variant of the nucleotide sequence at SEQ ID NO 10993
gtccgtatctggtaaaccgttcgatgtgatggacgagtcgagcatgatgttgttgatgcgcgagtggtataaagaagcatgccgatcccgatgagaatgtcctttgccatcgccaaccagggcagaatcaagagaaccggcatcaatttgacctcagcagttagccaccaatagtaagacactacggagcacctctttcaatctataaattcaccatgtcttctcccgtcaagtccgctgccccggccccggcctcaagtatcctcgatcgcactggcaaccgagccaatagcgacgatgagcgcaatgggcacctaactcatcctcttcctcatccgaccggcctccctatgccgggactctcgggaagagccaactctcctactggaaacctcctcaaaggcccagtggacgacgacggcaagctcaagtccgccgcgctcatggtcggcatcaagctggatctcgaggccgaagtgcacctcacagcccgcgtgcgcggcgacatcctcgtcgggctctactaggtatttccttccccttcccgcccgagcctccaccaacgcaaaaaccacaccggggaagatgaatggcggacaaagatgggagacgcaagagcgggaaagggtggtgaaaggggcgatgggaaaggaggaaaggttcatcccaggactgttcgcgctaagtggaggaacccgtgatgacgaggcggagtatccgtttcaaggcggaaagatgagaataggtgtcgaaactcgagggttcgtagttgggctgggatatgggtcggttagtgtgcttcaggtcattgtcaggttgcagttggatttcgatggggagaggccagaaggcgaggagtcggaggaagaaaaagaggatacagatcatgatgaaaaggggcacaagacaaatttcaacaccagagtggaaaaagacgaagaaggggaaattgctctatcaatgtcgttaaccctcacgctcactatcgtagcaatccaaccgccgactttctcttgaatcattcctagtgctgcctgcattatcagcgtcgtccgcaatgtaaccagctagacctgaataaatgtcacaaaatggcccaccta

SEQ ID NO: 10996 - DNA, 4221 bp, Muscodor strobelii
  misc_feature: SGI cDNA ID NO. 563514
  misc_feature: Encodes the peptide sequence at SEQ ID NO 10997
atgaccagcgccacccgtggccccatctccaacagcagcaacagcaacaacaacaacaacatcatgtacagcagcggcgctctcattaacagcacatcccacggccacaaccacggcgccactcacggtcacggtcacggccaggggcatgcgtacagctatagctccgacttcgagggcttcgacgacgccgccagcaagatctcgtcgcagttctcccgcggccgccgtagtaacagcagctcggggttccagtcgggactcgcacgcatcaacagcatgcgcgagcgcagccaccctggcgccctcggcagcagcagcaataatcacaatcataacaggcggccggcgcactcgcggggcggcaagacgagcaagagcagcagcacgggcagcttcatcgacgcccccaacgcttatcctccccagacgcaggccacggcgcgctgggccgcccagtcgtctcacggtcggtcgtcgagcttcgactacggcgagagaccgtcgctgacgtcgcccgacacgtggaagagcgagccctctggcaacaacaacactttccttgtcgacgactacgaagctgcgcccaacccgaccgtgcccggcggccctcgtcgacctcccgtgcccgcagcgccaccacccccgcccacagcgtcctcgaaacacgagtcggaagccgccaagaagggaacacggtctcgcagcggcaccaacaagaccacccagtccagatacgcaccatcacgcgaggcagcccctcctctgccaccactcgacaccgattccgcccctgcgccccacgtgggatatgagaagtccaaggagccagtcgcctctgcaccggctacggttgctgctcccgtagccaaagagaagcagggcttcttcagcaggctcttcggcggttccagagcaactgcggctgcggcaacggcagcagcagcgatgcccagtcccacggtcgagcccgtgtcggcgccggcgatgcttaggcaaaccgactcgctctcgatccgctcccccgaccgcgacgccgagccctcgtccaggtcgacgtcgacctcgacacccacgcctgcacccgcgtccgcgtccgcgcccgcacctccacatgtcatccagaagaagtcgtccttcttccgccgacgcaagaagtccatcgccgagccgcctcccccgccgccgccgcccgtcccccagctcgacctcgccaagacgcacgaccgagcgctgcccatgcccgagcccagccctgtcagcagcctgcgccaggttatgaacccgtatctgcgaggcagcaacccgtccacgccccacgacgtcctgacgcccgacaaacggggcacctcgcagcgcgccctcgaggcagacacgcgcgccgacagcagcagccgcaggacgaggggcttctcgcccgagtacgagcccagcccgagcgccaccatccgcaccgtcaagtcgacctcggccctcaagaaccagtcctcgactcgatccagcgcgcaatggcgcggcccccatggacagtcctctgcggtcgccgcccgcagtgacgagggcgagggcaagagtacgccccgccacaggaagcagcaggagcgaccgcagacaggcagagccgccacctcgagttccgtgtccagctctgcacccaggcccaagatgtcgctggagcctttgagcccgctcggcaacctgcccatccccgagcggtctcccagcttgctgctccagaagaacacggatggcggcgaccagacgcccaccagcctgggtgtgcctgtgggaagcaggaagaactcggactcgcggccggtgttgagcagagcgggcagcagcgtgccgagcgtcaccgtcgacagcacgcaggcgagccccaagatccccaacggccctctcgacgagcccgagatcagcatcggcgagccgaccgaggacgagcgccagaaggcccagggcatcttcgacggcgacgaggacttcatccagaaggccaaggcggccgcgtggatgggcgaggagggccccgtgcgccagcggacactgcgcgcctacatggacctctacgacttcaagaaccagagcgtcatcaccgcgctccgccaggtctgcacgcgcctcgtcttccgcgccgagacgcagcaggtcgacaggatcttggtctccttctcccggcgctggtgtgactgcaaccccagtcacggtttcaaggctactgatgtgattcataccatgtgctactcgatcatgctgctcaatacggatctgcatctcgccgacatcgaccagaagatgacgcgcagccagttcgttaagaacaccatgaccaccatccagtctgccgtcgccgactccgcgcccgaggctttcagccgtgccagcatcctgccccccagatccggaatgctcagcccgaccgactccgacgcgaacacgcttgtgggagacgaccaggataagccaagctggagggcctctttcaagccgccgcctcgatccgaatcggctctgggattcaactcggactcgcccgtagatacttgcggacctttggtcaaggcgccttttgatgggcctatgcgttcttgggaaggacaagtcgagattgtgctcaaagatatttacaactctattcgcgacgagaggctgcctctttttggcgccgatcccagccatcagccaccacaatcccagtctggtctgtctgtcatgggcatgctcaagcgcacacccagcgtcttgagcaaggctccctccgagggccagatttccgtccgcggccgcatcaacgagtcgggcggtgggcgcaatcaaggaggacggtggaattccaagagccggtctcgacccagattcggaggtaatggcttctcgtcgagtaggacaagcttcgaagacaccaattccatctggagtccggccggctcctcagctacttggagccggtactcgctgggtcgaacgcagacgtcaccctcgatggactcctttaactcgggctatccatacggtgagtatcagcagtcgattggtttcgccaacgctctcagccaggccatcatccgcgatgattatcccatcgccaatagtgcccagtccatcataagcgaggacttctcgggcggcaaccagatgctcgaggacgagtcgcttgagctattgggcccgccttgggtcaaagagggcatcgtcattcacaagcatcatctcgacggggtggacaagaaggctaaggaccgcaattggaacgaggtgtttgccgtcgtacagaaagggaccatgagcctgttctccttctccacgaagtctatgcgccaaaaggcacgtggcggccggaagcacatggccggtgctgtagtcggcggaggaaattggcaggagaatgctactagcatgggctcgttctctctacgccaaaccctcgcttcggcactgccgccgcccggatactcgcgtactcgcccacacgtttgggccttgagtctacccagcggtgccgttcaccttttccaggtgggcacgcccgagatcagcaaggagttcgtcacgaccgtcaactactggagcgcaaggctcagcacccacccgctcgtcggtggcatcagcaatatagaatatggctggagcgacgccgtcattaacaatgctctgatcgacccgattcaggagtctgcagaaagtggtcagccccggcggccaggtagtgcggccgcgggtcgcacgagtatgcacagtcgacagggcagtttgcagagtagcctgcgctctagcttcgatgtaggcggcaacggaggccgcgttaagctgcctggagatcgaattcatatcgccgagtgggcaccgcccagccagtcgatgcgtccgtcgcaatgctccgaggctgagcagctcgagacgctgctggcctatgtcaagtccgtcgaggatgagctgcaacaccacaaccaacttcgatcacccatgctgctggccttcacgcctagaggccataatgccgccaaggccatggcgaactgggagcgcaagagtagctatctgctgagagagattgtcaagttccggacctatgtcgactgtctgcagcaaggtgccgagagaagagaagagatctataaagagcgagagattgcacgaagggctgctaacggggaggagattctcagcgacagtgcgctctctggtgaagacgaagccgatgtgactttgaaggttgcataa

SEQ ID NO: 10997 - protein, 1406 aa, Muscodor strobelii
  misc_feature: SGI Peptide ID NO. 563514
  misc_feature (616)..(788): Pfam Id: PF01369 Pfam Desc: Sec7 domain
  misc_feature (682)..(775): Pfam Id: PF01369 Pfam Desc: Sec7 domain
  misc_feature (49)..(1404): NCBI GI: 256733032 Blast Desc: NECHADRAFT_38032 [Nectria haematococca mpVI 77-13-4]
  misc_feature (45)..(1406): NCBI GI: 116179486 Blast Desc: CHGG_00371 [Chaetomium globosum CBS 148.51] gi|88184668|gb|EAQ92136.1| CHGG_00371 [Chaetomium globosum CBS 148.51]
  misc_feature (49)..(1387): NCBI GI: 189091928 Blast Desc: [Podospora anserina] gi|27803074|emb|CAD60777.1| protein product [Podospora anserina] gi|188219317|emb|CAP49297.1| protein product [Podospora anserina]
  misc_feature (26)..(1405): NCBI GI: 261354595 Blast Desc: Sec7 domain-containing protein [Verticillium albo-atrum VaMs.102]
  misc_feature (611)..(1404): NCBI GI: 46125229 Blast Desc: FG06992.1 [Gibberella zeae PH-1]
  misc_feature (634)..(1376): NCBI GI: 145610743 Blast Desc: MGG_00928 [Magnaporthe grisea 70-15] gi|145018118|gb|EDK02397.1| MGG_00928 [Magnaporthe grisea 70-15]
  misc_feature (30)..(1227): NCBI GI: 85092586 Blast Desc: NCU11254 [Neurospora crassa OR74A] gi|28920898|gb|EAA30233.1| conserved [Neurospora crassa OR74A] gi|40804593|emb|CAF05854.1| conserved [Neurospora crassa]
  misc_feature (643)..(1394): NCBI GI: 156039657 Blast Desc: SS1G_11965 [Sclerotinia sclerotiorum 1980] gi|154697702|gb|EDN97440.1| SS1G_11965 [Sclerotinia sclerotiorum 1980]
  misc_feature (155)..(1375): NCBI GI: 212544986 Blast Desc: Sec7 domain protein [Penicillium marneffei ATCC 18224] gi|210065616|gb|EEA19710.1| Sec7 domain protein [Penicillium marneffei ATCC 18224]
  misc_feature (34)..(1372): NCBI GI: 255945199 Blast Desc: Pc20g08440 [Penicillium chrysogenum Wisconsin 54-1255] gi|211588102|emb|CAP86173.1| Pc20g08440 [Penicillium chrysogenum Wisconsin 54-1255]
MTSATRGPISNSSNSNNNNNIMYSSGALINSTSHGHNHGATHGHGHGQGHAYSYSSDFEGFDDAASKISSQFSRGRRSNSSSGFQSGLARINSMRERSHPGALGSSSNNHNHNRRPAHSRGGKTSKSSSTGSFIDAPNAYPPQTQATARWAAQSSHGRSSSFDYGERPSLTSPDTWKSEPSGNNNTFLVDDYEAAPNPTVPGGPRRPPVPAAPPPPPTASSKHESEAAKKGTRSRSGTNKTTQSRYAPSREAAPPLPPLDTDSAPAPHVGYEKSKEPVASAPATVAAPVAKEKQGFFSRLFGGSRATAAAATAAAAMPSPTVEPVSAPAMLRQTDSLSIRSPDRDAEPSSRSTSTSTPTPAPASASAPAPPHVIQKKSSFFRRRKKSIAEPPPPPPPPVPQLDLAKTHDRALPMPEPSPVSSLRQVMNPYLRGSNPSTPHDVLTPDKRGTSQRALEADTRADSSSRRTRGFSPEYEPSPSATIRTVKSTSALKNQSSTRSSAQWRGPHGQSSAVAARSDEGEGKSTPRHRKQQERPQTGRAATSSSVSSSAPRPKMSLEPLSPLGNLPIPERSPSLLLQKNTDGGDQTPTSLGVPVGSRKNSDSRPVLSRAGSSVPSVTVDSTQASPKIPNGPLDEPEISIGEPTEDERQKAQGIFDGDEDFIQKAKAAAWMGEEGPVRQRTLRAYMDLYDFKNQSVITALRQVCTRLVFRAETQQVDRILVSFSRRWCDCNPSHGFKATDVIHTMCYSIMLLNTDLHLADIDQKMTRSQFVKNTMTTIQSAVADSAPEAFSRASILPPRSGMLSPTDSDANTLVGDDQDKPSWRASFKPPPRSESALGFNSDSPVDTCGPLVKAPFDGPMRSWEGQVEIVLKDIYNSIRDERLPLFGADPSHQPPQSQSGLSVMGMLKRTPSVLSKAPSEGQISVRGRINESGGGRNQGGRWNSKSRSRPRFGGNGFSSSRTSFEDTNSIWSPAGSSATWSRYSLGRTQTSPSMDSFNSGYPYGEYQQSIGFANALSQAIIRDDYPIANSAQSIISEDFSGGNQMLEDESLELLGPPWVKEGIVIHKHHLDGVDKKAKDRNWNEVFAVVQKGTMSLFSFSTKSMRQKARGGRKHMAGAVVGGGNWQENATSMGSFSLRQTLASALPPPGYSRTRPHVWALSLPSGAVHLFQVGTPEISKEFVTTVNYWSARLSTHPLVGGISNIEYGWSDAVINNALIDPIQESAESGQPRRPGSAAAGRTSMHSRQGSLQSSLRSSFDVGGNGGRVKLPGDRIHIAEWAPPSQSMRPSQCSEAEQLETLLAYVKSVEDELQHHNQLRSPMLLAFTPRGHNAAKAMANWERKSSYLLREIVKFRTYVDCLQQGAERREEIYKEREIARRAANGEEILSDSALSGEDEADVTLKVA

SEQ ID NO: 10998 - DNA, 4611 bp, Muscodor strobelii
  misc_feature: SGI EST ID NO. CUFF.26017.0
  misc_feature: Variant of the nucleotide sequence at SEQ ID NO 10996
acctcactcgctctatgaccaacaccatgaccagcgccacccgtggccccatctccaacagcagcaacagcaacaacaacaacaacatcatgtacagcagcggcgctctcattaacagcacatcccacggccacaaccacggcgccactcacggtcacggtcacggccaggggcatgcgtacagctatagctccgacttcgagggcttcgacgacgccgccagcaagatctcgtcgcagttctcccgcggccgccgtagtaacagcagctcggggttccagtcgggactcgcacgcatcaacagcatgcgcgagcgcagccaccctggcgccctcggcagcagcagcaataatcacaatcataacaggcggccggcgcactcgcggggcggcaagacgagcaagagcagcagcacgggcagcttcatcgacgcccccaacgcttatcctccccagacgcaggccacggcgcgctgggccgcccagtcgtctcacggtcggtcgtcgagcttcgactacggcgagagaccgtcgctgacgtcgcccgacacgtggaagagcgagccctctggcaacaacaacactttccttgtcgacgactacgaagctgcgcccaacccgaccgtgcccggcggccctcgtcgacctcccgtgcccgcagcgccaccacccccgcccacagcgtcctcgaaacacgagtcggaagccgccaagaagggaacacggtctcgcagcggcaccaacaagaccacccagtccagatacgcaccatcacgcgaggcagcccctcctctgccaccactcgacaccgattccgcccctgcgccccacgtgggatatgagaagtccaaggagccagtcgcctctgcaccggctacggttgctgctcccgtagccaaagagaagcagggcttcttcagcaggctcttcggcggttccagagcaactgcggctgcggcaacggcagcagcagcgatgcccagtcccacggtcgagcccgtgtcggcgccggcgatgcttaggcaaaccgactcgctctcgagtagcagtcacaccaagacgcagcatatcgtgtctcagatgaagccccagtccgctcccccgaccgcgacgccgagccctcgtccaggtcgacgtcgacctcgacacccacgcctgcacccgcgtccgcgtccgcgcccgcacctccacatgtcatccagaagaagtcgtccttcttccgccgacgcaagaagtccatcgccgagccgcctcccccgccgccgccgcccgtcccccagctcgacctcgccaagacgcacgaccgagcgctgcccatgcccgagcccagccctgtcagcagcctgcgccaggttatgaacccgtatctgcgaggcagcaacccgtccacgccccacgacgtcctgacgcccgacaaacggggcacctcgcagcgcgccctcgaggcagacacgcgcgccgacagcagcagccgcaggacgaggggcttctcgcccgagtacgagcccagcccgagcgccaccatccgcaccgtcaagtcgacctcggccctcaagaaccagtcctcgactcgatccagcgcgcaatggcgcggcccccatggacagtcctctgcggtcgccgcccggtgtgcccgtcacgtctccccccagcaaagccgactcgaccttcttccacgacagcagtgacgagggcgagggcaagagtacgccccgccacaggaagcagcaggagcgaccgcagacaggcagagccgccacctcgagttccgtgtccagctctgcacccaggcccaagatgtcgctggagcctttgagcccgctcggcaacctgcccatccccgagcggtctcccagcttgctgctccagaagaacacggatggcggcgaccagacgcccaccagcctgggtgtgcctgtgggaagcaggaagaactcggactcgcggccggtgttgagcagagcgggcagcagcgtgccgagcgtcaccgtcgacagcacgcaggcgagccccaagatccccaacggccctctcgacgagcccgagatcagcatcggcgagccgaccgaggacgagcgccagaaggcccagggcatcttcgacggcgacgaggacttcatccagaaggccaaggcggccgcgtggatgggcgaggagggccccgtgcgccagcggacactgcgcgcctacatggacctctacgacttcaagaaccagagcgtcatcaccgcgctccgccaggtctgcacgcgcctcgtcttccgcgccgagacgcagcaggtcgacaggatcttggtctccttctcccggcgctggtgtgactgcaaccccagtcacggtttcaaggctactgatgtgattcataccatgtgctactcgatcatgctgctcaatacggatctgcatctcgccgacatcgaccagaagatgacgcgcagccagttcgttaagaacaccatgaccaccatccagtctgccgtcgccgactccgcgcccgaggctttcagccgtgccagcatcctgccccccagatccggaatgctcagcccgaccgactccgacgcgaacacgcttgtgggagacgaccaggataagccaagctggagggcctctttcaagccgccgcctcgatccgaatcggctctgggattcaactcggactcgcccgtagatacttgcggacctttggtcaaggcgccttttgatgggcctatgcgttcttgggaaggacaagtcgagattgtgctcaaagatatttacaactctattcgcgacgagaggctgcctctttttggcgccgatcccagccatcagccaccacaatcccagtctggtctgtctgtcatgggcatgctcaagcgcacacccagcgtcttgagcaaggctccctccgagggccagatttccgtccgcggccgcatcaacgagtcgggcggtgggcgcaatcaaggaggacggtggaattccaagagccggtctcgacccagattcggaggtaatggcttctcgtcgagtaggacaagcttcgaagacaccaattccatctggagtccggccggctcctcagctacttggagccggtactcgctgggtcgaacgcagacgtcaccctcgatggactcctttaactcgggctatccatacggtgagtatcagcagtcgattggtttcgccaacgctctcagccaggccatcatccgcgatgattatcccatcgccaatagtgcccagtccatcataagcgaggacttctcgggcggcaaccagatgctcgaggacgagtcgcttgagctattgggcccgccttgggtcaaagagggcatcgtcattcacaagcatcatctcgacggggtggacaagaaggctaaggaccgcaattggaacgaggtgtttgccgtcgtacagaaagggaccatgagcctgttctccttctccacgaagtctatgcgccaaaaggcacgtggcggccggaagcacatggccggtgctgtagtcggcggaggaaattggcaggagaatgctactagcatgggctcgttctctctacgccaaaccctcgcttcggcactgccgccgcccggatactcgcgtactcgcccacacgtttgggccttgagtctacccagcggtgccgttcaccttttccaggtgggcacgcccgagatcagcaaggagttcgtcacgaccgtcaactactggagcgcaaggctcagcacccacccgctcgtcggtggcatcagcaatatagaatatggctggagcgacgccgtcattaacaatgctctgatcgacccgattcaggagtctgcagaaagtggtcagccccggcggccaggtagtgcggccgcgggtcgcacgagtatgcacagtcgacagggcagtttgcagagtagcctgcgctctagcttcgatgtaggcggcaacggaggccgcgttaagctgcctggagatcgaattcatatcgccgagtgggcaccgcccagccagtcgatgcgtccgtcgcaatgctccgaggctgagcagctcgagacgctgctggcctatgtcaagtccgtcgaggatgagctgcaacaccacaaccaacttcgatcacccatgctgctggccttcacgcctagaggccataatgccgccaaggccatggcgaactgggagcgcaagagtagctatctgctgagagagattgtcaagttccggacctatgtcgactgtctgcagcaaggtgccgagagaagagaagagatctataaagagcgagagattgcacgaagggctgctaacggggaggagattctcagcgacagtgcgctctctggtgaagacgaagccgatgtgactttgaaggttgcataaatgaggctctgctcgttctcaggcttggcaggcattccagtactccatatatgcctatgtatttgctggcgaagggaaaagcctgtctaactcttgggggttgacgttggaagagtacgactacgacatgatcattgcttaattattctctttttgatacccatttagcttgatagaacctacacatacacgagtgaatgaactattatcggtctctaccagatctcgatctacctttcctgatgctggccagtaatta

SEQ ID NO: 10999 - DNA, 747 bp, Muscodor strobelii
  misc_feature: SGI cDNA ID NO. 563515
  misc_feature: Encodes the peptide sequence at SEQ ID NO 11000
atggcctccactcaaacagatacggagagtgaacccgtccgctattcaaatccatccgtgtcgtccaacgatgtcgcgcacttttcctgggagcacccggtacccaagaccaagttctggaacgacttgccctacccactcgcgcggaacttcctgcaggcctgcaatgctgaagatctagcttacatccggcccgcagccgagagtgacgccgacaagtcaagacgggagaaactcatgctcttggatcgctgggtgaagaagaagctcatccaagaagaagccctcgcggcgcctcgttctttctacgatgccgactacgcaggttgggagcggctgatgctggcctcggtctcgatatccaaggagctcggggattcggtgagggaggaagacacgctgcgcttgcttgtggatcggcgcaaagataggagtaatctgtcgcatgtacataacctcgccggcatgctcgtcgagaagggagagtacgcagaagctgagcggctggagcgcaaggtcgaaccttggctgatctcgaagttgggaagaggctcgccacaggcgctgggggcgaagaggattctgattcttgccgtgtggaaacaaggtcgatcccgacacgcggaagccgagaagctgttgaaagaactacagagtgatctgagcgggcttggagatagtcagtatgccatgtatcgagacgaggagttagacgcgatgaaggagttgatgaccaagatggactga

SEQ ID NO: 11000 - protein, 248 aa, Muscodor strobelii
  misc_feature: SGI Peptide ID NO. 563515
  misc_feature (14)..(247): NCBI GI: 145236543 Blast Desc: An06g00920 [Aspergillus niger] gi|134075375|emb|CAK44998.1| [Aspergillus niger]
  misc_feature (30)..(247): NCBI GI: 145241135 Blast Desc: An08g11120 [Aspergillus niger] gi|134077743|emb|CAK45783.1| protein product [Aspergillus niger]
  misc_feature (27)..(247): NCBI GI: 238494304 Blast Desc: conserved [Aspergillus flavus NRRL3357] gi|220695038|gb|EED51381.1| conserved [Aspergillus flavus NRRL3357]
  misc_feature (22)..(247): NCBI GI: 169777181 Blast Desc: [Aspergillus oryzae RIB40] gi|83771793|dbj|BAE61923.1| protein product [Aspergillus oryzae]
  misc_feature (29)..(247): NCBI GI: 238495680 Blast Desc: conserved [Aspergillus flavus NRRL3357] gi|220695726|gb|EED52069.1| conserved [Aspergillus flavus NRRL3357]
  misc_feature (29)..(247): NCBI GI: 169778369 Blast Desc: [Aspergillus oryzae RIB40] gi|83772387|dbj|BAE62517.1| protein product [Aspergillus oryzae]
  misc_feature (19)..(242): NCBI GI: 145233517 Blast Desc: An02g10030 [Aspergillus niger] gi|134057063|emb|CAK44351.1| protein product [Aspergillus niger]
MASTQTDTESEPVRYSNPSVSSNDVAHFSWEHPVPKTKFWNDLPYPLARNFLQACNAEDLAYIRPAAESDADKSRREKLMLLDRWVKKKLIQEEALAAPRSFYDADYAGWERLMLASVSISKELGDSVREEDTLRLLVDRRKDRSNLSHVHNLAGMLVEKGEYAEAERLERKVEPWLISKLGRGSPQALGAKRILILAVWKQGRSRHAEAEKLLKELQSDLSGLGDSQYAMYRDEELDAMKELMTKMD

SEQ ID NO: 11001 - DNA, 3587 bp, Muscodor strobelii
  misc_feature: SGI EST ID NO. CUFF.25990.0
  misc_feature: Variant of the nucleotide sequence at SEQ ID NO 10999
atgcggtgtcatcgctgtgtggctagacggaagttgccgcaagcgtgtcaggtgtcaatctactattttgttttgagatgcaaaagctaggaggaagtgactggactattggcatgaagggcaagacaaagcttcttggccatggcatgtgagaagtgcgacactggcgtactacagtgtcacataaccggagaaactgatataagtggtgaaaacccctaacacggccctaagtgtgtagatgagatgatcgcctggcaggctgtgtagactctttcactcttcggtagccaccctcaagcgtacgaagggagacttgcatgcctactcaatgacatgtgggtttgcagtcggcggatgaactcaagtccgagtaacaatgatctacactgacaatgcaggagaaggtagtattcattcctgtaatttggacatgtcctcagcttgctgcgcttcagttggtcgccttgtgcttcccaaatcctgccttgcgatgctacttcgttgtggcgcgacagctgcataacgacctgcgcctgacttcatcttgggggccagcgagcggccaactccggttgcgtatcaggcgaagtacaaatgcataatgacattaggcgcctcacagcgaccagagtacatgtattctatagtcttatgaattaatatagggctgagtccatgccaaagggcacttgcaaatacttgagcggtgaatgacctatgtcgagtactgacccttacagactactagtcgcaatttgtttctcttcaggaactttgggcgccaagacactttcatgctcaatcaatcctctcctgaactgcgatcaaagatcaatgagcggatcctcttcgatttccaccatatcggcgcacatcttcaagaacctgtttcgatattcgttgctctctgccgtgatgctcatgggaccctgctgatcgatgagattgtaggttttgacgagaccggtcatggtcttcgcatgcaaagtgtgcttcgcccagaagaaatccaagatagcagctctgtagatctccttcccatgacttgatcggacgccggtgcgccagctggggggatcggggggcgcaaatggcggttctgctggtgggattggtaccaaagtttctgcttggcctgagtgtcgtgattcagcatcagccgcatcggccgcggcgattcgtacgaggaacagagaataatcaacggcattgtagtccgccaagaacttggtgtctttctcgaggagttccttgaactgcgcagcgtctgcctttgtgagcttgatggtgtcattaaactcatcggcgagcctagatttggtagcctcggatgacagagcccctccggcaacatctctctcgggaaagaagtatgaagttggcttaaggtcccacgactcccattttccctgcgagtcctcctctgacacgctatcctggccatacatgatgttctccatgacgatgtgatggctgggcgccaagcccagaaactcgccgatgctcttgtgggatctcatgagaaggttggtgatgcggactagcaagctggccggattgctgtgcatgtgttcggcatacggaagcatcaactcattcttgaagaaatcgtgttcgaaatggcggggcacagacttgacgagatatgtgccgtcactcgtacggaagaaggtcgaaccactgtagcccatatctcccatgggctgcaagacatctctctgttggtgcttcttttttctgttgcgactgttgtccttgctatcgagggcaccgaagctgtttctatagtcctcctctttgatgcgccacgcgtcgcgcaactctctgaagacatccgcacgcaccaagctaaacaccagagaaaacaggcggaagaatttgatggcttgagacagcagtgatggtttctgcgcgggttctcccgtgggtaaagccgtcaggatcgaatagacgatggaacgcgcgatgaggacctcgcggcgcgtcatgatggcgagttgcgatggaacgctgcacaggagaagtcctcaaagacttgatgcagcagacgccgtcggtccatctgatgatgagttgatgaagcagtcagaacgggatcgaggggctgagtatcaggttgggtcaatgactggaagccaggcaggtactcatgcattgaaatcgggtaggaccagaagctccggaaggacacctctgacgtcatcagtcactacaacggatttccaacgcgacgagccctcatgggcatcccgtttcctgtgctcgacatggcactatgttatctctcttaatcacttgaaactaagaaatgtcatggctcaatcgctcactctacttcctcagcggtcatgtgatatcgtgttgatcgaagtactgtatgtgagatgcggtggaatgagttgaggatgattctgccatgcctcgctccttgccaagcttgcccagacatggccattcgagactcagtctcatctcatctaatcgtgcatgaaatacttgatgctgcatagtccatttcatgtagtctaaaatctaaacttcaattgatcaattcgagtcgttaagtacctacgtccatcatatcgacttgacattacctatctagtgttgccccagccgccatggcctccactcaaacagatacggagagtgaacccgtccgctattcaaatccatccgtgtcgtccaacgatgtcgcgcacttttcctgggagcacccggtacccaagaccaagttctggaacgacttgccctacccactcgcgcggaacttcctgcaggcctgcaatgctgaagatctagcttacatccggcccgcagccgagagtgacgccgacaagtcaagacgggagaaactcatgctcttggatcgctgggtgaagaagaagctcatccaagaagaagccctcgcggcgcctcgttctttctacgatgccgactacgcaggttgggagcggctgatgctggcctcggtctcgatatccaaggagctcggggattcggtgagggaggaagacacgctgcgcttgcttgtggatcggcgcaaagataggagtaatctgtcgcatgtacataacctcgccggcatgctcgtcgagaagggagagtacgcagaagctgagcggctggagcgcaaggtcgaaccttggctgatctcgaagttgggaagaggctcgccacaggcgctgggggcgaagaggattctgattcttgccgtgtggaaacaaggtcgatcccgacacgcggaagccgagaagctgttgaaagaactacagagtgatctgagcgggcttggagatagtcagtatgccatgtatcgagacgaggagttagacgcgatgaaggagttgatgaccaagatggactgagcgcaaagatgcatagacacaggatgaagcgagtcgacagtgatttatcatactgctatccttatctatgctaagtctctgctccgtatgcgcgagtggcttttatcggctctatgcgtaggtagttcgacctgagtctgctgagagagtctttaaaaaatacaagaatatctagtctagtatagatgccaaacggtacatgcgttacaataagcg

SEQ ID NO: 11002 - DNA, 1164 bp, Muscodor strobelii
  misc_feature: SGI cDNA ID NO. 563516
  misc_feature: Encodes the peptide sequence at SEQ ID NO 11003
atgacgcgccgcgaggtcctcatcgcgcgttccatcgtctattcgatcctgacggctttacccacgggagaacccgcgcagaaaccatcactgctgtctcaagccatcaaattcttccgcctgttttctctggtgtttagcttggtgcgtgcggatgtcttcagagagttgcgcgacgcgtggcgcatcaaagaggaggactatagaaacagcttcggtgccctcgatagcaaggacaacagtcgcaacagaaaaaagaagcaccaacagagagatgtcttgcagcccatgggagatatgggctacagtggttcgaccttcttccgtacgagtgacggcacatatctcgtcaagtctgtgccccgccatttcgaacacgatttcttcaagaatgagttgatgcttccgtatgccgaacacatgcacagcaatccggccagcttgctagtccgcatcaccaaccttctcatgagatcccacaagagcatcggcgagtttctgggcttggcgcccagccatcacatcgtcatggagaacatcatgtatggccaggatagcgtgtcagaggaggactcgcagggaaaatgggagtcgtgggaccttaagccaacttcatacttctttcccgagagagatgttgccggaggggctctgtcatccgaggctaccaaatctaggctcgccgatgagtttaatgacaccatcaagctcacaaaggcagacgctgcgcagttcaaggaactcctcgagaaagacaccaagttcttggcggactacaatgccgttgattattctctgttcctcgtacgaatcgccgcggccgatgcggctgatgctgaatcacgacactcaggccaagcagaaactttggtaccaatcccaccagcagaaccgccatttgcgccccccgatccccccagctggcgcaccggcgtccgatcaagtcatgggaaggagatctacagagctgctatcttggatttcttctgggcgaagcacactttgcatgcgaagaccatgaccggtctcgtcaaaacctacaatctcatcgatcagcagggtcccatgagcatcacggcagagagcaacgaatatcgaaacaggttcttgaagatgtgcgccgatatggtggaaatcgaagaggatccgctcattgatctttga

SEQ ID NO: 11003 - protein, 387 aa, Muscodor strobelii
  misc_feature: SGI Peptide ID NO. 563516
  misc_feature (4)..(382): NCBI GI: 171685506 Blast Desc: protein product [Podospora anserina] gi|170942714|emb|CAP68367.1| protein product [Podospora anserina]
  misc_feature (1)..(382): NCBI GI: 116208280 Blast Desc: CHGG_03433 [Chaetomium globosum CBS 148.51] gi|88184030|gb|EAQ91498.1| CHGG_03433 [Chaetomium globosum CBS 148.51]
  misc_feature (1)..(378): NCBI GI: 169608962 Blast Desc: SNOG_07566 [Phaeosphaeria nodorum SN15] gi|160701752|gb|EAT85032.2| SNOG_07566 [Phaeosphaeria nodorum SN15]
  misc_feature (1)..(379): NCBI GI: 67540394 Blast Desc: AN6367.2 [Aspergillus nidulans FGSC A4] gi|40739561|gb|EAA58751.1| AN6367.2 [Aspergillus nidulans FGSC A4] gi|259479414|tpe|CBF69613.1| TPA: conserved [Aspergillus FGSC
  misc_feature (3)..(381): NCBI GI: 169774335 Blast Desc: [Aspergillus oryzae RIB40] gi|238497147|ref|XP_002379809.1| conserved [Aspergillus flavus NRRL3357] gi|83769498|dbj|BAE59633.1| protein product oryzae]
  misc_feature (1)..(381): NCBI GI: 189199264 Blast Desc: conserved [Pyrenophora tritici-repentis Pt-1C-BFP] gi|187983068|gb|EDU48556.1| conserved [Pyrenophora tritici-repentis Pt-1C-BFP]
  misc_feature (1)..(379): NCBI GI: 261356529 Blast Desc: conserved [Verticillium albo-atrum VaMs.102]
  misc_feature (12)..(380): NCBI GI: 256726783 Blast Desc: NECHADRAFT_57898 [Nectria haematococca mpVI 77-13-4]
  misc_feature (3)..(381): NCBI GI: 121716276 Blast Desc: conserved [Aspergillus clavatus NRRL 1] gi|119403904|gb|EAW14321.1| conserved [Aspergillus clavatus NRRL 1]
  misc_feature (3)..(380): NCBI GI: 242783551 Blast Desc: conserved [Talaromyces stipitatus ATCC 10500] gi|218720356|gb|EED19775.1| conserved [Talaromyces stipitatus ATCC 10500]
MTRREVLIARSIVYSILTALPTGEPAQKPSLLSQAIKFFRLFSLVFSLVRADVFRELRDAWRIKEEDYRNSFGALDSKDNSRNRKKKHQQRDVLQPMGDMGYSGSTFFRTSDGTYLVKSVPRHFEHDFFKNELMLPYAEHMHSNPASLLVRITNLLMRSHKSIGEFLGLAPSHHIVMENIMYGQDSVSEEDSQGKWESWDLKPTSYFFPERDVAGGALSSEATKSRLADEFNDTIKLTKADAAQFKELLEKDTKFLADYNAVDYSLFLVRIAAADAADAESRHSGQAETLVPIPPAEPPFAPPDPPSWRTGVRSSHGKEIYRAAILDFFWAKHTLHAKTMTGLVKTYNLIDQQGPMSITAESNEYRNRFLKMCADMVEIEEDPLIDL

SEQ ID NO: 11004 - DNA, 3587 bp, Muscodor strobelii
  misc_feature: SGI EST ID NO. CUFF.25990.0
  misc_feature: Variant of the nucleotide sequence at SEQ ID NO 11002
cgcttattgtaacgcatgtaccgtttggcatctatactagactagatattcttgtattttttaaagactctctcagcagactcaggtcgaactacctacgcatagagccgataaaagccactcgcgcatacggagcagagacttagcatagataaggatagcagtatgataaatcactgtcgactcgcttcatcctgtgtctatgcatctttgcgctcagtccatcttggtcatcaactccttcatcgcgtctaactcctcgtctcgatacatggcatactgactatctccaagcccgctcagatcactctgtagttctttcaacagcttctcggcttccgcgtgtcgggatcgaccttgtttccacacggcaagaatcagaatcctcttcgcccccagcgcctgtggcgagcctcttcccaacttcgagatcagccaaggttcgaccttgcgctccagccgctcagcttctgcgtactctcccttctcgacgagcatgccggcgaggttatgtacatgcgacagattactcctatctttgcgccgatccacaagcaagcgcagcgtgtcttcctccctcaccgaatccccgagctccttggatatcgagaccgaggccagcatcagccgctcccaacctgcgtagtcggcatcgtagaaagaacgaggcgccgcgagggcttcttcttggatgagcttcttcttcacccagcgatccaagagcatgagtttctcccgtcttgacttgtcggcgtcactctcggctgcgggccggatgtaagctagatcttcagcattgcaggcctgcaggaagttccgcgcgagtgggtagggcaagtcgttccagaacttggtcttgggtaccgggtgctcccaggaaaagtgcgcgacatcgttggacgacacggatggatttgaatagcggacgggttcactctccgtatctgtttgagtggaggccatggcggctggggcaacactagataggtaatgtcaagtcgatatgatggacgtaggtacttaacgactcgaattgatcaattgaagtttagattttagactacatgaaatggactatgcagcatcaagtatttcatgcacgattagatgagatgagactgagtctcgaatggccatgtctgggcaagcttggcaaggagcgaggcatggcagaatcatcctcaactcattccaccgcatctcacatacagtacttcgatcaacacgatatcacatgaccgctgaggaagtagagtgagcgattgagccatgacatttcttagtttcaagtgattaagagagataacatagtgccatgtcgagcacaggaaacgggatgcccatgagggctcgtcgcgttggaaatccgttgtagtgactgatgacgtcagaggtgtccttccggagcttctggtcctacccgatttcaatgcatgagtacctgcctggcttccagtcattgacccaacctgatactcagcccctcgatcccgttctgactgcttcatcaactcatcatcagatggaccgacggcgtctgctgcatcaagtctttgaggacttctcctgtgcagcgttccatcgcaactcgccatcatgacgcgccgcgaggtcctcatcgcgcgttccatcgtctattcgatcctgacggctttacccacgggagaacccgcgcagaaaccatcactgctgtctcaagccatcaaattcttccgcctgttttctctggtgtttagcttggtgcgtgcggatgtcttcagagagttgcgcgacgcgtggcgcatcaaagaggaggactatagaaacagcttcggtgccctcgatagcaaggacaacagtcgcaacagaaaaaagaagcaccaacagagagatgtcttgcagcccatgggagatatgggctacagtggttcgaccttcttccgtacgagtgacggcacatatctcgtcaagtctgtgccccgccatttcgaacacgatttcttcaagaatgagttgatgcttccgtatgccgaacacatgcacagcaatccggccagcttgctagtccgcatcaccaaccttctcatgagatcccacaagagcatcggcgagtttctgggcttggcgcccagccatcacatcgtcatggagaacatcatgtatggccaggatagcgtgtcagaggaggactcgcagggaaaatgggagtcgtgggaccttaagccaacttcatacttctttcccgagagagatgttgccggaggggctctgtcatccgaggctaccaaatctaggctcgccgatgagtttaatgacaccatcaagctcacaaaggcagacgctgcgcagttcaaggaactcctcgagaaagacaccaagttcttggcggactacaatgccgttgattattctctgttcctcgtacgaatcgccgcggccgatgcggctgatgctgaatcacgacactcaggccaagcagaaactttggtaccaatcccaccagcagaaccgccatttgcgccccccgatccccccagctggcgcaccggcgtccgatcaagtcatgggaaggagatctacagagctgctatcttggatttcttctgggcgaagcacactttgcatgcgaagaccatgaccggtctcgtcaaaacctacaatctcatcgatcagcagggtcccatgagcatcacggcagagagcaacgaatatcgaaacaggttcttgaagatgtgcgccgatatggtggaaatcgaagaggatccgctcattgatctttgatcgcagttcaggagaggattgattgagcatgaaagtgtcttggcgcccaaagttcctgaagagaaacaaattgcgactagtagtctgtaagggtcagtactcgacataggtcattcaccgctcaagtatttgcaagtgccctttggcatggactcagccctatattaattcataagactatagaatacatgtactctggtcgctgtgaggcgcctaatgtcattatgcatttgtacttcgcctgatacgcaaccggagttggccgctcgctggcccccaagatgaagtcaggcgcaggtcgttatgcagctgtcgcgccacaacgaagtagcatcgcaaggcaggatttgggaagcacaaggcgaccaactgaagcgcagcaagctgaggacatgtccaaattacaggaatgaatactaccttctcctgcattgtcagtgtagatcattgttactcggacttgagttcatccgccgactgcaaacccacatgtcattgagtaggcatgcaagtctcccttcgtacgcttgagggtggctaccgaagagtgaaagagtctacacagcctgccaggcgatcatctcatctacacacttagggccgtgttaggggttttcaccacttatatcagtttctccggttatgtgacactgtagtacgccagtgtcgcacttctcacatgccatggccaagaagctttgtcttgcccttcatgccaatagtccagtcacttcctcctagcttttgcatctcaaaacaaaatagtagattgacacctgacacgcttgcggcaacttccgtctagccacacagcgatgacaccgcat

SEQ ID NO: 11005 - DNA, 1545 bp, Muscodor strobelii
  misc_feature: SGI cDNA ID NO. 563517
  misc_feature: Elevated expression when VOC is produced
  misc_feature: Encodes the peptide sequence at SEQ ID NO 11006
atgctggtgcaatcacgatcaggcggcgtgaccgctcgttggagacagctgtccaagttgggcaagtttactgttttgaccacttttgtcttcttcattctcggtaagcaagttcaaatcaatcccatcctcgtttgtgccatcttatggggaaccggtactgtcgacgtcgactacgttcgcaatagactcagtcccattgcacatgatgatccgagtaacgagcccattcctcaagaggataacgataccccaatcatcgatggtgtgcccaacgataagaacgacaagccgttacctgatggcatcatcgaggatcccgaccggcctatcggcgatgctgttgtagatgaggtcgttaaaacacccgtcagcacggatatcacgactccgaagcctgaccttgcgacgagtagtcgtgtgatcccagtgacaacgcattcggagccggcatctaccagttccaccgtctttgaacctacaacatcatccatcaaacccgtagctagcggcaaatctatcgttgatggcttcagaacaattgtcgtggaaacaccattcattcaaataccatcagccaaaacaaccgccaaagccaacccaacacataatgatgcactgaaagtttcgtcagcaacgtcagacgctgcttcaacacccacagcctcgtcgcatcagaagccgatagctggtgggattccactgcgcatcatgttcatgggagcatccgtaacgctcggcactcctccgcaatcggcatatcgccaacagctacgagaatggcttgtgggcttgggcaaccacgtaaacctggttggctcggcccgttttggcaagttcaaagacaacgatgtacaagcctttgccgcgaccccgatcaagcctctccacgagaagtcgctgaaggtcgttccggagatgaagcccaacctagtcatcatcaacgccggctcgagcgactgctttcaggaaaagaatttcggttccgcccacggtctcgacgacacgcgcgcccttgtagatttcgtcttcgaatccgtccccgacacgactgtaattctttcgacgctcgtgatgagtacggatcctaaatacgagcgctgtatcaaaagcgtcaatgcccagatccgacaagtagctgtcgatctccagcgcgatggtaaacatcttgtgctgaatgaacagcactatgatcagggattacccggtcgcgtaactgcggaaaatttgtcaccagacaagatgcacccaacatacgaagggtgggtgatgatgggcgagcttttcaaggagagcatcctcgaggtcgatgccaagggctggctcaaggctcccgctgccaatggcatcatggatgacggcgatgctgaacgagatgtcgaagaagcgtgggaaaagatgcaggaggagaagaagaagattgaagaagccaaggcgaagcatgaaagtcggggagtcaaggtagcgccgccccaacccgagggtctagcggctaaattcggccgcgctgctgctcgagattttcgcagacatcaggcgctgtga

SEQ ID NO: 11006 - protein, 514 aa, Muscodor strobelii
  misc_feature: SGI Peptide ID NO. 563517
  misc_feature (202)..(454): NCBI GI: 171691426 Blast Desc: protein product [Podospora anserina] gi|170945661|emb|CAP71774.1| protein product [Podospora anserina]
  misc_feature (229)..(454): NCBI GI: 85082538 Blast Desc: NCU04526 [Neurospora crassa OR74A] gi|28918018|gb|EAA27701.1| [Neurospora crassa OR74A]
  misc_feature (200)..(445): NCBI GI: 116195422 Blast Desc: CHGG_04309 [Chaetomium globosum CBS 148.51] gi|88180222|gb|EAQ87690.1| CHGG_04309 [Chaetomium globosum CBS 148.51]
  misc_feature (211)..(445): NCBI GI: 261357824 Blast Desc: conserved [Verticillium albo-atrum VaMs.102]
  misc_feature (231)..(463): NCBI GI: 116203151 Blast Desc: CHGG_09460 [Chaetomium globosum CBS 148.51] gi|88177978|gb|EAQ85446.1| CHGG_09460 [Chaetomium globosum CBS 148.51]
  misc_feature (230)..(446): NCBI GI: 116203537 Blast Desc: CHGG_09652 [Chaetomium globosum CBS 148.51] gi|88175780|gb|EAQ83248.1| CHGG_09652 [Chaetomium globosum CBS 148.51]
  misc_feature (235)..(465): NCBI GI: 169608464 Blast Desc: SNOG_07310 [Phaeosphaeria nodorum SN15] gi|160701648|gb|EAT84776.2| SNOG_07310 [Phaeosphaeria nodorum SN15]
  misc_feature (230)..(443): NCBI GI: 238482081 Blast Desc: conserved [Aspergillus flavus NRRL3357] gi|220700329|gb|EED56667.1| conserved [Aspergillus flavus NRRL3357]
  misc_feature (219)..(445): NCBI GI: 169778429 Blast Desc: [Aspergillus oryzae RIB40] gi|83772417|dbj|BAE62547.1| protein product [Aspergillus oryzae]
  misc_feature (219)..(445): NCBI GI: 238495752 Blast Desc: esterase, [Aspergillus flavus NRRL3357] gi|220695762|gb|EED52105.1| esterase, [Aspergillus flavus NRRL3357]
  misc_feature: Useful for introducing or modulating the production of volatile compounds
MLVQSRSGGVTARWRQLSKLGKFTVLTTFVFFILGKQVQINPILVCAILWGTGTVDVDYVRNRLSPIAHDDPSNEPIPQEDNDTPIIDGVPNDKNDKPLPDGIIEDPDRPIGDAVVDEVVKTPVSTDITTPKPDLATSSRVIPVTTHSEPASTSSTVFEPTTSSIKPVASGKSIVDGFRTIVVETPFIQIPSAKTTAKANPTHNDALKVSSATSDAASTPTASSHQKPIAGGIPLRIMFMGASVTLGTPPQSAYRQQLREWLVGLGNHVNLVGSARFGKFKDNDVQAFAATPIKPLHEKSLKVVPEMKPNLVIINAGSSDCFQEKNFGSAHGLDDTRALVDFVFESVPDTTVILSTLVMSTDPKYERCIKSVNAQIRQVAVDLQRDGKHLVLNEQHYDQGLPGRVTAENLSPDKMHPTYEGWVMMGELFKESILEVDAKGWLKAPAANGIMDDGDAERDVEEAWEKMQEEKKKIEEAKAKHESRGVKVAPPQPEGLAAKFGRAAARDFRRHQAL

SEQ ID NO: 11007 - DNA, 4285 bp, Muscodor strobelii
  misc_feature: SGI EST ID NO. CUFF.26193.2
  misc_feature: Variant of the nucleotide sequence at SEQ ID NO 11005
tcaaacgcacgcgtcgggcatccgggcagagacaatgtccttcctgccctacccgatccaatctggacgagacgtgatggtacttgggtaaactgttcgcgaataagttgatctggggacccagagatttaaagctagttttgggagactgcaattacgatcacacaataatcaaattcaaacattcatcgttgcctcccaaaagtcttgtaccatgactgccctcaacaccctcggaggggttgcaattgctatcactgcaatgatagttgcgctccttattagacgacaatattttcatcctttgggtaagatacccggcccatggtacaccaattggagcagcgttgtctatttggtacaaactctcagaggccttggtcctatccatgtagacaacctacacaagaaatacggccatatcgtacgagtgggtcccaatctcgtggatgtcattgatattgaaacggtgaagaagattcatcgtgtcaaggccgactttacgaaatcagactattataagggcatggcacttggagcagagaatttgttcaccactcaggatttgcaattccaccgccggcataggaagttgctttcggcacccttgtcagaaagcaacttgagggcacttcagccacagatcgaagaccgaataaaacttgcaatacagaaaatgggcgatgaaatgaaaaataggaaagcggtagacgtgcataaatggtggatgttcatgacgacagatgtaattggtcagctgacatttggggagtcgtttcatatgcttgaaagtggccaggtgaacagatatatcgaagatcttcagtcggccggcatcgttggcagtatcgggagccagttgggctctgatattatgcttagtattccactacctttcgtcggatcgttcaagtcgatgcagaagcgaatgcagcaatatgcagcaacccaactacaacgactgagagatgaacttcaaggcgaagccaagggaaaacaagctctgttgcttagcagactagtccaggggcaaaccgtagatggcgagtcgttgacggatgttgaattacgaaacggtaagtcttgttcaaacatatattgattgatgtttgtaaaacgttcgcctcataatgtatccgatcaccctactcagcaattcaactatgcctaggcgtttgcaattcgtttactgatgcctcgtcctctcaactttagatgctgaattgtacattgttgccggaagcgagtaagtaccacctctaggttctcttgtcttagtctgtacggcgcacgaagtgctcttttgattccagtggcccaaatcctgtctcccattgctggccaggactcgttgactaatggatgtatcagtactacatctaactcattgacctacattacatgggcagtttgcaagcagcctgagctgcgagatcggttagcgaaggaagtccagagcctcccggaggcattttcagacgacgacctgaaacatctgccgttcttaaacgagtgtatcactgaaggcttgcgtcggttcccggtggttcctgcgggacttcagcgctcagtgccccaagaggggtcttcaattggaggccactggctacctgggggagctactgttatgactcagaattggagtttgcacagaaacccggacattttcccagaccctgacacattcaatccttcgcgatgggagaagccgacaaaattgatgaaagactcgatgctggctttcggcggcggctcgagagtctgcattgggatgcatcttgcttatattgaacttcgaatgggattagcacacttctttcgcacctttccccattctagcgtatctactagagagggtatgagcgacgatgatatgacacaagctttgcatttcatctctagtcctcagcaccatcggtgtttaattgatgcggcgtaaataccttgtaggccgaggatctggagcagtgtctatctcgacagatggatagatcggggttataatagtaatggcgttctcaagtttttacttcgtcacgaaaaccttgatgatgagggcaattggtttgccagatacaattgttggacgtgtatgagtagtatatccaatagtggcgcaacctgactactcatagggctcaagtaacagtcgcttgcaatatactcatcgcggctgtgttggtgtatctatgcttgtctcaaacaatgctgtaataggcaggacatgttccaccttatcgagcctatctaggtatgtgcagaagcagatggtgatcaagacgatgacggcaggtctgtgacagtgaaccctttgaacccttttaatgagcactgatggccggggatccccagtcagttctaatgttgatagacccggccacgcggcgtgagggatgccaagagtgatgccaagaaggataccattgaggatttgggatgactcgctccttggcatcatgctcccctcatacgaaagatgtcagcccccctgaacttcaattaagaatccagaatgaccttatttgggtttttctcatctgcaactatgttcacgtagtggcacacacacgaaaatgctggtgcaatcacgatcaggcggcgtgaccgctcgttggagacagctgtccaagttgggcaagtttactgttttgaccacttttgtcttcttcattctcgccatcttatggggaaccggtactgtcgacgtcgactacgttcgcaatagactcagtcccattgcacatgatgatccgagtaacgagcccattcctcaagaggataacgataccccaatcatcgatggtgtgcccaacgataagaacgacaagccgttacctgatggcatcatcgaggatcccgaccggcctatcggcgatgctgttgtagatgaggtcgttaaaacacccgtcagcacggatatcacgactccgaagcctgaccttgcgacgagtagtcgtgtgatcccagtgacaacgcattcggagccggcatctaccagttccaccgtctttgaacctacaacatcatccatcaaacccgtagctagcggcaaatctatcgttgatggcttcagaacaattgtcgtggaaacaccattcattcaaataccatcagccaaaacaaccgccaaagccaacccaacacataatgatgcactgaaagtttcgtcagcaacgtcagacgctgcttcaacacccacagcctcgtcgcatcagaagccgatagctggtgggattccactgcgcatcatgttcatgggagcatccgtaacgctcggcactcctccgcaatcggcatatcgccaacagctacgagaatggcttgtgggcttgggcaaccacgtaaacctggttggctcggcccgttttggcaagttcaaagacaacgatgtacaagcctttgccgcgaccccgatcaagcctctccacgagaagtcgctgaaggtcgttccggagatgaagcccaacctagtcatcatcaacgccggctcgagcgactgctttcaggaaaagaatttcggttccgcccacggtctcgacgacacgcgcgcccttgtagatttcgtcttcgaatccgtccccgacacgactgtaattctttcgacgctcgtgatgagtacggatcctaaatacgagcgctgtatcaaaagcgtcaatgcccagatccgacaagtagctgtcgatctccagcgcgatggtaaacatcttgtgctgaatgaacagcactatgatcagggattacccggtcgcgtaactgcggaaaatttgtcaccagacaagatgcacccaacatacgaagggtgggtgatgatgggcgagcttttcaaggagagcatcctcgaggtcgatgccaagggctggctcaaggctcccgctgccaatggcatcatggatgacggcgatgctgaacgagatgtcgaagaagcgtgggaaaagatgcaggaggagaagaagaagattgaagaagccaaggcgaagcatgaaagtcggggagtcaaggtagcgccgccccaacccgagggtctagcggctaaattcggccgcgctgctgctcgagattttcgcagacatcaggcgctgtgagtgggcgggagaatgataccctcgattttctgtttatacaattatataaaggtttcatctgttctagaaagcgttagttgcatcggctatcacggactgggaagttaccctgatcccaggcaccaggctcgggttgttttttatcgatctgtacaatatctcggctcatgtagattcaattcacgtcatgcttgaaaggaaaa

SEQ ID NO: 11008 - DNA, 1461 bp, Muscodor strobelii
  misc_feature: SGI cDNA ID NO. 563518
  misc_feature: Encodes the peptide sequence at SEQ ID NO 11009
atgactgccctcaacaccctcggaggggttgcaattgctatcactgcaatgatagttgcgctccttattagacgacaatattttcatcctttgggtaagatacccggcccatggtacaccaattggagcagcgttgtctatttggtacaaactctcagaggccttggtcctatccatgtagacaacctacacaagaaatacggccatatcgtacgagtgggtcccaatctcgtggatgtcattgatattgaaacggtgaagaagattcatcgtgtcaaggccgactttacgaaatcagactattataagggcatggcacttggagcagagaatttgttcaccactcaggatttgcaattccaccgccggcataggaagttgctttcggcacccttgtcagaaagcaacttgagggcacttcagccacagatcgaagaccgaataaaacttgcaatacagaaaatgggcgatgaaatgaaaaataggaaagcggtagacgtgcataaatggtggatgttcatgacgacagatgtaattggtcagctgacatttggggagtcgtttcatatgcttgaaagtggccaggtgaacagatatatcgaagatcttcagtcggccggcatcgttggcagtatcgggagccagttgggctctgatattatgcttagtattccactacctttcgtcggatcgttcaagtcgatgcagaagcgaatgcagcaatatgcagcaacccaactacaacgactgagagatgaacttcaaggcgaagccaagggaaaacaagctctgttgcttagcagactagtccaggggcaaaccgtagatggcgagtcgttgacggatgttgaattacgaaacgatgctgaattgtacattgttgccggaagcgatactacatctaactcattgacctacattacatgggcagtttgcaagcagcctgagctgcgagatcggttagcgaaggaagtccagagcctcccggaggcattttcagacgacgacctgaaacatctgccgttcttaaacgagtgtatcactgaaggcttgcgtcggttcccggtggttcctgcgggacttcagcgctcagtgccccaagaggggtcttcaattggaggccactggctacctgggggagctactgttatgactcagaattggagtttgcacagaaacccggacattttcccagaccctgacacattcaatccttcgcgatgggagaagccgacaaaattgatgaaagactcgatgctggctttcggcggcggctcgagagtctgcattgggatgcatcttgcttatattgaacttcgaatgggattagcacacttctttcgcacctttccccattctagcgtatctactagagagggtatgagcgacgatgatatgacacaagctttgcatttcatctctagtcctcagcaccatcggtgtttaattgatgcggcgtaa

SEQ ID NO: 11009 - protein, 486 aa, Muscodor strobelii
  misc_feature: SGI Peptide ID NO. 563518
  misc_feature (35)..(480): Pfam Id: PF00067 Pfam Desc: Cytochrome P450
  misc_feature (35)..(450): Pfam Id: PF00067 Pfam Desc: Cytochrome P450
  misc_feature (23)..(484): NCBI GI: 145249294 Blast Desc: An14g03610 [Aspergillus niger] gi|134081664|emb|CAK46598.1| protein product [Aspergillus niger]
  misc_feature (10)..(484): NCBI GI: 169777991 Blast Desc: [Aspergillus oryzae RIB40] gi|83772198|dbj|BAE62328.1| protein product [Aspergillus oryzae]
  misc_feature (10)..(484): NCBI GI: 238495244 Blast Desc: cytochrome P450, [Aspergillus flavus NRRL3357] gi|220695508|gb|EED51851.1| cytochrome P450, [Aspergillus flavus NRRL3357]
  misc_feature (29)..(485): NCBI GI: 259489566 Blast Desc: TPA: cytochrome P450, (Eurofung) [Aspergillus nidulans FGSC A4]
  misc_feature (30)..(485): NCBI GI: 255941390 Blast Desc: Pc16g11620 [Penicillium chrysogenum Wisconsin 54-1255] gi|211586087|emb|CAP93832.1| Pc16g11620 [Penicillium chrysogenum Wisconsin 54-1255]
  misc_feature (12)..(485): NCBI GI: 242806422 Blast Desc: cytochrome P450, [Talaromyces stipitatus ATCC 10500] gi|218715365|gb|EED14787.1| cytochrome P450, [Talaromyces stipitatus ATCC 10500]
  misc_feature (12)..(484): NCBI GI: 212538573 Blast Desc: benzoate 4-monooxygenase cytochrome P450, [Penicillium marneffei ATCC 18224] gi|210069184|gb|EEA23275.1| benzoate 4-monooxygenase cytochrome P450, [Penicillium marneffei ATCC
  misc_feature (36)..(485): NCBI GI: 256729978 Blast Desc: NECHADRAFT_45084 [Nectria haematococca mpVI 77-13-4]
  misc_feature (7)..(485): NCBI GI: 212539207 Blast Desc: benzoate 4-monooxygenase cytochrome P450, [Penicillium marneffei ATCC 18224] gi|210069501|gb|EEA23592.1| benzoate 4-monooxygenase cytochrome P450, [Penicillium marneffei ATCC
  misc_feature (12)..(484): NCBI GI: 255941466 Blast Desc: Pc16g12030 [Penicillium chrysogenum Wisconsin 54-1255] gi|211586125|emb|CAP93873.1| Pc16g12030 [Penicillium chrysogenum Wisconsin 54-1255]
  misc_feature (31)..(461): SWISSPROT Homolog: EC 1.14.13.12 Benzoate 4-monooxygenase
MTALNTLGGVAIAITAMIVALLIRRQYFHPLGKIPGPWYTNWSSVVYLVQTLRGLGPIHVDNLHKKYGHIVRVGPNLVDVIDIETVKKIHRVKADFTKSDYYKGMALGAENLFTTQDLQFHRRHRKLLSAPLSESNLRALQPQIEDRIKLAIQKMGDEMKNRKAVDVHKWWMFMTTDVIGQLTFGESFHMLESGQVNRYIEDLQSAGIVGSIGSQLGSDIMLSIPLPFVGSFKSMQKRMQQYAATQLQRLRDELQGEAKGKQALLLSRLVQGQTVDGESLTDVELRNDAELYIVAGSDTTSNSLTYITWAVCKQPELRDRLAKEVQSLPEAFSDDDLKHLPFLNECITEGLRRFPVVPAGLQRSVPQEGSSIGGHWLPGGATVMTQNWSLHRNPDIFPDPDTFNPSRWEKPTKLMKDSMLAFGGGSRVCIGMHLAYIELRMGLAHFFRTFPHSSVSTREGMSDDDMTQALHFISSPQHHRCLIDAA

SEQ ID NO: 11010 - DNA, 4285 bp, Muscodor strobelii; identical to SEQ ID NO: 11007
  misc_feature: SGI EST ID NO. CUFF.26193.2
  misc_feature: Variant of the nucleotide sequence at SEQ ID NO 11008

SEQ ID NO: 11011 - DNA, 606 bp, Muscodor strobelii
  misc_feature: SGI cDNA ID NO. 563519
  misc_feature: Encodes the peptide sequence at SEQ ID NO 11012
atgcatatcactacgttgctacctattcttcttggcactgccatggccgctccgtatgaactcatctccaagcgtgctttgaaggaccacgaatggactcgaaacaaggttactggatgccctggttatctacagaagggccagtatgagttcccacactatatcactcaaatttcgaagaagcaaccgaataaggcattcgggccacgatataacggagtattcacaccaaacgatatctctactattttcagcttcgacgttccagcctcccgagccgacgctaattgcactctggagtttctcttcccccgcaagaaccaactacggacatcttctttccattacaagggcgccggtacattctttttcacaggatataatcccggaagctgcccgggaccaaagacgacatacaacaaccagcctgcgcctggcccattcccagcattcccaccaattcatatggagccgggtttcgcgtacacgattgatgtcggtccttgctttgtcggagctggaagctgcgtggcaggaggtgagaatttcctagaatttcgattacaatcaatttggttgacgctttgcagtgacttcgaccaatga

SEQ ID NO: 11012 - protein, 201 aa, Muscodor strobelii
  misc_feature: SGI Peptide ID NO. 563519
  misc_feature (40)..(143): NCBI GI: 259487009 Blast Desc: TPA: GPI anchored cell wall protein, (AFU_orthologue; AFUA_4G08960) [Aspergillus nidulans FGSC A4]
  misc_feature (40)..(143): NCBI GI: 67522427 Blast Desc: AN1670.2 [Aspergillus nidulans FGSC A4] gi|40745634|gb|EAA64790.1| AN1670.2 [Aspergillus nidulans FGSC A4]
  misc_feature (3)..(144): NCBI GI: 238491366 Blast Desc: GPI anchored cell wall protein, [Aspergillus flavus NRRL3357] gi|220697333|gb|EED53674.1| GPI anchored cell wall protein, [Aspergillus flavus NRRL3357]
  misc_feature (3)..(144): NCBI GI: 169773383 Blast Desc: [Aspergillus oryzae RIB40] gi|83769021|dbj|BAE59158.1| protein product [Aspergillus oryzae] gi|195972739|dbj|BAG68492.1| aos3 [Aspergillus oryzae]
  misc_feature (33)..(172): NCBI GI: 145257471 Blast Desc: An04g03830 [Aspergillus niger] gi|134058663|emb|CAK38647.1| protein product [Aspergillus niger]
  misc_feature (33)..(172): NCBI GI: 119500740 Blast Desc: NFIA_107210 [Neosartorya fischeri NRRL 181] gi|119415292|gb|EAW25230.1| NFIA_107210 [Neosartorya fischeri NRRL 181]
  misc_feature (44)..(172): NCBI GI: 238482305 Blast Desc: conserved [Aspergillus flavus NRRL3357] gi|220700441|gb|EED56779.1| conserved [Aspergillus flavus NRRL3357]
  misc_feature (44)..(172): NCBI GI: 169765718 Blast Desc: [Aspergillus oryzae RIB40] gi|83765185|dbj|BAE55328.1| protein product [Aspergillus oryzae]
  misc_feature (33)..(172): NCBI GI: 70994164 Blast Desc: GPI anchored cell wall protein [Aspergillus fumigatus Af293] gi|66849563|gb|EAL89891.1| GPI anchored cell wall protein, [Aspergillus fumigatus Af293]
  misc_feature (33)..(172): NCBI GI: 159125156 Blast Desc: GPI anchored cell wall protein, [Aspergillus fumigatus A1163]
MHITTLLPILLGTAMAAPYELISKRALKDHEWTRNKVTGCPGYLQKGQYEFPHYITQISKKQPNKAFGPRYNGVFTPNDISTIFSFDVPASRADANCTLEFLFPRKNQLRTSSFHYKGAGTFFFTGYNPGSCPGPKTTYNNQPAPGPFPAFPPIHMEPGFAYTIDVGPCFVGAGSCVAGGENFLEFRLQSIWLTLCSDFDQ

SEQ ID NO: 11013 - DNA, 557 bp, Muscodor strobelii
  misc_feature: SGI EST ID NO. CUFF.25996.0
  misc_feature: Variant of the nucleotide sequence at SEQ ID NO 11011
ttatctacagaagggccagtatgagttcccacactatatcactcaaatttcgaagaagcaaccgaataaggcattcgggccacgatataacggagtattcacaccaaacgatatctctactattttcagcttcgacgttccagcctcccgagccgacgctaattgcactctggagtttctcttcccccgcaagaaccaactacggacatcttctttccattacaagggcgccggtacattctttttcacaggatataatcccggaagctgcccgggaccaaagacgacatacaacaaccagcctgcgcctggcccattcccagcattcccaccaattcatatggagccgggtttcgcgtacacgattgatgtcggtccttgctttgtcggagctggaagctgcgtggcaggaggtgagaatttcctagaatttcgattacaatcaatttggttgacgctttgcagtgacttcgaccaatgatacaaatttctcgttcttccaggaccgtgacgaatgtcctattgggatctacacaacctatagctacggtctaccg

SEQ ID NO: 11014 - DNA, 711 bp, Muscodor strobelii
  misc_feature: SGI cDNA ID NO. 563520
  misc_feature: Encodes the peptide sequence at SEQ ID NO 11015
atgaagtcgagtctcgctatcgccgccacggcgcccctcgctctagcgcagaccctctgcggccagtacgacaacgcccagaacaacggatacattgttaataacaatgcatggggccagggatctggaagtggtagcgaatgcacatacattgacagctaccctacttccggtgtcgcgtggcatgcggattggaactggtctggcggagacaacgaagtcaagggctaccccaattcgggcgttgtgatctcggacaagaagcttgtcagcaatattggtagcatccctactaaagctcagtggaattactcaggcgacaaccttcgcgctgatgtggcgtacgacatcttcacggcttcagacccgaaccacaatacatacagcggagaatatgagcttatgatttggctcaccgcaaagggtggcgtccaacccatcggtagctccactggcaccgtaaccgtcgacggccggaatttcgacctgtggtacggttataacggccctatgcaagtatatagtttcgtagccacgagcgaaacaaccgactttgagtccgacgtcaagcccttcttcgatcaccttacaaacaataagggttttccagcttcgtcccaatacctactcactgtgcaatttggcactgaacccttcacgggacagaatgcggccttcgatgtctactactggtacgcccagatcaactag

SEQ ID NO: 11015 - protein, 236 aa, Muscodor strobelii
  misc_feature: SGI Peptide ID NO. 563520
  misc_feature (83)..(236): Pfam Id: PF01670 Pfam Desc: Glycosyl hydrolase family 12
  misc_feature (1)..(236): NCBI GI: 46139045 Blast Desc: FG11037.1 [Gibberella zeae PH-1]
  misc_feature (1)..(235): NCBI GI: 21842112 Blast Desc: AF435066_1 endoglucanase [Bionectria ochroleuca]
  misc_feature (4)..(236): NCBI GI: 115353987 Blast Desc: endoglucanase [Stachybotrys chartarum]
  misc_feature (1)..(236): NCBI GI: 21842115 Blast Desc: AF435067_1 endoglucanase [Stachybotrys echinata]
  misc_feature (1)..(235): NCBI GI: 21842094 Blast Desc: AF434182_1 endoglucanase [Fusarium equiseti]
  misc_feature (1)..(236): NCBI GI: 70986814 Blast Desc: endoglucanase [Aspergillus fumigatus Af293] gi|66846525|gb|EAL86857.1| endoglucanase, [Aspergillus fumigatus Af293] gi|159123336|gb|EDP48456.1| endoglucanase, [Aspergillus
  misc_feature (3)..(235): NCBI GI: 255940346 Blast Desc: Pc16g06060 [Penicillium chrysogenum Wisconsin 54-1255] gi|211585565|emb|CAP93276.1| Pc16g06060 [Penicillium chrysogenum Wisconsin 54-1255]
  misc_feature (1)..(236): NCBI GI: 119483070 Blast Desc: endoglucanase, [Neosartorya fischeri NRRL 181] gi|119409718|gb|EAW19666.1| endoglucanase, [Neosartorya fischeri NRRL 181]
  misc_feature (4)..(235): NCBI GI: 115443418 Blast Desc: endoglucanase I precursor [Aspergillus terreus NIH2624] gi|114188385|gb|EAU30085.1| endoglucanase I precursor [Aspergillus terreus NIH2624]
  misc_feature (5)..(236): NCBI GI: 21842109 Blast Desc: AF435065_1 endoglucanase [Bionectria ochroleuca]
  misc_feature (20)..(235): SWISSPROT Homolog: EC 3.2.1.4 Cellulase
MKSSLAIAATAPLALAQTLCGQYDNAQNNGYIVNNNAWGQGSGSGSECTYIDSYPTSGVAWHADWNWSGGDNEVKGYPNSGVVISDKKLVSNIGSIPTKAQWNYSGDNLRADVAYDIFTASDPNHNTYSGEYELMIWLTAKGGVQPIGSSTGTVTVDGRNFDLWYGYNGPMQVYSFVATSETTDFESDVKPFFDHLTNNKGFPASSQYLLTVQFGTEPFTGQNAAFDVYYWYAQIN

SEQ ID NO: 11016 - DNA, 1109 bp, Muscodor strobelii
  misc_feature: SGI EST ID NO. CUFF.26002.0
  misc_feature: Variant of the nucleotide sequence at SEQ ID NO 11014
ggaacaggtagcatttgaccagtcaaggaatagttggatcctagatcctgatgcgtagtatgacaagaatactgccttaggaagctgcaagaatagtcaatgtttcagcattgcgaccgaggcaaatttgtccccgtatcgaggtctgttatgtgatactatataaagagctcgaagtttccgttaaagtcgtaaaacatcgaagacgttactatcaagcacaatttccgtctccagtgccgccgtcaatatgaagtcgagtctcgctatcgccgccacggcgcccctcgctctagcgcagaccctctgcggccagtacgacaacgcccagaacaacggatacattgttaataacaatgcatggggccagggatctggaagtggtagcgaatgcacatacattgacagctaccctacttccggtgtcgcgtggcatgcggattggaactggtctggcggagacaacgaagtcaagggctaccccaattcgggcgttgtgatctcggacaagaagcttgtcagcaatattggtagcatccctactaaagctcagtggaattactcaggcgacaaccttcgcgctgatgtggcgtacgacatcttcacggcttcagacccgaaccacaatacatacagcggagaatatgagcttatgatttggctcaccgcaaagggtggcgtccaacccatcggtagctccactggcaccgtaaccgtcgacggccggaatttcgacctgtggtacggttataacggccctatgcaagtatatagtttcgtagccacgagcgaaacaaccgactttgagtccgacgtcaagcccttcttcgatcaccttacaaacaataagggttttccagcttcgtcccaatacctactcactgtgcaatttggcactgaacccttcacgggacagaatgcggccttcgatgtctactactggtacgcccagatcaactagaatgtcgctgaaaatggccgagactgttactgcaacaaccgatacaaaatatttcatgtaaatattaagctatagcacggagcaaataaacaatgatcttgaagctttctacgaaacatgctgtgacccaactttagtttgttttatc

SEQ ID NO: 11017 - DNA, 420 bp, Muscodor strobelii
  misc_feature: SGI cDNA ID NO. 563521
  misc_feature: Encodes the peptide sequence at SEQ ID NO 11018
atgtgcgacgagaacggagagctcattggagaatcagtagccgaggacgagccaccagtttcggacgagattggtgatggcccagaatttatgctttgggagaggccggaggaagcggtcgaagaggtgctcgatactgatgttgagctggatgtagcaaaatcgctaagctctagtgatgatgatagcttactatcaacagcggattcagatgttgatgtcgggacctgcggagaatctgatgatgataaagcactttttgtgacaggcgctattgaagaatacgtcgatgatgtagtgcttgttggctcaaatgaggttgttgactgggacaaggttactggactcgatgaggtcgtcgaagtagaagttgttgatccactattgtccaagacagcttcttccaaagaccagtgctga

SEQ ID NO: 11018 - protein, 139 aa, Muscodor strobelii
  misc_feature: SGI Peptide ID NO. 563521
MCDENGELIGESVAEDEPPVSDEIGDGPEFMLWERPEEAVEEVLDTDVELDVAKSLSSSDDDSLLSTADSDVDVGTCGESDDDKALFVTGAIEEYVDDVVLVGSNEVVDWDKVTGLDEVVEVEVVDPLLSKTASSKDQC

SEQ ID NO: 11019 - DNA, 294 bp, Muscodor strobelii
  misc_feature: SGI EST ID NO. CUFF.26011.0
  misc_feature: Variant of the nucleotide sequence at SEQ ID NO 11017
aagcggtcgaagaggtgctcgatactgatgttgagctggatgtagcaaaatcgctaagctctagtgatgatgatagcttactatcaacagcggattcagatgttgatgtcgggacctgcggagaatctgatgatgataaagcactttttgtgacaggcgctattgaagaatacgtcgatgatgtagtgcttgttggctcaaatgaggttgttgactgggacaaggttactggactcgatgaggtcgtcgaagtagaagttgttgatccactattgtccaagacagcttcttcca

SEQ ID NO: 11020 - DNA, 1656 bp, Muscodor strobelii
  misc_feature: SGI cDNA ID NO. 563522
  misc_feature: Reduced expression when VOC is produced
  misc_feature: Encodes the peptide sequence at SEQ ID NO 11021
atggctgacgaaagagatcccgagaaaggactagagtccagcaagggaaattcagagcctatagaaactcatgactatgtagacaaggaattatcaactacgaacgatgatacacccagtagacacagccatgacagtggttcttctcatgcctcagaggagagtgaggatatggacccgatagagcttaccatcactcccgttctgcagggagtcacgcaagttcagacagcgacaagtattggcagctccgcatcacgccctccagatttcgaagtcgactttgacgaagacgacaatccccgtggttggccgttttggcaacgagcctggaatctcttcgtcatcagctttgccacttggactgttgtgctgtacagtacaagctatacgtcttcaatcccaggtatccagaaagagttcaacgtatcagacagcacgaccacgacgctcggtgtgacgacgtatctgttaggacttgccttcggcaacttgctatttgcgccaatgagcgagttgcaaggacggaaacccgtctacgttgtctgtatgacagtgttcacgcttctcatcattccctcggctctcgctacttcattagccgagattcttgtagtgcgattctttggtgcattgtttggcgcagctacgatcgcgacggctgccggatcagttgtagacatatccacagacgagaaccgagccttggtcctatcagtatggtctattgcacccttgaacggacctgtaacaggacctgtaatcggcggatttgtatatcagtatcttggatggcgatgggatagctggcttgttttgattctcgctggggctgctacggttgcacttgtcaccactaaggaaacgtacgctccgaaactcctcaaggagaaggcagcgaaactacgtaaggagacagatgatgaaagatggtggagtcgatacgacgtgaagttatcgccgatagagctcgtcaaggtcaacttgactagaccatttgttctctttttcaccgaaccaatcttatggttcttcaatctctggatatccattatttatggaattctatatctttgtttcgtggcgtatccaatcgtatttacggagtatcgcggccgccgtccacccgaggccacagcgcgggtgcttgtcatcggtgccatcctaacacccattggccaactcatcttcgcctggacatgtttgcctgttacctaccactgggctattcccatcgcatttggcattccatttggtctaggcaatgctttaagcttcatctacggctcgaactacatctcaggtgcctatggaatttatgcagcgtccgcacttgctggtaacgcctttacgcgcagtatctttggtggcttcttaccactcgctggtcccaaactatacaccacgctgtcgccgcaatgggccggcacgttacttggattgctcgaagtcgccctgattcctattccgttcgtgttctggagatacggcgataagattcgcgcgaagagtcccgcaattcgtgcactacgcgaggatcaagagagaaatgagaggaggttagcaaaagcgcaaggcaagaaggatagacaggcgaaaaaggatgccgctaccgtggcggaagaagtcaaagtcaaagacgaggagtccgtttag

SEQ ID NO: 11021 - protein, 551 aa, Muscodor strobelii
  misc_feature: SGI Peptide ID NO. 563522
  misc_feature (116)..(460): Pfam Id: PF07690 Pfam Desc: Major Facilitator Superfamily
  misc_feature (116)..(369): Pfam Id: PF07690 Pfam Desc: Major Facilitator Superfamily
  misc_feature (1)..(534): NCBI GI: 261354805 Blast Desc: polyamine transporter 3 [Verticillium albo-atrum VaMs.102]
  misc_feature (19)..(551): NCBI GI: 256732451 Blast Desc: [Nectria haematococca mpVI 77-13-4]
  misc_feature (19)..(532): NCBI GI: 154301300 Blast Desc: conserved [Botryotinia fuckeliana B05.10] gi|150856221|gb|EDN31413.1| conserved [Botryotinia fuckeliana B05.10]
  misc_feature (5)..(514): NCBI GI: 116203633 Blast Desc: CHGG_09700 [Chaetomium globosum CBS 148.51] gi|88175828|gb|EAQ83296.1| CHGG_09700 [Chaetomium globosum CBS 148.51]
  misc_feature (35)..(548): NCBI GI: 156039565 Blast Desc: conserved [Sclerotinia sclerotiorum 1980] gi|154697656|gb|EDN97394.1| conserved [Sclerotinia sclerotiorum 1980]
  misc_feature (59)..(535): NCBI GI: 46123953 Blast Desc: FG06354.1 [Gibberella zeae PH-1]
  misc_feature (40)..(511): NCBI GI: 39943664 Blast Desc: MGG_03843 [Magnaporthe grisea 70-15] gi|145014532|gb|EDJ99100.1| MGG_03843 [Magnaporthe grisea 70-15]
  misc_feature (72)..(532): NCBI GI: 164424694 Blast Desc: NCU06860 [Neurospora crassa OR74A] gi|157070622|gb|EAA28790.2| conserved [Neurospora crassa OR74A]
  misc_feature (90)..(524): NCBI GI: 119474085 Blast Desc: MFS transporter, [Neosartorya fischeri NRRL 181] gi|119407071|gb|EAW17021.1| MFS transporter, [Neosartorya fischeri NRRL 181]
  misc_feature (35)..(543): NCBI GI: 255935343 Blast Desc: Pc13g02570 [Penicillium chrysogenum Wisconsin 54-1255] gi|211583318|emb|CAP91326.1| Pc13g02570 [Penicillium chrysogenum Wisconsin 54-1255]
  misc_feature: Useful for introducing or modulating the production of volatile compounds
MADERDPEKGLESSKGNSEPIETHDYVDKELSTTNDDTPSRHSHDSGSSHASEESEDMDPIELTITPVLQGVTQVQTATSIGSSASRPPDFEVDFDEDDNPRGWPFWQRAWNLFVISFATWTVVLYSTSYTSSIPGIQKEFNVSDSTTTTLGVTTYLLGLAFGNLLFAPMSELQGRKPVYVVCMTVFTLLIIPSALATSLAEILVVRFFGALFGAATIATAAGSVVDISTDENRALVLSVWSIAPLNGPVTGPVIGGFVYQYLGWRWDSWLVLILAGAATVALVTTKETYAPKLLKEKAAKLRKETDDERWWSRYDVKLSPIELVKVNLTRPFVLFFTEPILWFFNLWISIIYGILYLCFVAYPIVFTEYRGRRPPEATARVLVIGAILTPIGQLIFAWTCLPVTYHWAIPIAFGIPFGLGNALSFIYGSNYISGAYGIYAASALAGNAFTRSIFGGFLPLAGPKLYTTLSPQWAGTLLGLLEVALIPIPFVFWRYGDKIRAKSPAIRALREDQERNERRLAKAQGKKDRQAKKDAATVAEEVKVKDEESV

SEQ ID NO: 11022 - DNA, 2822 bp, Muscodor strobelii
  misc_feature: SGI EST ID NO. CUFF.26030.0
  misc_feature: Variant of the nucleotide sequence at SEQ ID NO 11020
acgggaattactttcttccttgtgattactccaagggacctagtatatcgacatcttttcacgctccgaccgtccgccattacgtgaaactaacaaaccttccatggcccgttttaactccaaaatccgtagagaccctggtaaaatgccgaatacggccaatcgccagcggtgataggccacgcgaaccagaaatagtcaacgatcgatgggtctgataacactctgactattactaatgtagaaatccgtgttgacatggatgcataggtgggcgagggtgggttcccgtagctaggcattttggttcaagatcgcgagctgcctcttcattttctctgggcttgcattcagtcttctagataaacttgatggtgaaaatagttgcgctttgtttatagtcggaaactacagacgagggccattgcccgtccacgcttcgttctcggtgccactttcttcaactttgcgacgtataccctaccgaataccatatcctcagctcttcaaataagctttgagagtcaatccggcacgatggctgacgaaagagatcccgagaaaggactagagtccagcaagggaaattcagagcctatagaaactcatgactatgtagacaaggaattatcaactacgaacgatgatacacccagtagacacagccatgacagtggttcttctcatgcctcagaggagagtgaggatatggacccgatagagcttaccatcactcccgttctgcagggagtcacgcaagttcagacagcgacaagtattggcagctccgcatcacgccctccagatttcgaagtcgactttgacgaagacgacaatccccgtggttggccgttttggcaacgagcctggaatctcttcgtcatcagctttgccacttggactgttgtgctgtacagtacaagctatacgtcttcaatcccaggtatccagaaagagttcaacgtatcagacagcacgaccacgacgctcggtgtgacgacgtatctgttaggacttgccttcggcaacttgctatttgcgccaatgagcgagttgcaaggacggaaacccgtctacgttgtctgtatgacagtgttcacgcttctcatcattccctcggctctcgctacttcattagccgagattcttgtagtgcgattctttggtgcattgtttggcgcagctacgatcgcgacggctgccggatcagttgtagacatatccacagacgagaaccgagccttggtcctatcagtatggtctattgcacccttgaacggacctgtaacaggacctgtaatcggcggatttgtatatcagtatcttggatggcgatgggatagctggcttgttttgattctcgctggggctgctacggttgcacttgtcaccactaaggaaacgtacgctccgaaactcctcaaggagaaggcagcgaaactacgtaaggagacagatgatgaaagatggtggagtcgatacgacgtgaagttatcgccgatagagctcgtcaaggtcaacttgactagaccatttgttctctttttcaccgaaccaatcttatggttcttcaatctctggatatccattatttatggaattctatatctttgtttcgtggcgtatccaatcgtatttacggagtatcgcggttggggcccgggctcaccggcctctcatttaccggcattggtattggaaccacgatttgcattgtgactgagaggttttggagaagagtcatcaacgcacaccctgtcgaccctgtgacaggccgccgtccacccgaggccacagcgcgggtgcttgtcatcggtgccatcctaacacccattggccaactcatcttcgcctggacatgtttgcctgttacctaccactgggctattcccatcgcatttggcattccatttggtctaggcaatgctttaagcttcatctacggctcgaactacatctcaggtgcctatggaatttatgcagcgtccgcacttgctggtaacgcctttacgcgcagtatctttggtggcttcttaccactcgctggtcccaaactatacaccacgctgtcgccgcaatgggccggcacgttacttggattgctcgaagtcgccctgattcctattccgttcgtgttctggagatacggcgataagattcgcgcgaagagtcccgcaattcgtgcactacgcgaggatcaagagagaaatgagaggaggttagcaaaagcgcaaggcaagaaggatagacaggcgaaaaaggatgccgctaccgtggcggaagaagtcaaagtcaaagacgaggagtccgtttagcaaaatcacattagtataggtagtcactgcataatcggtgcacaattggagtttgggtttagaaacatagcatctacacgtactatcaggctatggtcagttggagagtatttcatactcaccgccatcgtgacctgtcttcgtcttgcattgcagcttgagaataaatcatcatgttagacgatgtgccttataacaaattatgccctgggtttgtgtaaacaagcccagtccaatttggagcattgggtcacagaccattttcttttgtacccgacgaggtgatcattctgatcatcctttacaatggagtaagcggggggcattgagaggatgtatgcacaagtcgcacaaaagcgagactcgattttcattgacgataatatgccatagttaattgcgttgcggcgggcaagatcagggtaaagttttggaggatcgtatatcattgtctcgaaattgtacccggatgctaaatgcccatttgaccctaagacacaaagcctc

SEQ ID NO: 11023 - DNA, 1563 bp, Muscodor strobelii
  misc_feature: SGI cDNA ID NO. 563523
  misc_feature: Encodes the peptide sequence at SEQ ID NO 11024
atgaaagaaacatggaaacctcgctgggtcatacagaatagacaaccaaccttcgtcggtgaaggcagccctccacaaagtgtttttggaacaacgaagtatctctggggtaatgtcccggccattgacatcatccagcttagcaggaatgaaggcgctgctttcaacggtccactgcgcatgcttttcgctgcctccggagacatgcgcaatgcccttttctccgtcgcgggtcttcctctagcctatcgtggcaccttggatgtaactatcaacgatcgcgagatggatgtggtcgctcgaaacctcattttcctactcatattcttgtcacacaaagacccaaatattgcctctgaacacgtactgcatttatggtactctgccttggtaacagacgcttgctatggcctgttgcaaggatcaatcaagcccatggtgcaagaggtatgcggaaagaccgcacaaaaggctggatcaacacgtttaggcaagacctggcgttttgcatcaggttctgttcgtgcgatattgacgcgagacgactgggtctcattgctcaaatattttgacgtgcggcccgggttgacaagagacacggctcagcaagtgcgccgcaatatcatggatgctcctgagagggtcgactacgttgaccgagctctacatcagaaatcttcgtctgctgaaaggttaggagcatcgaagttcagggaagacggcattctgcttccttttggtcaaagccgcaaggagtttgtgcagccaaatccaacactatttggagcagcagaatggcccatgatggacagcgccgatcccacagctggatggtcatggaaggcctatttggcattcaacgcaggtcctgcaacgaatgacagctatggacaactatattactatctgaaacatgtgtttgcaatgttccatcgcaagatccgatctttggccgtcaactttgagcttctgcgcgttgatgcgcggaaattgccagtggcggtagcagggaagcttttcgatcggatagatgtgggaaatatttgcgatttacatttccttggtctaagagcaactcttgaaacctttcggcctcttcttcaaagtatcgccatgaatccacatgcaaccctcatcgcagtgtttctcaacgccgtagctcaagttacatgcatgtatgagcaatctggcgagcctttatcttccttcatgcaagtaatgcgagcccgaagccttgagagagtacaacaatatatgccggagctattccgaactttcccagataattaccaccatccgaatcttatgaagcttgcgtcggcatctgatctcgcgatggacatggacggctacttcaccgcctacatggaaatggagagattcgacaaagaagcgtcggctgtcggacttcagatgaagacgaggaacaccatcgtcaatgcttggccatggaggatgcccgcaggcaggcctacgccacaaggaaggaaagactttgcgctcttgcttggatgcgcacaatctggacaagagagatttgttgagtggaagctgaagacttga

SEQ ID NO: 11024 - protein, 520 aa, Muscodor strobelii
  misc_feature: SGI Peptide ID NO. 563523
  misc_feature (2)..(517): NCBI GI: 46110595 Blast Desc: FG02179.1 [Gibberella zeae PH-1]
  misc_feature (6)..(517): NCBI GI: 238845993 Blast Desc: conserved [Microsporum canis CBS 113480]
  misc_feature (1)..(517): NCBI GI: 156056723 Blast Desc: SS1G_04092 [Sclerotinia sclerotiorum 1980] gi|154701878|gb|EDO01617.1| SS1G_04092 [Sclerotinia sclerotiorum 1980]
  misc_feature (1)..(517): NCBI GI: 154323824 Blast Desc: BC1G_00311 [Botryotinia fuckeliana B05.10] gi|150842540|gb|EDN17733.1| BC1G_00311 [Botryotinia fuckeliana B05.10]
  misc_feature (2)..(517): NCBI GI: 212535036 Blast Desc: conserved [Penicillium marneffei ATCC 18224] gi|210070073|gb|EEA24163.1| conserved [Penicillium marneffei ATCC 18224]
  misc_feature (2)..(517): NCBI GI: 242791874 Blast Desc: conserved [Talaromyces stipitatus ATCC 10500] gi|218718431|gb|EED17851.1| conserved [Talaromyces stipitatus ATCC 10500]
  misc_feature (1)..(516): NCBI GI: 256720860 Blast Desc: NECHADRAFT_49944 [Nectria haematococca mpVI 77-13-4]
  misc_feature (2)..(516): NCBI GI: 258570069 Blast Desc: [Uncinocarpus reesii 1704] gi|237904108|gb|EEP78509.1| [Uncinocarpus reesii 1704]
  misc_feature (2)..(516): NCBI GI: 240106688 Blast Desc: MYND finger family protein [Coccidioides posadasii C735 delta SOWgp]
  misc_feature (1)..(517): NCBI GI: 189200813 Blast Desc: conserved [Pyrenophora tritici-repentis Pt-1C-BFP] gi|187983842|gb|EDU49330.1| conserved [Pyrenophora tritici-repentis Pt-1C-BFP]
MKETWKPRWVIQNRQPTFVGEGSPPQSVFGTTKYLWGNVPAIDIIQLSRNEGAAFNGPLRMLFAASGDMRNALFSVAGLPLAYRGTLDVTINDREMDVVARNLIFLLIFLSHKDPNIASEHVLHLWYSALVTDACYGLLQGSIKPMVQEVCGKTAQKAGSTRLGKTWRFASGSVRAILTRDDWVSLLKYFDVRPGLTRDTAQQVRRNIMDAPERVDYVDRALHQKSSSAERLGASKFREDGILLPFGQSRKEFVQPNPTLFGAAEWPMMDSADPTAGWSWKAYLAFNAGPATNDSYGQLYYYLKHVFAMFHRKIRSLAVNFELLRVDARKLPVAVAGKLFDRIDVGNICDLHFLGLRATLETFRPLLQSIAMNPHATLIAVFLNAVAQVTCMYEQSGEPLSSFMQVMRARSLERVQQYMPELFRTFPDNYHHPNLMKLASASDLAMDMDGYFTAYMEMERFDKEASAVGLQMKTRNTIVNAWPWRMPAGRPTPQGRKDFALLLGCAQSGQERFVEWKLKT

SEQ ID NO: 11025 - DNA, 1161 bp, Muscodor strobelii
  misc_feature: SGI cDNA ID NO. 563524
  misc_feature: Elevated expression when VOC is produced
  misc_feature: Encodes the peptide sequence at SEQ ID NO 11026
atgggaaaccgtgatcgatctacgctccgaagcgactccggctatggggacgacatcgccgtcgaggcggcggccgctcgctgtccgactgatcaccctttgactctgaaggggtacgatgtcgggccggtatcgaagctacatgtcggcgatgtattcgagttcctctgggccgatgtggagcagtatcagtgggaatggaaatgtttgggatacactcgtttcatcgttctgcgccatagcgaaaccttccctcaccgttgcgtctgcatccccatttcaacaggtggtatgagcaagcaggactttgccaaaccaggtatcgacagtttccagcagggcttcgtcttcgccaatggagagccgaatccggggtacgagcagccaaagggcggccccaagctccagtactcggcaatcggcatcgaactacgcccgggcaaaattcgcgtcaaggaggattcccgtgccaactatgccgacatcattgaagtggaccacgaggcccaggtcatggtcgttggcgacgtcgtcaaatacttcgatcgcgtcagaaggaacgtcaacaaggctttcatgcgacagatattgcgaaaggcgctggagaagtaccaagcggagaagaacaacacgatgcctcccaacccgaccgaaagtctcctatccatggatggtgagccgggtggtgccgattgcagacgtgacttcgacccagatctgtacacactgaacgagggcccgacggatgacgaggcggaagcgaatgaggcccacgagccgtatcagagccatgaagccactcccgcgcaggagtcggagccggagccttggaggcacccacaagagtatgccgcgtcgcaggagatcctgccccaggccccagaaagaagtccgtcctcacccgggaaacgaaggggaggcacaccgctgatccccgagaagagagaaagtaaatccgagagcaggcgcgagaggagaccgtcctcacccgaggagaagcgcacgagagcacagaatgcagcgctggaaaagccactggtggttttggaccgcagatccagctacgaagaaaacaatacccgccgagcgagtagtaaggaacacggtccggactatgaccttcgatccatgcacaacgtagccatggctaagctcaagtga

SEQ ID NO: 11026 - protein, 386 aa, Muscodor strobelii
  misc_feature: SGI Peptide ID NO. 563524
  misc_feature (33)..(195): NCBI GI: 116198307 Blast Desc: CHGG_07309 [Chaetomium globosum CBS 148.51] gi|88178588|gb|EAQ86056.1| CHGG_07309 [Chaetomium globosum CBS 148.51]
  misc_feature (51)..(177): NCBI GI: 145605557 Blast Desc: MGG_09196 [Magnaporthe grisea 70-15] gi|145013370|gb|EDJ98011.1| MGG_09196 [Magnaporthe grisea 70-15]
  misc_feature (31)..(192): NCBI GI: 261360893 Blast Desc: conserved [Verticillium albo-atrum VaMs.102]
  misc_feature (72)..(178): NCBI GI: 256728503 Blast Desc: NECHADRAFT_101892 [Nectria haematococca mpVI 77-13-4]
  misc_feature (45)..(177): NCBI GI: 171694199 Blast Desc: protein product [Podospora anserina] gi|170947048|emb|CAP73853.1| protein product [Podospora anserina]
  misc_feature: Useful for introducing or modulating the production of volatile compounds
MGNRDRSTLRSDSGYGDDIAVEAAAARCPTDHPLTLKGYDVGPVSKLHVGDVFEFLWADVEQYQWEWKCLGYTRFIVLRHSETFPHRCVCIPISTGGMSKQDFAKPGIDSFQQGFVFANGEPNPGYEQPKGGPKLQYSAIGIELRPGKIRVKEDSRANYADIIEVDHEAQVMVVGDVVKYFDRVRRNVNKAFMRQILRKALEKYQAEKNNTMPPNPTESLLSMDGEPGGADCRRDFDPDLYTLNEGPTDDEAEANEAHEPYQSHEATPAQESEPEPWRHPQEYAASQEILPQAPERSPSSPGKRRGGTPLIPEKRESKSESRRERRPSSPEEKRTRAQNAALEKPLVVLDRRSSYEENNTRRASSKEHGPDYDLRSMHNVAMAKLK

SEQ ID NO: 11027 - DNA, 3226 bp, Muscodor strobelii
  misc_feature: SGI EST ID NO. CUFF.26235.1
  misc_feature: Variant of the nucleotide sequence at SEQ ID NO 11025
tgacgggagagcatagtgtagggagagttccctttgttgcacattcatgtgtctacgcaattggcatcgaacctttcgacggccacaggaggacagcaaatctgaggaggcgaggaaattgatggtgttgcaatcggcataagcccatactcgagaccgatgtcgtggaccaaggctcatcaaagtaaactcagcgcgccatagccaaaagagttctggaccacgtagcatgccttcaacaccaaatacccatctgtgaagcatgtgtgggatagctttatcgcactgttgtctctcccgctgttagatatgtaaacacgttgcggcttgccacgcacaacgcatacaggcagacagagtcttcctacattatctcgactccagctgattcgagatggacgtggccatacctactgcctgacagacacccagctggcgacaatgatcaaaaacatgccggattccacaggagccacgacacttcaatggaatcaacagaaccatcggttgccacgttagatccgtctcagttgacctctagactatctcgctgtcgatcgattccttcacaccaccaggagtcgaaggcaatgatgatgtcttgaaccaggtgctctgatggcaaaaaggtcgaactgggaatcgaacccagatccccggaatcaaaatccgatgtgataaccattacactattcaaccgtctcaggatgctgcaccgtgattggctgttggaatcaaaagggtcgctggttcgaattatgttgatgaccacaagccccactgaagtgtaaaaatccaaaagaccatctacctctcatcgctcgccaagtctttgctcctttgtcgtcaggacgagaggtacgaatcggccggcatctgaatcataagtccccattctcgatagtaatctttccgcatccagatctccgaacagagtgtcaattcccagttaggccgtgagagggaacaacagcaccatcaaaagcgcaagctcataggaagttcggatctgggcacgcgggtctcttatattcattgctgcctataagagaccgcctgtcgatttcttagcaatcgccgtcgacggggacgaggcgaggcgagcccatgcctgcgcatcgcgactgatccgtgctctggcaaatggcggtgacttcgtggccgaatgctgctggccagctgaagggtccctgatccacactacccgcctcacccacgaacgtccgttgtgtctcacctccagacgtgggcctgcatcgacgggccacggtggagacgtagctcctcgacggccattgacaacgcctcgacagcgcagccgatgcatctcggtggagctgcatcgttgggcacccagatgacattctcgactgcctcccattcccaacgtgccccgaggacggtcgaggggtcatgatcccccggcacccctaaggattgatccctcttgaagccggactggggctgcttctgccatgttctagtccttttctaccatatctcagcgtcgctcgtttgcactctcgtgctttctctctctcttttctctctctccagactttttgtccccttagagatgggaaaccgtgatcgatctacgctccgaagcgactccggctatggggacgacatcgccgtcgaggcggcggccgctcgctgtccgactgatcaccctttgactctgaaggggtacgatgtcgggccggtatcgaagctacatgtcggcgatgtattcgagttcctctgggccgatgtggagcagtatcagtgggaatggaaatgtttgggatacactcgtttcatcgttctgcgccatagcgaaaccttccctcaccgttgcgtctgcatccccatttcaacaggtggtatgagcaagcaggactttgccaaaccaggtatcgacagtttccagcagggcttcgtcttcgccaatggagagccgaatccggggtacgagcagccaaagggcggccccaagctccagtactcggcaatcggcatcgaactacgcccgggcaaaattcgcgtcaaggaggattcccgtgccaactatgccgacatcattgaagtggaccacgaggcccaggtcatggtcgttggcgacgtcgtcaaatacttcgatcgcgtcagaaggaacgtcaacaaggctttcatgcgacagatattgcgaaaggcgctggagaagtaccaagcggagaagaacaacacgatgcctcccaacccgaccgaaagtctcctatccatggatggtgagccgggtggtgccgattgcagacgtgacttcgacccagatctgtacacactgaacgagggcccgacggatgacgaggcggaagcgaatgaggcccacgagccgtatcagagccatgaagccactcccgcgcaggagtcggagccggagccttggaggcacccacaagagtatgccgcgtcgcaggagatcctgccccaggccccagaaagaaagagaaagtaaatccgagagcaggcgcgagaggagaccgtcctcacccgaggagaagcgcacgagagcacagaatgcagcgctggaaaagccactggtggttttggaccgcagatccagctacgaagaaaacaatacccgccgagcgagtagtaaggaacacggtccggactatgaccttcgatccatgcacaacgtagccatggctaagctcaagtgagaagaaaccgcgtgatagatgaatacgggtttttgttttccttgttgttttccttcggcatgacctcttctctccttcttttctctctattctcctctactcattaccgctcatccgcgcatcacgagattgcatgacttggggcgtatggcgaaggctggggtggtccataataatgagcaaccacatctgtgtggtgcacgcatatctatcgggcaggcctgggctactgcctttattcagggacacagacacacggatcgtttgagtcgtcgcaaatggcatggcacgtaaatattttagaatgacgaatgatgactacccacaattcaggcttaacctgctaatgatatctgctggacatgtcaagtccaaaatatttgcaatcttacattgcaaggcgcgtgacagatacgtgcagctcacagcaactactcgagacatagtgtgcgatagatcaggagtgatgaagcgggttgacgtatgtcttatgagatcagcgcgcatcagatgagaatacgagcaattccaatctgttctca

SEQ ID NO: 11028 - DNA, 2307 bp, Muscodor strobelii
  misc_feature: SGI cDNA ID NO. 563525
  misc_feature: Encodes the peptide sequence at SEQ ID NO 11029
atgacgacgaatctggcgagggccaaagccccctgccccttctgcctcgtccctctcggccgccgtaccaccaccgcgacttccttatcctccttatcctcctcgacctcctcgctacgatctctacgccgtgcccctccgcttcgaaccaccttcacatctgcatctacacctatatccagcgcaagacgagccacgccgaggttacaaggctctcctccaagacaacaatggcacgatccgtcgccgccccgagcactctacggagcccagtcgactgccccctttggccactacgcccgagacacaaaggctgacaaggcggacgaaccatcgaagctagagaagcctgagaagccatcgaagacgaagaagacgaagaagcaggcggacgacccgctggcgacgccggacaagagcacgcaggagcagcgtaaggcggactgggccatcatgcgcgagatggcgcactacctgtggccgcgcggcagcggcagcggcaagggcagcctcgacaccaagatgcgtgtctcgctggccgtcgtgctgctcgtcggcgccaaggtgctcaacgtccaggtgcccttctacttcaagcacatcgtcgacgccatgaacgtcgacataggcgccgcggggggcaccgccgccaccatcgccggcagcatgatcctcgcctacggcgccacccgcatcggtgccaccgtcttccaggagctgcgcaacgccgtgtttgcgagtgttgcgcagaaggccatccgcagagtggccggcaacgtcttcgaccacctgctgcgcctcgacctcaacttccacctgaccaagcagacgggcgggctcacgcgcgccatcgaccgcggcaccaagggcatctccttcctgctgacgagcatggtcttccacatcgtccccaccgccctcgagatcggcatggtctgcggcatcctgacctggcagtacggcgccagcttcgctgccatcaccctcgccaccatgaccgcctacaccgccttcaccatctggaccacatcctggcgcaccaagttccgccgccaggccaaccaggccgacaaccgcgcctccagcgtcgccgtcgactccctcatcaactacgaggccgtcaagtacttcaacaacgagcccttcgaggtcgcccgctacgaccgcgccctccaggactacgagaagagctccatcaaggtcgccacctccctcgccttcctcaacagcggccagaacgtcatcttctccaccgccctgaccggcatgatgtatctcgccgccaacggcgtcgccgagggctccctgaccgtcggcgatctggtcatggtcaaccagcttgtcttccagctctccgtcccgctcaacttcctgggctcggtgtatcgcgagttgcgccagtctctgctcgacatggagaccctgttcaacctgcaaaaggtcaacgtcaccatcaaggacgacccggacgccaaggctctgcagctttccaagggaggcgagatcaagttcgagaatgtcagcttcggctacaacagagagaggcctattctgcgaaacctcaacttgacgatccctgccggcaagaaggtcgccattgtcgggcccagtgggtgcggaaagtccaccattctgaggctgctgttccggtcgtacgatgtcgaatccggccgcattctcatcgacgaccaggacatccgccgtgtgcaggtcgattcccttcgcaagtcgataggcgttgtccctcaggatacaccgctattcaacgacactgttgggcacaatatcaagtacggcaatatggcggcatctgaagagcagctggtcgcagcggcccagcgagctcacatacacgatatcatcaaggcctggcctgatggatacgataccaaggtgggagagcgaggtttgatgatcagcggcggcgagaagcagcgactggccgtgtctcggctgcttctcaaagacccccctctacttttctttgacgaggccacaagtgcactcgacactcatacggagcaggctctcatgcaaaatataaacagcattctgcgcgagaagtcgaggactagcgtctttgtcgcccaccgccttcgcaccatctacgacgctgatcttatcattgttttgcgcgagggtagcgttgccgagcaaggcactcacaaggagctcatcgaccgaggtggtctctattcggagctttggagcgcacaagagactcttttcagctctggcgaaccgcaagaagtagagagtgcgtctgaggctgaaggcagttcgagccatgagtctcctcggggatga

SEQ ID NO: 11029 - protein, 768 aa, Muscodor strobelii
  misc_feature: SGI Peptide ID NO. 563525
  misc_feature (177)..(455): Pfam Id: PF00664 Pfam Desc: ABC transporter transmembrane region
  misc_feature (528)..(714): Pfam Id: PF00005 Pfam Desc: ABC transporter
  misc_feature (132)..(759): NCBI GI: 39942652 Blast Desc: MGG_03406 [Magnaporthe grisea 70-15] gi|145023179|gb|EDK06706.1| MGG_03406 [Magnaporthe grisea 70-15]
  misc_feature (84)..(761): NCBI GI: 261354579 Blast Desc: iron-sulfur clusters transporter ATM1 [Verticillium albo-atrum VaMs.102]
  misc_feature (103)..(743): NCBI GI: 256729068 Blast Desc: [Nectria haematococca mpVI 77-13-4]
  misc_feature (120)..(758): NCBI GI: 46138793 Blast Desc: FG10911.1 [Gibberella zeae PH-1] gi|126252984|sp|Q4HVU7.1|ATM1_GIBZE RecName: Full=Iron-sulfur clusters transporter ATM1, mitochondrial; Flags: Precursor
  misc_feature (120)..(751): NCBI GI: 156050671 Blast Desc: conserved [Sclerotinia sclerotiorum 1980] gi|154692323|gb|EDN92061.1| conserved [Sclerotinia sclerotiorum 1980]
  misc_feature (110)..(753): NCBI GI: 171680626 Blast Desc: protein product [Podospora anserina] gi|170939940|emb|CAP65166.1| protein product [Podospora anserina]
  misc_feature (117)..(766): NCBI GI: 169770247 Blast Desc: [Aspergillus oryzae RIB40] gi|124107586|sp|Q2ULH4.1|ATM1_ASPOR RecName: Full=Iron-sulfur clusters transporter atm1, mitochondrial; Flags: Precursor
  misc_feature (114)..(750): NCBI GI: 189192584 Blast Desc: iron-sulfur clusters transporter atm1, mitochondrial precursor [Pyrenophora tritici-repentis Pt-1C-BFP] gi|187974237|gb|EDU41736.1| iron-sulfur clusters transporter
  misc_feature (45)..(739): NCBI GI: 145241035 Blast Desc: An08g10600 [Aspergillus niger] gi|134077693|emb|CAK45733.1| protein product [Aspergillus niger]
  misc_feature (171)..(753): NCBI GI: 154308635 Blast Desc: conserved [Botryotinia fuckeliana B05.10] gi|150852691|gb|EDN27883.1| conserved [Botryotinia fuckeliana B05.10]
  misc_feature (195)..(739): SWISSPROT Homolog: EC 3.6.3.43 Peptide-transporting ATPase
MTTNLARAKAPCPFCLVPLGRRTTTATSLSSLSSSTSSLRSLRRAPPLRTTFTSASTPISSARRATPRLQGSPPRQQWHDPSPPRALYGAQSTAPFGHYARDTKADKADEPSKLEKPEKPSKTKKTKKQADDPLATPDKSTQEQRKADWAIMREMAHYLWPRGSGSGKGSLDTKMRVSLAVVLLVGAKVLNVQVPFYFKHIVDAMNVDIGAAGGTAATIAGSMILAYGATRIGATVFQELRNAVFASVAQKAIRRVAGNVFDHLLRLDLNFHLTKQTGGLTRAIDRGTKGISFLLTSMVFHIVPTALEIGMVCGILTWQYGASFAAITLATMTAYTAFTIWTTSWRTKFRRQANQADNRASSVAVDSLINYEAVKYFNNEPFEVARYDRALQDYEKSSIKVATSLAFLNSGQNVIFSTALTGMMYLAANGVAEGSLTVGDLVMVNQLVFQLSVPLNFLGSVYRELRQSLLDMETLFNLQKVNVTIKDDPDAKALQLSKGGEIKFENVSFGYNRERPILRNLNLTIPAGKKVAIVGPSGCGKSTILRLLFRSYDVESGRILIDDQDIRRVQVDSLRKSIGVVPQDTPLFNDTVGHNIKYGNMAASEEQLVAAAQRAHIHDIIKAWPDGYDTKVGERGLMISGGEKQRLAVSRLLLKDPPLLFFDEATSALDTHTEQALMQNINSILREKSRTSVFVAHRLRTIYDADLIIVLREGSVAEQGTHKELIDRGGLYSELWSAQETLFSSGEPQEVESASEAEGSSSHESPRG

SEQ ID NO: 11030 - DNA, 3122 bp, Muscodor strobelii
  misc_feature: SGI EST ID NO. CUFF.26355.0
  misc_feature: Variant of the nucleotide sequence at SEQ ID NO 11028
gccatttgtagctcttttcccttttcttgtgacaaactccgagaattcgtgtctaagctgtgctgcatgcttgccattgggtagacttcacattggccagatataaggtggttgtgcgaaaggcgacggcagtgttgctcaccgaggccggacagaatatccagagtggcacccgcgcgacccctcggtgaaggagttttgaccgccgacagcacagctcgtagctcatagctcatagctccttctctgcacaggtactctcagcatacactacacatacacatacacatacgcatacacgttcactcgcatacgatttccattagataccccctgaaaacggacagatagagggacaactcatccggcatcgactctagcatcattcaatcatggtggcttgcatagacgcgagagaatgatgacgacgaatctggcgagggccaaagccccctgccccttctgcctcgtccctctcggccgccgtaccaccaccgcgacttccttatcctccttatcctcctcgacctcctcgctacgatctctacgccgtgcccctccgcttcgaaccaccttcacatctgcatctacacctatatccagcgcaagacgagccacgccgaggttacaaggctctcctccaagacaacaatggcacgatccgtcgccgccccgagcactctacggagcccagtcgactgccccctttggccactacgcccgagacacaaaggctgacaaggcggacgaaccatcgaagctagagaagcctgagaagccatcgaagacgaagaagacgaagaagcaggcggacgacccgctggcgacgccggacaagagcacgcaggagcagcgtaaggcggactgggccatcatgcgcgagatggcgcactacctgtggccgcgcggcagcggcagcggcaagggcagcctcgacaccaagatgcgtgtctcgctggccgtcgtgctgctcgtcggcgccaaggtgctcaacgtccaggtgcccttctacttcaagcacatcgtcgacgccatgaacgtcgacataggcgccgcggggggcaccgccgccaccatcgccggcagcatgatcctcgcctacggcgccacccgcatcggtgccaccgtcttccaggagctgcgcaacgccgtgtttgcgagtgttgcgcagaaggccatccgcagagtggccggcaacgtcttcgaccacctgctgcgcctcgacctcaacttccacctgaccaagcagacgggcgggctcacgcgcgccatcgaccgcggcaccaagggcatctccttcctgctgacgagcatggtcttccacatcgtccccaccgccctcgagatcggcatggtctgcggcatcctgacctggcagtacggcgccagcttcgctgccatcaccctcgccaccatgaccgcctacaccgccttcaccatctggaccacatcctggcgcaccaagttccgccgccaggccaaccaggccgacaaccgcgcctccagcgtcgccgtcgactccctcatcaactacgaggccgtcaagtacttcaacaacgagcccttcgaggtcgcccgctacgaccgcgccctccaggactacgagaagagctccatcaaggtcgccacctccctcgccttcctcaacagcggccagaacgtcatcttctccaccgccctgaccggcatgatgtatctcgccgccaacggcgtcgccgagggctccctgaccgtcggcgatctggtcatggtcaaccagcttgtcttccagctctccgtcccgctcaacttcctgggctcggtgtatcgcgagttgcgccagtctctgctcgacatggagaccctgttcaacctgcaaaaggtcaacgtcaccatcaaggacgacccggacgccaaggctctgcagctttccaagggaggcgagatcaagttcgagaatgtcagcttcggctacaacagagagaggcctattctgcgaaacctcaacttgacgatccctgccggcaagaaggtcgccattgtcgggcccagtgggtgcggaaagtccaccattctgaggctgctgttccggtcgtacgatgtcgaatccggccgcattctcatcgacgaccaggacatccgccgtgtgcaggtcgattcccttcgcaagtcgataggcgttgtccctcaggatacaccgctattcaacgacactgttgggcacaatatcaagtacggcaatatggcggcatctgaagagcagctggtcgcagcggcccagcgagctcacatacacgatatcatcaaggcctggcctgatggatacgataccaaggtgggagagcgaggtttgatgatcagcggcggcgagaagcagcgactggccgtgtctcggctgcttctcaaagacccccctctacttttctttgacgaggccacaagtgcactcgacactcatacggagcaggctctcatgcaaaatataaacagcattctgcgcgagaagtcgaggactagcgtctttgtcgcccaccgccttcgcaccatctacgacgctgatcttatcattgttttgcgcgagggtagcgttgccgagcaaggcactcacaaggagctcatcgaccgaggtggtctctattcggagctttggagcgcacaagagactcttttcagctctggcgaaccgcaagaagtagagagtgcgtctgaggctgaaggcagttcgagccatgagtctcctcggggatgatggcatgtagtctcagacattgttgggtatcataagtaatagacttgcagctattaaggagacacacagatgcaggcacatgcggaccagttttaaatgcacgacaatgcatcacaatggggccatggagaagcatcgaggggccacggccaggagcctcaaatcccgcaaatttgaacatgtaaatatatgtacatatcacaaaatctcttttggtgtatatctggacagatgacttgaagtatgaaatgcccaaaagacggcggctggacagcggtattatatagagtaagggaacatcaagtgacatgtgctaatttttctggggagaagaaactacgaattccactggaaaaactgatcgtgcgacgatgtgctagaatattaatattcc

SEQ ID NO: 11031 - DNA, 2208 bp, Muscodor strobelii
  misc_feature: SGI cDNA ID NO. 563526
  misc_feature: Elevated expression when VOC is produced
  misc_feature: Encodes the peptide sequence at SEQ ID NO 11032
atgcaaatatcacttctcttcttagatctgctcttgttgtcgggggcctcagcggcgggcccgttgaggcgaggagatagaataccttcactcagagacgcaatatcgcctgcgtcatggtgggcgcataggcgtcagatcggaggtgatctctctcccggctcaccatcatcgtattcaaccaaacctgcgacttcaactgtcatccccacaacttcatctatcattccttcgacatcctcattacagatatcatcctctgttgccagctcttcacaacctgcaagcagcgttagcagttctgccgctaccaccagtgcagcttcatccggatttgtttcccgatctttcactcttagctccattccctcaacatcatctttaccgccaccaacttccgctgcaggctcttcacagcctgcaagtagtgttggcagttctgctgccgcctcgagcgcaactccaccgacctccatctctcgatcgttcactctcagctccattcccacctctagtgcggcacccacttccacagatgtgtctacgccttccactctgattggtacgacggcgagtggaaaatcatctatacctgtcatcagtattggcccgtcctcaactgtaactgtcgggtccagctctcatgctgcctcgtcagacgctacttcatcgaaacatgtgagcttgtcctctcagctatcggccacaagcagaataccagtgtcaagttctaccaccagcgttagcgacaggccaacaccaactccatttcttagcagctctggcccaatttccattagacctgggccatcatccagcgcaaactccttttcaagccaacctgccggctcggccgcggcgagctccagcgctccagcttctagcgttgcttcggtgattagcagcgtacccgcaagctctgtgcctatcagctcggttgtgatctcttcagacaccacctcagtgacaagcaagtctgctagctctgccaattctgtacccgctagctccgttgcatccgtatctagcagtgtcatcccatctggttctgctgccacgagcactattgcaagctcttcgtctactctcgtctcaaccgcatcaacggcggcttcatcccacgcttccaagaccccatctggcaccgtcaactcgaatatcccaactgccatcacctctgtccccgcgtcaacgtcgagtgcggccgcagatgtgcttgaaaagaacctcgaagaagccaagcactacaacagcctcttcgattctctgacagaagagtctgcttgtgtctctggccaggtcgcatgtatcaacggaaagatagggcagtgctccagtgacggcacttttgccatcacaaattgtgcttccggcttgtcttgcttggcgttgcctatgaacactacagccggtgtcgaagttgggtgctgggacaagacaaccgcagagaatgcactgggtggctcttctagcggctcatcaacttcaaccgttcccgcgacttcgtctgccgatgctgctccgtctactagtgtcacagtgtcagtcgggccaaccttgatcacgatcactatcacgcctaccgtcacggagacgagccagatcgtgattacacccagcgcctccaacgcgccgacaagtgtaggttctagctcggctgctgtttcgactgcgagcgctgcttcgtcatcagccgcagcacccagctccgccagcacctcaattgtcccgtcctccgtcattgagacctcgagcgtcactgtcagcacggcaccgcccaccactcttgtcactgttactcgcccttctagttcggacgcgcttgcgactgttacatctactgtcacggtcacacagcctgcgtcatcatcttcgtccatacccgctgcaacgactacatccgtggtttctattacatctgtcgcccccactacatccgacgttcctgctacgtcggctcagatcaccacgacaacgacatcgtcgcccgatgacgtcacgcccacaggcgtacacatcatcccagtgacaacagaaactgggcaccgtggccatcatggtcatgatgatcccaacgctcaagcgacgagtgtagtgggcatcgatgccatgggtacgaatgctgctattactgtcacagtcactgcgacagtcaccacgacggaggctggtgcgactgccacggtgactgtaaccggtgcagcttag

SEQ ID NO: 11032 - protein, 735 aa, Muscodor strobelii
  misc_feature: SGI Peptide ID NO. 563526
  misc_feature (182)..(518): NCBI GI: 46123837 Blast Desc: FG06296.1 [Gibberella zeae PH-1]
  misc_feature (347)..(487): NCBI GI: 171679561 Blast Desc: protein product [Podospora anserina] gi|170939406|emb|CAP64634.1| protein product [Podospora anserina]
  misc_feature: Useful for introducing or modulating the production of volatile compounds
MQISLLFLDLLLLSGASAAGPLRRGDRIPSLRDAISPASWWAHRRQIGGDLSPGSPSSYSTKPATSTVIPTTSSIIPSTSSLQISSSVASSSQPASSVSSSAATTSAASSGFVSRSFTLSSIPSTSSLPPPTSAAGSSQPASSVGSSAAASSATPPTSISRSFTLSSIPTSSAAPTSTDVSTPSTLIGTTASGKSSIPVISIGPSSTVTVGSSSHAASSDATSSKHVSLSSQLSATSRIPVSSSTTSVSDRPTPTPFLSSSGPISIRPGPSSSANSFSSQPAGSAAASSSAPASSVASVISSVPASSVPISSVVISSDTTSVTSKSASSANSVPASSVASVSSSVIPSGSAATSTIASSSSTLVSTASTAASSHASKTPSGTVNSNIPTAITSVPASTSSAAADVLEKNLEEAKHYNSLFDSLTEESACVSGQVACINGKIGQCSSDGTFAITNCASGLSCLALPMNTTAGVEVGCWDKTTAENALGGSSSGSSTSTVPATSSADAAPSTSVTVSVGPTLITITITPTVTETSQIVITPSASNAPTSVGSSSAAVSTASAASSSAAAPSSASTSIVPSSVIETSSVTVSTAPPTTLVTVTRPSSSDALATVTSTVTVTQPASSSSSIPAATTTSVVSITSVAPTTSDVPATSAQITTTTTSSPDDVTPTGVHIIPVTTETGHRGHHGHDDPNAQATSVVGIDAMGTNAAITVTVTATVTTTEAGATATVTVTGAA

SEQ ID NO: 11033 - DNA, 3311 bp, Muscodor strobelii
  misc_feature: SGI EST ID NO. CUFF.26044.0
  misc_feature: Variant of the nucleotide sequence at SEQ ID NO 11031
cgcttatcctgatctctttgcgactttccctcctacctggtcctgaaaattgtcatagaatctgcgagtctgtgtacgaggctactagtaaagaccgggaggccccagtgctcgctccagccagccgggtgaaacctggaccaatgctcatgcattagacgaattatggtgacatggtcgacctacgagggcctctcgatgggccgcaatctaacttctcagacgctactctgctgctcgaggccatctcgggactgtgagcctccaagccgaccgtctggacttgggtagacaataagagtctgcgcggcgttagtggagtccagccctggtggttccatcaacattgtcgtcgtgcatctccaatctcggtggcctttcatcgtggctcgagattcgcttcgcttttctttgtctgtagcacttgtcgtcgtgcatttcccttgtccaccatgtactagaacctcatcaccattctttctcaagttcaatgagacgcgacgcccctttgggaattccttgctctttatgccctgtcactcggaatatgaattagtgtttccctccattcctagccaagttatcacgttggccctcacaatccgttttcgtttccgtacatctttttggacgtctccttttcgttttcttctcactctttcgaagaaaaaacttagattaatccctttcaccatgcaaatatcacttctcttcttagatctgctcttgttgtcgggggcctcagcggcgggcccgttgaggcgaggagatagaataccttcactcagagacgcaatatcgcctgcgtcatggtgggcgcataggcgtcagatcggaggtgatctctctcccggctcaccatcatcgtattcaaccaaacctgcgacttcaactgtcatccccacaacttcatctatcattccttcgacatcctcattacagatatcatcctctgttgccagctcttcacaacctgcaagcagcgttagcagttctgccgctaccaccagtgcagcttcatccggatttgtttcccgatctttcactcttagctccattccctcaacatcatctttaccgccaccaacttccgctgcaggctcttcacagcctgcaagtagtgttggcagttctgctgccgcctcgagcgcaactccaccgacctccatctctcgatcgttcactctcagctccattcccacctctagtgcggcacccacttccacagatgtgtctacgccttccactctgattggtacgacggcgagtggaaaatcatctatacctgtcatcagtattggcccgtcctcaactgtaactgtcgggtccagctctcatgctgcctcgtcagacgctacttcatcgaaacatgtgagcttgtcctctcagctatcggccacaagcagaataccagtgtcaagttctaccaccagcgttagcgacaggccaacaccaactccatttcttagcagctctggcccaatttccattagacctgggccatcatccagcgcaaactccttttcaagccaacctgccggctcggccgcggcgagctccagcgctccagcttctagcgttgcttcggtgattagcagcgtacccgcaagctctgtgcctatcagctcggttgtgatctcttcagacaccacctcagtgacaagcaagtctgctagctctgccaattctgtacccgctagctccgttgcatccgtatctagcagtgtcatcccatctggttctgctgccacgagcactattgcaagctcttcgtctactctcgtctcaaccgcatcaacggcggcttcatcccacgcttccaagaccccatctggcaccgtcaactcgaatatcccaactgccatcacctctgtccccgcgtcaacgtcgagtgcggccgcagatgtgcttgaaaagaacctcgaagaagccaagcactacaacagcctcttcgattctctgacagaagagtctgcttgtgtctctggccaggtcgcatgtatcaacggaaagatagggcagtgctccagtgacggcacttttgccatcacaaattgtgcttccggcttgtcttgcttggcgttgcctatgaacactacagccggtgtcgaagttgggtgctgggacaagacaaccgcagagaatgcactgggtggctcttctagcggctcatcaacttcaaccgttcccgcgacttcgtctgccgatgctgctccgtctactagtgtcacagtgtcagtcgggccaaccttgatcacgatcactatcacgcctaccgtcacggagacgagccagatcgtgattacacccagcgcctccaacgcgccgacaagtgtaggttctagctcggctgctgtttcgactgcgagcgctgcttcgtcatcagccgcagcacccagctccgccagcacctcaattgtcccgtcctccgtcattgagacctcgagcgtcactgtcagcacggcaccgcccaccactcttgtcactgttactcgcccttctagttcggacgcgcttgcgactgttacatctactgtcacggtcacacagcctgcgtcatcatcttcgtccatacccgctgcaacgactacatccgtggtttctattacatctgtcgcccccactacatccgacgttcctgctacgtcggctcagatcaccacgacaacgacatcgtcgcccgatgacgtcacgcccacaggcgtacacatcatcccagtgacaacagaaactgggcaccgtggccatcatggtcatgatgatcccaacgctcaagcgacgagtgtagtgggcatcgatgccatgggtacgaatgctgctattactgtcacagtcactgcgacagtcaccacgacggaggctggtgcgactgccacggtgactgtaaccggtgcagcttaggggaacgatcttggtggtgttggtaaagaaataatgtgaaggataataggacttaatcttgcagatctacatacccactgttacaaattattttattttggtcttgtctcttatttgtctctcatcttgttctctgcgataagcgttggagttttgggcagtcaggtgcattgctaggatgttttggttcattttctttcagggctctggcgcggtgaagggaaaacagatttccatctacaaataggcgtttcacctcaataatgaccagttcctatatagtttgaagtcaagtcgatgttgttattttgcgcaaatgtctttcaattgccgtgtgtggaatgagagtcgtttagcggagctgaagtcctttttcataggagtgagatagacattgtacagtttgaacg

SEQ ID NO: 11034 - DNA, 906 bp, Muscodor strobelii
  misc_feature: SGI cDNA ID NO. 563527
  misc_feature: Encodes the peptide sequence at SEQ ID NO 11035
atggcagttgggatattcgagttgacggtgccagatggggtcttggaagcgtgggatgaagccgccgttgatgcggttgagacgagagtagacgaagagcttgcaatagtgctcgtggcagcagaaccagatgggatgacactgctagatacggatgcaacggagctagcgggtacagaattggcagagctagcagacttgcttgtcactgaggtggtgtctgaagagatcacaaccgagctgataggcacagagcttgcgggtacgctgctaatcaccgaagcaacgctagaagctggagcgctggagctcgccgcggccgagccggcaggttggcttgaaaaggagtttgcgctggatgatggcccaggtctaatggaaattgggccagagctgctaagaaatggagttggtgttggcctgtcgctaacgctggtggtagaacttgacactgatgattttccactcgccgtcgtaccaatcagagtggaaggcgtagacacatctgtggaagtgggtgccgcactagaggtgggaatggagctgagagtgaacgatcgagagatggaggtcggtggagttgcgctcgaggcggcagcagaactgccaacactacttgcaggctgtgaagagcctgcagcggaagttggtggcggtaaagatgatgttgagggaatggagctaagagtgaaagatcgggaaacaaatccggatgaagctgcactggtggtagcggcagaactgctaacgctgcttgcaggttgtgaagagctggcaacagaggatgatatctgtaatgaggatgtcgaaggaatgatagatgaagttgtggggatgacagttgaagtcgcaggtttggttgaatacgatgatggtgagccgggagagagatcacctccgatctga

SEQ ID NO: 11035 - protein, 301 aa, Muscodor strobelii
  misc_feature: SGI Peptide ID NO. 563527
MAVGIFELTVPDGVLEAWDEAAVDAVETRVDEELAIVLVAAEPDGMTLLDTDATELAGTELAELADLLVTEVVSEEITTELIGTELAGTLLITEATLEAGALELAAAEPAGWLEKEFALDDGPGLMEIGPELLRNGVGVGLSLTLVVELDTDDFPLAVVPIRVEGVDTSVEVGAALEVGMELRVNDREMEVGGVALEAAAELPTLLAGCEEPAAEVGGGKDDVEGMELRVKDRETNPDEAALVVAAELLTLLAGCEELATEDDICNEDVEGMIDEVVGMTVEVAGLVEYDDGEPGERSPPI

SEQ ID NO: 11036 - DNA, 1218 bp, Muscodor strobelii
  misc_feature: SGI cDNA ID NO. 563528
  misc_feature: Elevated expression when VOC is produced
  misc_feature: Encodes the peptide sequence at SEQ ID NO 11037
atgcataagaaaatccccagaacagatgatgctctgagattagctcaaggattagagactcttctcaatgatccagcttttgaccccgagcttctggatcgtacgactcgtcgccgactgagcgaggcggcgaggaagctatctatcgccaccgaagcacctggagacactgctcatcgatttgctggcttgccaattcaactctccctcgcgaagatcggcaatgacacgggactcttcgacatcttgacagccctcaagggccgttcagccagccacgtcgagcttgcgagaaagactagagtgaatccaggtttgatgagtcgcttattgcgatattaccaatcatttgacatgatctctcagcccgatgacgacgaattcgccgccaacaacatcacgcaagcgcttgtgaggcccggcgggaagtcgggcgtggaatggaacttcacggccgtaaaccctgcgctgacggctctccctgagttcctgagcgagaaccccgatacggatcttagcgacatcaactcgataccctggtatatggcacacgacacgcccgacccggtgttcaaatggatcaacgagcgacctgacgtcctagcgagcttcgcggggtggatggtggggcagcgtgatggtcttccgtcgtttctggacgtgctcgatttcgaaaaggagttcgcgcagggggtacataaggacgacaccatttttgtcgacattggggggtcgatgggtcatcaatgtgttgcgttgaggaagaaatgtccgaagcttgttggcaaggtagtgctccaggatctaccggagacgattgagaaggtgaagaaggaaccattggatggattcgaggatgttgagccaagggcgtatgatttctttacgccgcagttgctgaaaggagcacgcacctactacatgcgcaacgtccttcacgactggccagactcgaaatgtgttgagatattgcgaaatatcgtcccggccatgggttcttcgtctcgcatcctcatcgatgagatgatcttaccgtcgaagggcgcaccatggcgtgccacccagcaggactttattatggctacccttgttgctgcgaaagagcgctcgcgcgatgagtggttgggcctatttaatgaagcgggcctgaaggttgaaaatgtttggaggtatacggaagagttatcagattgtttaattgtgcttgttccaaaatga

SEQ ID NO: 11037 - protein, 405 aa, Muscodor strobelii
  misc_feature: SGI Peptide ID NO. 563528
  misc_feature (123)..(379): Pfam Id: PF00891 Pfam Desc: O-methyltransferase
  misc_feature (308)..(379): Pfam Id: PF00891 Pfam Desc: O-methyltransferase
  misc_feature (7)..(405): NCBI GI: 240111300 Blast Desc: sterigmatocystin 8-O-methyltransferase precursor, [Coccidioides posadasii C735 delta SOWgp]
  misc_feature (8)..(402): NCBI GI: 171681429 Blast Desc: protein product [Podospora anserina] gi|170940673|emb|CAP65901.1| protein product [Podospora anserina]
  misc_feature (18)..(405): NCBI GI: 154309933 Blast Desc: BC1G_06887 [Botryotinia fuckeliana B05.10] gi|150851675|gb|EDN26868.1| BC1G_06887 [Botryotinia fuckeliana B05.10]
  misc_feature (7)..(302): NCBI GI: 119189275 Blast Desc: CIMG_04685 [Coccidioides immitis RS]
  misc_feature (52)..(400): NCBI GI: 145606871 Blast Desc: MGG_03813 [Magnaporthe grisea 70-15] gi|145014499|gb|EDJ99067.1| MGG_03813 [Magnaporthe grisea 70-15]
  misc_feature (33)..(403): NCBI GI: 145228447 Blast Desc: An01g00880 [Aspergillus niger] gi|134054621|emb|CAK43466.1| protein product [Aspergillus niger]
  misc_feature (33)..(405): NCBI GI: 145237970 Blast Desc: An07g05520 [Aspergillus niger] gi|134076110|emb|CAK39468.1| protein product [Aspergillus niger]
  misc_feature (17)..(392): NCBI GI: 169768716 Blast Desc: [Aspergillus oryzae RIB40] gi|83766686|dbj|BAE56826.1| protein product [Aspergillus oryzae]
  misc_feature (33)..(392): NCBI GI: 238498036 Blast Desc: O-methyltransferase, [Aspergillus flavus NRRL3357] gi|220693527|gb|EED49872.1| O-methyltransferase, [Aspergillus flavus NRRL3357]
  misc_feature (28)..(405): NCBI GI: 238841969 Blast Desc: OmtB [Microsporum canis CBS 113480]
  misc_feature (100)..(396): SWISSPROT Homolog: EC 2.1.1.110 Sterigmatocystin 8-O-methyltransferase
  misc_feature: Useful for introducing or modulating the production of volatile compounds
MHKKIPRTDDALRLAQGLETLLNDPAFDPELLDRTTRRRLSEAARKLSIATEAPGDTAHRFAGLPIQLSLAKIGNDTGLFDILTALKGRSASHVELARKTRVNPGLMSRLLRYYQSFDMISQPDDDEFAANNITQALVRPGGKSGVEWNFTAVNPALTALPEFLSENPDTDLSDINSIPWYMAHDTPDPVFKWINERPDVLASFAGWMVGQRDGLPSFLDVLDFEKEFAQGVHKDDTIFVDIGGSMGHQCVALRKKCPKLVGKVVLQDLPETIEKVKKEPLDGFEDVEPRAYDFFTPQLLKGARTYYMRNVLHDWPDSKCVEILRNIVPAMGSSSRILIDEMILPSKGAPWRATQQDFIMATLVAAKERSRDEWLGLFNEAGLKVENVWRYTEELSDCLIVLVPK

SEQ ID NO: 11038 - DNA, 2123 bp, Muscodor strobelii
  misc_feature: SGI EST ID NO. CUFF.26041.0
  misc_feature: Variant of the nucleotide sequence at SEQ ID NO 11036
gagccacaactggaaagtcgtatctatcacgtcaatctttggcgcgcggtgctgtcgtcgcacagacgttgccggtacctgagattgacaccattcagtctatcgtcttacatgcagcaacatggcacgacgcatatcggcatttagcgtgcaacgttccgacttctgcatccactataaatccactacaacactatgtagataacacaatgaaacaactccaagactgcggcgcgagttgctgctctagagacatcccttggcgtgtcatcgccaagggttggcgataagatgattactgtaggatcttgtcacagcatataccatgcatgatggctggagtgggtcggatttgacatgatcaggccactactaccttgcgaggtcctacaaaagttatcaggttggtatgtcaatattgatgatgcacatacgtgattgcaacgggtggtgttgagacagaatctcacttgtttacacgaaatttttccttcatacgaagaattattctgcttttatccattcgggctaatcaccgccagttacatcccttctcaggaaagagtcgaatattgacagatatcagtaactatttctcgaaagaaaaatgcataagaaaatccccagaacagatgatgctctgagattagctcaaggattagagactcttctcaatgatccagcttttgaccccgagcttctggatcgtacgactcgtcgccgactgagcgaggcggcgaggaagctatctatcgccaccgaagcacctggagacactgctcatcgatttgctggcttgccaattcaactctccctcgcgaagatcggcaatgacacgggactcttcgacatcttgacagccctcaagggccgttcagccagccacgtcgagcttgcgagaaagactagagtgaatccaggtttgatgagtcgcttattgcgatattaccaatcatttgacatgatctctcagcccgatgacgacgaattcgccgccaacaacatcacgcaagcgcttgtgaggcccggcgggaagtcgggcgtggaatggaacttcacggccgtaaaccctgcgctgacggctctccctgagttcctgagcgagaaccccgatacggatcttagcgacatcaactcgataccctggtatatggcacacgacacgcccgacccggtgttcaaatggatcaacgagcgacctgacgtcctagcgagcttcgcggggtggatggtggggcagcgtgatggtcttccgtcgtttctggacgtgctcgatttcgaaaaggagttcgcgcagggggtacataaggacgacaccatttttgtcgacattggggggtcgatgggtcatcaatgtgttgcgttgaggaagaaatgtccgaagcttgttggcaaggtagtgctccaggatctaccggagacgattgagaaggtgaagaaggaaccattggatggattcgaggatgttgagccaagggcgtatgatttctttacgccgcagttgctgaaaggagcacgcacctactacatgcgcaacgtccttcacgactggccagactcgaaatgtgttgagatattgcgaaatatcgtcccggccatgggttcttcgtctcgcatcctcatcgatgagatgatcttaccgtcgaagggcgcaccatggcgtgccacccagcaggactttattatggctacccttgttgctgcgaaagagcgctcgcgcgatgagtggttgggcctatttaatgaagcgggcctgaaggttgaaaatgtttggaggtatacggaagagttatcagattgtttaattgtgcttgttccaaaatgaggatgtcacaagttagagatatagatagaggatagaatagtgatagaatccagaatccagaatcttccatctggttgttgtaattagatgccccctccaaaagcagtgcacctgacacgatcagtcggctggggtcttacaaacgtatctcatggaagacagtgttcattattatcattgcgtaatctagaattagttatattcctccagctttctttacgtgtaccgacgtgcacaagttgtgtcatatctttgcgcaatgatgcatcttggtgtacaagtttacatgcgcctgtcg

SEQ ID NO: 11039 - DNA, 960 bp, Muscodor strobelii
  misc_feature: SGI cDNA ID NO. 563529
  misc_feature: Encodes the peptide sequence at SEQ ID NO 11040
atgccttccgcaaccaaccagtcgggtgttttcaccgaggaacagttcgttgccgatctcaagaagacagcggacctcctcggtgctccctattcagagaaggcagttcaagaatcattaaacaatttccccggcttgttcgaagaaaccgtcactctgcgggctacaagccggcccggcgataacatgaactaccgtgtctacttgagcaagcaggtagatacagttgccattgctgccaaggctggttacatcaacgtcaatgatcctctgcctcgactggctacttcgtggagcaatcttttcaatggcgacacaatgcaatgggttgacttggacccagaagaagggctcgcaaagacctggatcttcctgaagggccagagatcgatcgacgatgtcttggacgcagatgcagtgccagagtcatgccgggcgtaccgagccactttccataagcttggcttgaaacttgtgcacttcgtcgcggtcgactaccagggcggcacttacaacatctattggacggttcctggtcctatcacggaagcaatggcagccgcgtacacggctctcgcgggtgccagtccaccgactgctgaagagtttgaagacatgcgaaagtatgtacccgagcagcgatttgctttcgcagccacgttcaagctggcgacaggcaagatcacacggacctccatctatgcattgaacatccccgagggcccactacccaagactgtcaccggtcaactacgacagttcttcgagcaggcaccttcatatgacaaagtccttgtgagaagcattggctggtcttacggcaataacgatagcaagtatgtcaagggcgagatgggctacactggtgagctgcagagcaaggttggtaagaccagggctcctctgcctgagaagctggcaaaacaaatggaagagattagggctgcaatggtattttag

SEQ ID NO: 11040 - protein, 319 aa, Muscodor strobelii
  misc_feature: SGI Peptide ID NO. 563529
  misc_feature (1)..(283): NCBI GI: 238842579 Blast Desc: NovQ [Microsporum canis CBS 113480]
  misc_feature (11)..(291): NCBI GI: 156046763 Blast Desc: SS1G_09465 [Sclerotinia sclerotiorum 1980] gi|154693860|gb|EDN93598.1| SS1G_09465 [Sclerotinia sclerotiorum 1980]
  misc_feature (4)..(291): NCBI GI: 154322296 Blast Desc: BC1G_01295 [Botryotinia fuckeliana B05.10] gi|150850542|gb|EDN25735.1| BC1G_01295 [Botryotinia fuckeliana B05.10]
  misc_feature (11)..(291): NCBI GI: 24940612 Blast Desc: AF329398_29 cloQ [Streptomyces roseochromogenes subsp. oscitans]
  misc_feature (11)..(291): NCBI GI: 11921117 Blast Desc: AF170880_17 NovQ [Streptomyces caeruleus] gi|260590572|dbj|BAI44329.1| 4-hydroxyphenylpyruvate dimethylallyl transferase [Streptomyces caeruleus]
  misc_feature (7)..(244): NCBI GI: 115492559 Blast Desc: [Aspergillus terreus NIH2624] gi|114197767|gb|EAU39467.1| [Aspergillus terreus NIH2624]
  misc_feature (11)..(302): NCBI GI: 212527414 Blast Desc: conserved [Penicillium marneffei ATCC 18224] gi|210073262|gb|EEA27349.1| conserved [Penicillium marneffei ATCC 18224]
  misc_feature (16)..(295): NCBI GI: 21225469 Blast Desc: SCO7190 [Streptomyces coelicolor A3(2)] gi|9716229|emb|CAC01590.1| [Streptomyces coelicolor A3(2)] gi|67968195|dbj|BAE00107.1| prenyltransferase homolog coelicolor
  misc_feature (16)..(295): NCBI GI: 256783511 Blast Desc: SlivT_03385 [Streptomyces lividans TK24]
  misc_feature (20)..(232): NCBI GI: 86475798 Blast Desc: cloQ homologue [Streptomyces sp. KO-3988] gi|111036582|dbj|BAF02319.1| prenyltransferase homolog [Streptomyces sp. KO-3988]
MPSATNQSGVFTEEQFVADLKKTADLLGAPYSEKAVQESLNNFPGLFEETVTLRATSRPGDNMNYRVYLSKQVDTVAIAAKAGYINVNDPLPRLATSWSNLFNGDTMQWVDLDPEEGLAKTWIFLKGQRSIDDVLDADAVPESCRAYRATFHKLGLKLVHFVAVDYQGGTYNIYWTVPGPITEAMAAAYTALAGASPPTAEEFEDMRKYVPEQRFAFAATFKLATGKITRTSIYALNIPEGPLPKTVTGQLRQFFEQAPSYDKVLVRSIGWSYGNNDSKYVKGEMGYTGELQSKVGKTRAPLPEKLAKQMEEIRAAMVF

SEQ ID NO: 11041 - DNA, 927 bp, Muscodor strobelii
  misc_feature: SGI EST ID NO. CUFF.26050.0
  misc_feature: Variant of the nucleotide sequence at SEQ ID NO 11039
tgagcaagcaggtagatacagttgccattgctgccaaggctggttacatcaacgtcaatgatcctctgcctcgactggctacttcgtggagcaatcttttcaatggcgacacaatgcaatgggttgacttggacccagaagaagggctcgcaaagacctggatcttcctgaagggccagagatcgatcgacgatgtcttggacgcagatgcagtgccagagtcatgccgggcgtaccgagccactttccataagcttggcttgaaacttgtgcacttcgtcgcggtcgactaccagggcggcacttacaacatctattggacggttcctggtcctatcacggaagcaatggcagccgcgtacacggctctcgcgggtgccagtccaccgactgctgaagagtttgaagacatgcgaaagtatgtacccgagcagcgatttgctttcgcagccacgttcaagctggcgacaggcaagatcacacggacctccatctatgcattgaacatccccgagggcccactacccaagactgtcaccggtcaactacgacagttcttcgagcaggcaccttcatatgacaaagtccttgtgagaagcattggctggtcttacggcaataacgatagcaagtatgtcaagggcgagatgggctacactggtgagctgcagagcaaggttggtaagaccagggctcctctgcctgagaagctggcaaaacaaatggaagagattagggctgcaatggtattttaggctcaccaattgtcagtattagcttctatatatacttgggcggcgctgagggccctccttttcgttacgggtcatcatgcaaggggttatgggcgctgtgcatcttttagggcatgtacttttcaggcacgacgcaaccagacacatatagattcatcgagtatcgaactga

SEQ ID NO: 11042 - DNA, 612 bp, Muscodor strobelii
  misc_feature: SGI cDNA ID NO. 563530
  misc_feature: Elevated expression when VOC is produced
  misc_feature: Encodes the peptide sequence at SEQ ID NO 11043
atgtcttccgttactcttgccgacgctatcaagggccgatcgtcccttcatctcctctctgacgagagcactatctctgatgcgcgtattcaagagatagtgcgcgagggtatactccacgcacccactcctttcaactgccagtctggccgcgctgtattgctcgtgaaggatgagcacaagaagttctgggacctggcccacaccgctgccaaggccgccgtgccgccccagatctttgaaaaggccttcgagccccgtgttaagatgttccgtgccgcatatggaacaatcttattctacgagagtcaagacgccatcgacaagacttctcaaaaggcaccaatggtgaaggagaagatgcctcaatggtctgagcatgcaagcggcatgctacaatatgcagtgtggacaatgctgtgtgcagaaggcttgggggttagcttgcaacattatagcccgtttgtagacgcaccagcagcaaaggaatttgatatcccggccgattggagccttaaggcccagatggttttcggcaagccagccggtggtcgtcttatgcccaagactttcgagccggcagaggacagaatgaaggtcttcggggcttag

SEQ ID NO: 11043 - protein, 203 aa, Muscodor strobelii
  misc_feature: SGI Peptide ID NO. 563530
  misc_feature (3)..(203): NCBI GI: 238842575 Blast Desc: nitroreductase [Microsporum canis CBS 113480]
  misc_feature (5)..(202): NCBI GI: 169782219 Blast Desc: [Aspergillus oryzae RIB40] gi|83774315|dbj|BAE64439.1| protein product [Aspergillus oryzae]
  misc_feature (5)..(202): NCBI GI: 238500660 Blast Desc: fatty acid repression mutant protein, [Aspergillus flavus NRRL3357] gi|220691801|gb|EED48148.1| fatty acid repression mutant protein, [Aspergillus flavus NRRL3357]
  misc_feature (3)..(203): NCBI GI: 154305024 Blast Desc: BC1G_08602 [Botryotinia fuckeliana B05.10] gi|150853765|gb|EDN28957.1| BC1G_08602 [Botryotinia fuckeliana B05.10]
  misc_feature (3)..(203): NCBI GI: 156044853 Blast Desc: SS1G_09615 [Sclerotinia sclerotiorum 1980] gi|154694010|gb|EDN93748.1| SS1G_09615 [Sclerotinia sclerotiorum 1980]
  misc_feature (1)..(202): NCBI GI: 212527216 Blast Desc: conserved [Penicillium marneffei ATCC 18224] gi|210073163|gb|EEA27250.1| conserved [Penicillium marneffei ATCC 18224]
  misc_feature (1)..(201): NCBI GI: 228990970 Blast Desc: Nitroreductase [Bacillus pseudomycoides DSM 12442] gi|228997057|ref|ZP_04156688.1| Nitroreductase [Bacillus mycoides Rock3-17] gi|229004712|ref|ZP_04162449.1| Nitroreductase mycoides
  misc_feature (2)..(202): NCBI GI: 67523775 Blast Desc: AN2343.2 [Aspergillus nidulans FGSC A4] gi|40745298|gb|EAA64454.1| AN2343.2 [Aspergillus nidulans FGSC A4] gi|259487742|tpe|CBF86650.1| TPA: nitroreductase family FGSC
  misc_feature (2)..(202): NCBI GI: 70997834 Blast Desc: nitroreductase family protein [Aspergillus fumigatus Af293] gi|66851285|gb|EAL91611.1| nitroreductase family protein, [Aspergillus fumigatus Af293] gi|159126618|gb|EDP51734.1| family
  misc_feature (2)..(201): NCBI GI: 206977454 Blast Desc: conserved [Bacillus cereus H3081.97] gi|217959427|ref|YP_002337977.1| BCAH187_A2024 [Bacillus cereus AH187] gi|206744304|gb|EDZ55716.1| conserved [Bacillus cereus
  misc_feature: Useful for introducing or modulating the production of volatile compounds
MSSVTLADAIKGRSSLHLLSDESTISDARIQEIVREGILHAPTPFNCQSGRAVLLVKDEHKKFWDLAHTAAKAAVPPQIFEKAFEPRVKMFRAAYGTILFYESQDAIDKTSQKAPMVKEKMPQWSEHASGMLQYAVWTMLCAEGLGVSLQHYSPFVDAPAAKEFDIPADWSLKAQMVFGKPAGGRLMPKTFEPAEDRMKVFGA

SEQ ID NO: 11044 - DNA, 1004 bp, Muscodor strobelii
  misc_feature: SGI EST ID NO. CUFF.26069.0
  misc_feature: Variant of the nucleotide sequence at SEQ ID NO 11042
gagccccggcattcagcggctccgctccatgcccgttgcccgcaacacttgttctttcagcttatttcagcttcatttatatatatggcgttcccctcatagcatatctgcattttacacaaaacacgccacaagcagccacaacacaaaagcattgcctacctcttatttacctaacagaccaattactccctttccaagtcgtcacatacatatctcgccatgtcttccgttactcttgccgacgctatcaagggccgatcgtcccttcatctcctctctgacgagagcactatctctgatgcgcgtattcaagagatagtgcgcgagggtatactccacgcacccactcctttcaactgccagtctggccgcgctgtattgctcgtgaaggatgagcacaagaagttctgggacctggcccacaccgctgccaaggccgccgtgccgccccagatctttgaaaaggccttcgagccccgtgttaagatgttccgtgccgcatatggaacaatcttattctacgagagtcaagacgccatcgacaagacttctcaaaaggcaccaatggtgaaggagaagatgcctcaatggtctgagcatgcaagcggcatgctacaatatgcagtgtggacaatgctgtgtgcagaaggcttgggggttagcttgcaacattatagcccgtttgtagacgcaccagcagcaaaggaatttgatatcccggccgattggagccttaaggcccagatggttttcggcaagccagccggtggtcgtcttatgcccaagactttcgagccggcagaggacagaatgaaggtcttcggggcttagattgccatggtcttgatttcgatatacagcactgcctcatagcgatgttttgcgccccggcgaattttagatatagatttcatctaggttttagagagcggttgctccactgtgtctgctactttcaatataaatgagcgatacctatttcgaatgacgactggttgccg

SEQ ID NO: 11045 - DNA, 1419 bp, Muscodor strobelii
  misc_feature: SGI cDNA ID NO. 563531
  misc_feature: Elevated expression when VOC is produced
  misc_feature: Encodes the peptide sequence at SEQ ID NO 11046
atgtcgggctcggagaatattcgacaccacgtgcgcaagtctcgacagtccggtcctccagtgatcaagtttcgttcccgttgcgttcgcatgggcaatccctgccgctacagcatctcgatgagaacaggcaagcctggttttgagttggtgaaagctcttcaagacggatcaagacgagggacaccgagttctgcgacctcgacccctccgcacgaacacgacaccgtcagcattgccgagttgttgcaacggaatgatgatcagtcgcttcgcgattttctccaagcgaaccagagccctaagttaggcacaggagccgagaaaatgccaacacctcctacttccgaccctgaatcgtcgcccggcaactcaaccagctttcatacccaggactgcatgatggacctagactcgtcacccgcgggcacgtgtctttcaacctcgtttccagacttcacagtcgcacacatggatcccttttctatgttctcagctcataacacatcaacccctggccgcgctcgtggtgtatctaccgatagccacgatagtgtctgtagtagtatagaccaaatgagtcatcccccaatgaacttcaatacgccgccaccgaatttcgcctttgacgcaacaccaccaatggcttttgactatttcgacaactttgatttcttgacgtcggatggctcaccagcctttgatattctgagtcccaaaagcctcaatcaaacaaatagtgagggcgacatctttttagatccatcgttacagcagtcggaagctcttcgccaagagcacaattgccttcgcacagccaaagagatccaacagaccgtgttgacgatggcaggtgccaacgatgctagctgtgcctgtatcggcacttcgtctgtcaagactactgatcaagctctgttaatgtgttcgaaaatcgggcaccagatagaagaaatattgcgctgccaatgcgaagcggatgcgcatttaccattcctcgtcacggtcctcgtctccaaagtgctagcgacatacggcgcaatcgctaagatagacgaatcgacacctttcaaccaacggggcgcgtcgatacctcagtacgagcaacaacagaggtaccaatcgcctcaggacgaagacgctttcgttgccgttcccttacgacttggcgcatatgacgtagacggtgaattggagggcattctaagagcacaagttgtcttgcatgagctcaagaaacttgaagacataccgcggctctttgcggacaagtattgcaagggggacaaagcaagagagacaattgaaggcccaacaatctactcagccctcaatcaattcatccagactcgatatggtgcgaccaagaccgcgtgcgaattgaggagtctactgccgaaatctgcgacgcggggttag

SEQ ID NO: 11046 - protein, 472 aa, Muscodor strobelii
  misc_feature: SGI Peptide ID NO. 563531
  misc_feature (262)..(451): NCBI GI: 169607973 Blast Desc: SNOG_07051 [Phaeosphaeria nodorum SN15] gi|160701528|gb|EAT85702.2| SNOG_07051 [Phaeosphaeria nodorum SN15]
  misc_feature (226)..(455): NCBI GI: 242805766 Blast Desc: aflatoxin biosynthesis regulatory protein, [Talaromyces stipitatus ATCC 10500] gi|218715225|gb|EED14647.1| aflatoxin biosynthesis regulatory protein, [Talaromyces ATCC
  misc_feature (311)..(425): NCBI GI: 21617880 Blast Desc: AF489112_1 transcription factor AFLR [Aspergillus ochraceoroseus] gi|197725406|gb|ACH72907.1| AflR [Aspergillus ochraceoroseus]
  misc_feature (295)..(437): NCBI GI: 67515733 Blast Desc: AN0148.2 [Aspergillus nidulans FGSC A4] gi|40746865|gb|EAA66021.1| AN0148.2 [Aspergillus nidulans FGSC A4] gi|259489653|tpe|CBF90101.1| TPA: Zn(II)2Cys6 transcription
  misc_feature (317)..(417): NCBI GI: 67901666 Blast Desc: AFLR_EMENI Sterigmatocystin biosynthesis regulatory protein [Aspergillus nidulans FGSC A4] gi|146345363|sp|P52957.2|AFLR_EMENI RecName: biosynthesis protein
  misc_feature (317)..(417): NCBI GI: 1235623 Blast Desc: pathway specific transcription factor [Emericella nidulans]
  misc_feature (316)..(455): NCBI GI: 28629054 Blast Desc: AF487263_5 Zn-II 2Cys6 regulatory protein [Leptosphaeria maculans]
  misc_feature (301)..(425): NCBI GI: 212538731 Blast Desc: AflR-like C6 zinc cluster transcription factor, [Penicillium marneffei ATCC 18224] gi|210069263|gb|EEA23354.1| AflR-like C6 zinc cluster transcription factor, [Penicillium ATCC
  misc_feature (216)..(428): NCBI GI: 19908750 Blast Desc: AF441420_1 AFLR [Aspergillus nomius]
  misc_feature (281)..(428): NCBI GI: 19908748 Blast Desc: AF441419_1 AFLR [Aspergillus nomius]
  misc_feature: Useful for introducing or modulating the production of volatile compounds
MSGSENIRHHVRKSRQSGPPVIKFRSRCVRMGNPCRYSISMRTGKPGFELVKALQDGSRRGTPSSATSTPPHEHDTVSIAELLQRNDDQSLRDFLQANQSPKLGTGAEKMPTPPTSDPESSPGNSTSFHTQDCMMDLDSSPAGTCLSTSFPDFTVAHMDPFSMFSAHNTSTPGRARGVSTDSHDSVCSSIDQMSHPPMNFNTPPPNFAFDATPPMAFDYFDNFDFLTSDGSPAFDILSPKSLNQTNSEGDIFLDPSLQQSEALRQEHNCLRTAKEIQQTVLTMAGANDASCACIGTSSVKTTDQALLMCSKIGHQIEEILRCQCEADAHLPFLVTVLVSKVLATYGAIAKIDESTPFNQRGASIPQYEQQQRYQSPQDEDAFVAVPLRLGAYDVDGELEGILRAQVVLHELKKLEDIPRLFADKYCKGDKARETIEGPTIYSALNQFIQTRYGATKTACELRSLLPKSATRG

SEQ ID NO: 11047 - DNA, 1215 bp, Muscodor strobelii
  misc_feature: SGI cDNA ID NO. 563532
  misc_feature: Encodes the peptide sequence at SEQ ID NO 11048
atgaggagaagacaggactcattctacagagaggcgaagccagattatactagtatgcataccgttgatcgaattttgaatgcgcaggtcgaaggcaagagtccggcattgcataatgcttccttcatcgccatcgatagatcatccactatctatgccgggagttatggctcgcgagatctggcaagaactcaaccggcaacgctggacgcattctactggatcgcttcgctcacaaagctgtctacagccgttgcgtgtctaatcgctgttgaccaggggctcataactcttgaccaggatgtgagaaagatagtcccagagcttgctgatttggacgtccttttgggattcgacgatgagggcgcgccacaactgaagaagtgtaccgcacctatcactctccgtggatttgcctatgacaaaggacatgagggcttgcgtcgctgggccgcttacgttgggaaaacagagagtatttttaccggaaatatggaaggataccgctttccgctgatctttgaacctggacaaggatgggcctatggtccagggatggattgggcggggcgaacggttgaaatagttgcgaaaaaagatctcgagtctttcatgaaggcaaatatctggatgcctcttggaatgcactcgaccacattctggccgtggtcgagaccagacctcgaggagaagcttgtcgaaatgacatggcgcgagccgaacggcaccttgatcaaagggaagaacccgtttggcccagcagcagattgttgcggtggaaccggtctctggagcactcctgctgaccaaattaagctgctctctgcattgctcggtgacggtgcagggattattagtgagcagagccttgatgagctgctacgcccacagaccgaggatgcctcatattttcgggccttggtatgcgggagtggaaagaacagagcacacctgggccaaacgtggccggaagattatgatggtgactttggtcttagctcatctatcaacgccgaggcttttcccggtcggcgggcagcgaatagcgctaattggcaaggaatgccgggatgtcacgctaagtggcttgaccgcacaacaggcctggcgggagtgtttatgagccaggttctgccacctggagataaagtcgtcactgagacattttgcaccattgaggaagcagtttaccgagcacataggtcgagtttctag

SEQ ID NO: 11048 - protein, 404 aa, Muscodor strobelii
  misc_feature: SGI Peptide ID NO. 563532
  misc_feature (27)..(396): Pfam Id: PF00144 Pfam Desc: Beta-lactamase
  misc_feature (27)..(136): Pfam Id: PF00144 Pfam Desc: Beta-lactamase
  misc_feature (171)..(308): Pfam Id: PF00144 Pfam Desc: Beta-lactamase
  misc_feature (15)..(400): NCBI GI: 238842578 Blast Desc: beta-lactamase family protein [Microsporum canis CBS 113480]
  misc_feature (40)..(401): NCBI GI: 261191584 Blast Desc: beta-lactamase [Ajellomyces dermatitidis SLH14081] gi|239589966|gb|EEQ72609.1| beta-lactamase [Ajellomyces dermatitidis SLH14081] gi|239612626|gb|EEQ89613.1| beta-lactamase
  misc_feature (19)..(403): NCBI GI: 169783434 Blast Desc: [Aspergillus oryzae RIB40] gi|83774923|dbj|BAE65046.1| protein product [Aspergillus oryzae]
  misc_feature (19)..(403): NCBI GI: 238493221 Blast Desc: esterase, [Aspergillus flavus NRRL3357] gi|220696341|gb|EED52683.1| esterase, [Aspergillus flavus NRRL3357]
  misc_feature (17)..(397): NCBI GI: 258569533 Blast Desc: UREG_03086 [Uncinocarpus reesii 1704] gi|237903840|gb|EEP78241.1| UREG_03086 [Uncinocarpus reesii 1704]
  misc_feature (35)..(397): NCBI GI: 255950998 Blast Desc: Pc22g23750 [Penicillium chrysogenum Wisconsin 54-1255] gi|211593283|emb|CAP99663.1| Pc22g23750 [Penicillium chrysogenum Wisconsin 54-1255]
  misc_feature (64)..(398): NCBI GI: 156053728 Blast Desc: SS1G_05711 [Sclerotinia sclerotiorum 1980] gi|154703492|gb|EDO03231.1| SS1G_05711 [Sclerotinia sclerotiorum 1980]
  misc_feature (22)..(359): NCBI GI: 119467448 Blast Desc: beta-lactamase family protein [Neosartorya fischeri NRRL 181] gi|119405682|gb|EAW15633.1| beta-lactamase family protein [Neosartorya fischeri NRRL 181]
  misc_feature (22)..(397): NCBI GI: 171679793 Blast Desc: protein product [Podospora anserina] gi|170939522|emb|CAP64750.1| protein product [Podospora anserina]
  misc_feature (37)..(354): NCBI GI: 238839863 Blast Desc: beta-lactamase family protein [Microsporum canis CBS 113480]
MRRRQDSFYREAKPDYTSMHTVDRILNAQVEGKSPALHNASFIAIDRSSTIYAGSYGSRDLARTQPATLDAFYWIASLTKLSTAVACLIAVDQGLITLDQDVRKIVPELADLDVLLGFDDEGAPQLKKCTAPITLRGFAYDKGHEGLRRWAAYVGKTESIFTGNMEGYRFPLIFEPGQGWAYGPGMDWAGRTVEIVAKKDLESFMKANIWMPLGMHSTTFWPWSRPDLEEKLVEMTWREPNGTLIKGKNPFGPAADCCGGTGLWSTPADQIKLLSALLGDGAGIISEQSLDELLRPQTEDASYFRALVCGSGKNRAHLGQTWPEDYDGDFGLSSSINAEAFPGRRAANSANWQGMPGCHAKWLDRTTGLAGVFMSQVLPPGDKVVTETFCTIEEAVYRAHRSSF

SEQ ID NO: 11049 - DNA, 1233 bp, Muscodor strobelii
  misc_feature: SGI cDNA ID NO. 563533
  misc_feature: Encodes the peptide sequence at SEQ ID NO 11050
atggaaccctcaagtcagaatattcttattattggtgggggactcggcggcctctgtttagcacagggccttcgcaaagctggcgtccccttccaaatatttgaacgagatgcaaatgcaacctggcgagctcagggctaccgtttgcgtcttaacggtgaaggcgcaaatgccttgaaggagacactgtcgcccgagctatgggacaggttccagaagacctgttgttctgccgaacttggcgagactgatattaatgccattgatggatccattattgctagtcgagctggtggtagtcccgcaatgaagggactcaagccttatacttgcgaccgtacgaccttacgcgacatcctacgcgaaggcattgaagaccacatttcatacggcaagctcctccttcgctatgaagagacgcatagtgggatcgtcgcgtacttccaagatggcacaactgctgaggggcgcttcctcgtcggtgccgatggcaggggctctgtcacaagacgccaattcctacctagtcacgatcttttagataccgaaggcacctgcatctacgggaagacacctatcacacctcaacttcttgaacaatttcacccgaaagctttacgatggatgaccctgatcgttgatcgcacgcctctgacacaaacgttagacatcgacgacactgcagtcacgctactcttagagccaattcgatttaccaaggagaatgacgaatatgatcagtacataccggatgactacatgtattgggtcttggttgctaggaagcatatatttgatcttccggatgatatcccgttctctcaatactccggcgaggacgttgctgcactatcgctccgcatgacagattgctgggaccctagtatacgctcgctattacacttgcaggacaataatcaaagcagcttgctcaggatcctgtcagctgatcccaacatgaaagcatgggaaccatcgtccaaagtcaccgtgattggggacgcaattcatgcaatgagtccgtgtggaggtgttggcgctgtatcagcgttggtcgatggcgctaacctcgccaaggcgattgggacgaacggcatctcaaaggaaacaatcggggagtttgagagagctatgcgtgagttctgcggagccaacattcgccgaagttatttcggaggacgaaagatgtttggacagaggccatttgaggagtgtggaaaatacaagggctag

SEQ ID NO: 11050 - protein, 410 aa, Muscodor strobelii
  misc_feature: SGI Peptide ID NO. 563533
  misc_feature (5)..(389): Pfam Id: PF01494 Pfam Desc: FAD binding domain
  misc_feature (19)..(405): NCBI GI: 238842571 Blast Desc: cercosporin toxin biosynthesis protein [Microsporum canis CBS 113480]
  misc_feature (4)..(404): NCBI GI: 156053664 Blast Desc: SS1G_05679 [Sclerotinia sclerotiorum 1980] gi|154703460|gb|EDO03199.1| SS1G_05679 [Sclerotinia sclerotiorum 1980]
  misc_feature (8)..(404): NCBI GI: 169611006 Blast Desc: SNOG_08612 [Phaeosphaeria nodorum SN15] gi|160702200|gb|EAT83780.2| SNOG_08612 [Phaeosphaeria nodorum SN15]
  misc_feature (5)..(408): NCBI GI: 90656022 Blast Desc: cercosporin toxin biosynthesis protein [Cercospora nicotianae]
  misc_feature (4)..(389): NCBI GI: 145611384 Blast Desc: MGG_00427 [Magnaporthe grisea 70-15] gi|145018681|gb|EDK02960.1| MGG_00427 [Magnaporthe grisea 70-15]
  misc_feature (18)..(405): NCBI GI: 169765924 Blast Desc: [Aspergillus oryzae RIB40] gi|238482537|ref|XP_002372507.1| conserved [Aspergillus flavus NRRL3357] gi|83765288|dbj|BAE55431.1| protein product oryzae]
  misc_feature (18)..(405): NCBI GI: 66807967 Blast Desc: DDB_G0286363 [Dictyostelium discoideum AX4] gi|60466143|gb|EAL64206.1| DDB_G0286363 [Dictyostelium discoideum AX4]
  misc_feature (5)..(398): NCBI GI: 169613591 Blast Desc: SNOG_09926 [Phaeosphaeria nodorum SN15] gi|111061141|gb|EAT82261.1| SNOG_09926 [Phaeosphaeria nodorum SN15]
  misc_feature (25)..(405): NCBI GI: 284095580 Blast Desc: [Naegleria gruberi]
  misc_feature (25)..(405): NCBI GI: 145258566 Blast Desc: An04g07370 [Aspergillus niger] gi|134074705|emb|CAK44737.1| protein product [Aspergillus niger]
MEPSSQNILIIGGGLGGLCLAQGLRKAGVPFQIFERDANATWRAQGYRLRLNGEGANALKETLSPELWDRFQKTCCSAELGETDINAIDGSIIASRAGGSPAMKGLKPYTCDRTTLRDILREGIEDHISYGKLLLRYEETHSGIVAYFQDGTTAEGRFLVGADGRGSVTRRQFLPSHDLLDTEGTCIYGKTPITPQLLEQFHPKALRWMTLIVDRTPLTQTLDIDDTAVTLLLEPIRFTKENDEYDQYIPDDYMYWVLVARKHIFDLPDDIPFSQYSGEDVAALSLRMTDCWDPSIRSLLHLQDNNQSSLLRILSADPNMKAWEPSSKVTVIGDAIHAMSPCGGVGAVSALVDGANLAKAIGTNGISKETIGEFERAMREFCGANIRRSYFGGRKMFGQRPFEECGKYKG

SEQ ID NO: 11051 - DNA, 280 bp, Muscodor strobelii
  misc_feature: SGI EST ID NO. CUFF.26083.0
  misc_feature: Variant of the nucleotide sequence at SEQ ID NO 11049
ccgcaatgaagggactcaagccttatacttgcgaccgtacgaccttacgcgacatcctacgcgaaggcattgaagaccacatttcatacggcaagctcctccttcgctatgaagagacgcatagtgggatcgtcgcgtacttccaagatggcacaactgctgaggggcgcttcctcgtcggtgccgatggcaggggctctgtcacaagacgccaattcctacctagtcacgatcttttagataccgaaggcacctgcatctacgggaagacacctatcac

SEQ ID NO: 11052 - DNA, 414 bp, Muscodor strobelii
  misc_feature: SGI cDNA ID NO. 563534
  misc_feature: Encodes the peptide sequence at SEQ ID NO 11053
atgacgatagaccagaacatcttcgagccaatgctctgtctgacaatgtgtgcctatcgcaaagaagggatggacgaggaagactatcgcaagtacatgaccgaacggcatgtgcccctcgtccgagatttgatggttaagcatggaatcaacaaatacagcatggcgcacaatcctctcaagactcgtgccttgatgggcaaaataatggatgtgcagttcgccaacattgctgattacgactgtattgttcaaatccaatttcgtgacatcgaacaattcgttgctctgaaatcggatcccgagtacaaaagagttctcttcaaagaccatgagaactttgccgataccaagaagaccaaaatgaccatcggatatgttgaagatttcttgcgagacggagcgctcgtctag

SEQ ID NO: 11053 - protein, 137 aa, Muscodor strobelii
  misc_feature: SGI Peptide ID NO. 563534
  misc_feature (9)..(137): NCBI GI: 238842572 Blast Desc: conserved [Microsporum canis CBS 113480]
  misc_feature (12)..(137): NCBI GI: 119499690 Blast Desc: NFIA_101890 [Neosartorya fischeri NRRL 181] gi|119414767|gb|EAW24705.1| conserved [Neosartorya fischeri NRRL 181]
  misc_feature (12)..(137): NCBI GI: 70993074 Blast Desc: AFUA_4G14470 [Aspergillus fumigatus Af293] gi|66849019|gb|EAL89347.1| AFUA_4G14470 [Aspergillus fumigatus Af293] gi|159125716|gb|EDP50833.1| AFUB_071730 [Aspergillus
  misc_feature (12)..(137): NCBI GI: 119499638 Blast Desc: NFIA_101630 [Neosartorya fischeri NRRL 181] gi|119414741|gb|EAW24679.1| conserved [Neosartorya fischeri NRRL 181]
  misc_feature (12)..(137): NCBI GI: 242820014 Blast Desc: conserved [Talaromyces stipitatus ATCC 10500] gi|218713896|gb|EED13320.1| conserved [Talaromyces stipitatus ATCC 10500]
  misc_feature (11)..(136): NCBI GI: 67515739 Blast Desc: AN0151.2 [Aspergillus nidulans FGSC A4] gi|40746868|gb|EAA66024.1| AN0151.2 [Aspergillus nidulans FGSC A4]
  misc_feature (2)..(134): NCBI GI: 189193447 Blast Desc: conserved [Pyrenophora tritici-repentis Pt-1C-BFP] gi|187978626|gb|EDU45252.1| conserved [Pyrenophora tritici-repentis Pt-1C-BFP]
  misc_feature (11)..(137): NCBI GI: 259489650 Blast Desc: TPA: conserved [Aspergillus nidulans FGSC A4]
  misc_feature (12)..(137): NCBI GI: 212529426 Blast Desc: PMAA_031690 [Penicillium marneffei ATCC 18224] gi|210074268|gb|EEA28355.1| PMAA_031690 [Penicillium marneffei ATCC 18224]
  misc_feature (12)..(137): NCBI GI: 242797029 Blast Desc: TSTA_126440 [Talaromyces stipitatus ATCC 10500] gi|218719516|gb|EED18936.1| TSTA_126440 [Talaromyces stipitatus ATCC 10500]
MTIDQNIFEPMLCLTMCAYRKEGMDEEDYRKYMTERHVPLVRDLMVKHGINKYSMAHNPLKTRALMGKIMDVQFANIADYDCIVQIQFRDIEQFVALKSDPEYKRVLFKDHENFADTKKTKMTIGYVEDFLRDGALV

SEQ ID NO: 11054 - DNA, 205 bp, Muscodor strobelii
  misc_feature: SGI EST ID NO. CUFF.26089.0
  misc_feature: Variant of the nucleotide sequence at SEQ ID NO 11052
caacaaatacagcatggcgcacaatcctctcaagactcgtgccttgatgggcaaaataatggatgtgcagttcgccaacattgctgattacgactgtattgttcaaatccaatttcgtgacatcgaacaattcgttgctctgaaatcggatcccgagtacaaaagagttctcttcaaagaccatgagaactttgccgataccaag

SEQ ID NO: 11055 - DNA, 6423 bp, Muscodor strobelii
  misc_feature: SGI cDNA ID NO. 563535
  misc_feature: Encodes the peptide sequence at SEQ ID NO 11056
atggttactagcggccacgttcttctcttcggagaccaagcaagcgattttgttcccggattgcgttccttgctacggatcaaagacagtcccatgctgaagtcatttctcgagaagacacatttggcactacgacaggaaatcacacaacagagacgggaagtgcaagagttcttgcctcggttttcgaatacctttgacttgttcgctgcatacacagcagaacgggattcagcgccagtccttgctagtactcttacaaccatctatcagcttggaagcttcatacgctactatggagacggatgcagacagtatccttcaggcgacgacactttggccatgggaatgtgtactggccagctcgccgccagcgctgttgcatctgcttctaccgtcaatgagcttttggctcttgctgtggaagctgtagtagtcgcatttcgagttggccttcatgttactcgagttcgcgacctacttgcggatggtgcagacaagaatcagcattggtcttttgtcgtcccaaagctatctgctgacatcgcccaaagcaagattgacgagttctcccaaatggcaaatttgccaataggctcccggccgttcattggtacaattgccccatctagtgtcacaatattcgggcaaccaggcaccctgaagaattttttcggttcatctttgatgtctaacgtcaaatctatttctgttcccatcctcgctccataccatgagcctcatctttacgctaatacagacgtcgacgacattctcgaaagccttggcgaaaatgctgccggagctactccaaagctgtcggtgatctcaggcgtcactggagagcctattaaggcagtcactttcagagatcttctccacttctcgcttgaggaaattctgcgtcaacctttacgcttggatcgcattgtcctgtcccttgcggctggcgcgaaaattcacgatagctggacggtttcttcgatcagttcctccgctgcgcagatttttgtgagcacgctccaggagatcagccgaaaccccgtagagttagagcagataacgccagctccggcaacagacaaactcaagcctcgaaccaatacaactggacgagcagagcaatccggtattgctatcattggatactcgggtagatttcctgaggctgcgaacccagagggtctctggaagatccttcaggaaggacgcgactgccatcgcgaaattcccgccgaccgtttcgatatcgacgcccactacgacccgacagggaagaggaagaatactatgacgattcggaatggctgcttcattaacgagccaggagtcttcgatgctcgattttttaacatttcgccaaaggaagctgatcaagctgaccccgctcagcgacttgcgctaatgaccgcatacgaagccctcgagatgggcggtattgtgcctgacagaactccttcaactcagagggatcgtgttggcgtcttctatggcatgaccagcgatgactggcgtgaggttaacggcggacaagaagttggcacctacttcatcccaggtggcaatcgcgcttttacacctggccgtatcaactacttcttcaaattcagcggcccgagtgtgaacgtggacacggcctgctcgtcaagtgcggcagcgatccatctcgcttgcaattctctttggaggaatgattgcgataccgctattgcaggtggcacaaacgtcatgactaaccctgacaacttcgttggtctcgataaaggacacttcctctgtaagaacggcaactgtaaaacgttcgatgatggcgccgatggttactgtcgagcggatgctgttgggactgtagttctcaagagactggaagacgcactggccgataaggatcccattcaggctgtcatttgtggtgcttataccaatcattctgccgaagccgaatccattactcgtccacacatcggtgcgcaggctgctatcttccgtcgtatcctcaatgatgctggacacgatcccctcgatgttagctacattgagatgcatggaacgggaacacaggcaggtgatgcagtcgaaatgcggtctgttctagatgtgtttgctggcgagcgctctgggcgaactgccgcggatccgctctacttgggctcagtgaaagctaacattgggcatgccgagtcaggatcgggtgttgcatcactcatcaaggtcatgatgatgatgaaaaacagcgagatcccgaagcacattggtattaagaccaagatcaacaggggatttcccactgatctagcagaacgcggaattcgcattgcactagaggcaacgccatggcagcggccgacggatcgtagacggatggctttcctcaataatttcagtgccgctgggggcaactctgcacttctcctagaggacgctccagttgcagttgaacctgtggctgctgaagatgcaaggacagctcacgtcattgccgtttccgcgaaaacagccaagtcgcttcgtcgtaatattgagagactagccgagcacttgaccgagaatcctgacttggccctgggaagcttagcgtacacgaccactgcgcgtcgactacaccacaactatcgtctgtctgtgactggtcgcaccttggctgatatacaaaaagctctacagcgatctgctgacatggacgcccggcctatccctcgtaaaaccccacaggttgcttttgcatttactggacaaggctctgtctaccaagggatgggtaaaatcctccttgcgtctttcaaagtcatccgagaggaaattcgacgcctggatcgtattgcgcaaagcttcgggttcgactcgttcatgcctgtcacgaatgggcagacaactagtgaggctatcacccctcaggcctcccaactggcattggtgtgtttcgagattgccctggcccgtctgtggcagtccctggggattgtccccagcgtggtagtgggtcatagtctcggcgaatatgctgcgcttcacattgctggtgtcctttcagcccgtgatgtcgtatatctggttgggaccagagctcgcatcatgcaggaaaagtgtactgctggaacgcacgctatgctcgctgtgaagtctcgttctgcctcccttgccccctttctacaagaacatcatttggaaattgcttgtatcaatgcgccggagcagacggttcttgccggactcgatgctgatgttgagcgtacacaagacgcattgcggaccgctggtatgaagacgacgaagctgaacactccttatgcatttcacagcgcccaggtcgctcctgtgcaggaagagttcgagaaggccattcgcggtatcaccttcaagaacccgaaatttccagtcctgtcacctttattggcggatgttatcaccaatggtagtgactttactgcggcgtatctcggacgacattgccgcgagacggtcgactttgtcggcgctgtcaattccgcactctctcaaaaactcgtttcagaagacacgatttgcatggagatcgggcctgatcctattgttgcgggcatgttcaaggctgcaattggaccgtctaccagaatagttgcttctgtcagaaagagcgacggattatggcctacatttagtgacgccctgtcaacactctatcaagccggattggatctccagtggggtgaataccatagagactttgatcgattccaccaggtcatttcgctccctgcttactcgtgggacttaaagaaccactggatccagtacatgcacaattggtgcttgaccaagggtgacgcgcccgctgtggtgactgagcttccctcggcaccgaccgtgacgccgaagttcttgtctgccacatgtcaaaaggtcttgaagtcagaacacgggcgcgatagatcgtttgtgctggtcgagtccgacatcgctcatcctgagctgcgggcggtttttgaggcgcacaaagtgaacggtgctcctctgtgtccatcttccgcctatgccgatattgcaatgactctcggccattttttgaacgagggcaatacagtgaactccaacacaggtcttgaagtcgcggacatgaattccatgaagccattactcatgcggacacctggcgaaacagagctcttccgcgtatctgccgaagccgactgggccctacaggaagccaagatcgctttctacagtgtcaacgctcgcggtcagactacaattgagcatgctacttgcaccgtacgattcggcaatcctacatcctggatgcaggagtggaaacgttctgcacatctcgtgcggtctcgaatgctgagccttcagagatctgctgcagacggcagttgccatctcatcaaacgcggtatggcgtacaaattgttcgaaaactgcgttgagtatggagataagttccagggcctcgagggtgtataccttgacagcgaaggccatgaagcaacggcgcgagttgttttaaaggataaaagcacctgctttcaggccaatccctatcacatcgacagtctaggtcacctttcaggttttataatgaacgcaaccgaatcattcgactacaaacagcaggtgttcctcaaccatggatgggattctatgcgatgtgctaccaagctgtctcccgctgagacgtatcacacctatgtgaagatggaagcaacagatgctacgcactatgttggcgatgtttatatatttagtggcgataccatcatcggcgttaatcaaggcgtctcgtttcaatctgtacctaggaaggttcttgactatcttcttccaaagtccgccaaggccacgggagccccaatatcgcagacaaaccagcctagtaaggcctctgccaaccccactgtccctctcaacaacaagcgccgagcggataagacgcagactcccccaaagaccaagcttgcccaggcaaaagccgctgttctccctgagccagacgtcatcgcaaaaccattgttgctggtgcaagccatgagcatcatctctgaagagacaggcataccggttgctgaaatgcacaatgatctggttttagcggatatcggcgtcgattctctcctgtctctcacagtctgtagtaggttgcgcgaagagttagacatggatgtcagtcctacactttttatcgaatttcccgctgttcgggatctgaagagactctttggagctacatcggagtcagtgaccttgtcaaacagcagctcagatagcgcaacaccaagctctgcgttctcctatgaagagtgtgagacggctagcacggtcacccttgacgagcccgaaaagctaaaccctcccactgagaaatcatcaattcctgcgatttgcagtatcctagccgaagagattggagtcaccgtcgaagaggtgcagagtgcgccttcacttgccgaattggggcttgattcgctcatgtccttgacggtgctaggaaggcttcgtgaggaacttgatatagaccttcccatggacgcattgttatgcgacaatgtgtcgacgatccagagaaactacttgggtagcgctcctgtctctgaagccgtacccttgagtacgtcaactccacaaacacccgccaaccctcaatccacgacaagcataccaccagcaacgtcagtggtaattcagggaaacctgaagctctcgcgcaaggtactatttatgttccctgatggctctggatcggcgacatcttacggcgcgctgcctcgcgtttctcctgatgttgccttagtcgcgctgaactgcccatacatgaagcgtccccaggatatgaaatgtgctctccaggaccttactgccccgtatctagcggaagttcgccgacgccagccacatggtccctactacctcggcggatggtctgcaggtggcatatgcgcgtacgatgctgcagctgaactgattgcggcaggtgaaaaggtcgaaagcctcatcttactcgactcacccaaccccattcacttagagaaactacctgtgcgtatgttccatttcctcaacagtgtcggcatgttcgggtccgatggttcaaaatcgcctccggagtggctactccagcacttcaccgctttccttgaggctctcaataagtatgaaattaagccatttggacgtggcgctacgcccccaacttatgctatctgggctgcggacggagtttataagacaacaggaggcaagaagatggcagtgcagccagacgatactcgcgagatgaagtggttgctcaacgagcgcacggattttggaccgaatggatgggatgccgttattgagagcgataagcttcatatggaagtcttagggggagcaaaccattttaccatgatggagggccagcaaggtcacaggctcagtcagcttcttgcaaaggctatgggagtttga

SEQ ID NO: 11056 - protein, 2140 aa, Muscodor strobelii
  misc_feature: SGI Peptide ID NO. 563535
  misc_feature (906)..(1226): Pfam Id: PF00698 Pfam Desc: Acyl transferase domain
  misc_feature (376)..(625): Pfam Id: PF00109 Pfam Desc: Beta-ketoacyl synthase, N-terminal domain
  misc_feature (633)..(754): Pfam Id: PF02801 Pfam Desc: Beta-ketoacyl synthase, C-terminal domain
  misc_feature (1784)..(1849): Pfam Id: PF00550 Pfam Desc: Phosphopantetheine attachment site
  misc_feature (1666)..(1732): Pfam Id: PF00550 Pfam Desc: Phosphopantetheine attachment site
  misc_feature (1895)..(2137): Pfam Id: PF00975 Pfam Desc: Thioesterase domain
  misc_feature (1784)..(1837): Pfam Id: PF00550 Pfam Desc: Phosphopantetheine attachment site
  misc_feature (1671)..(1732): Pfam Id: PF00550 Pfam Desc: Phosphopantetheine attachment site
  misc_feature (1)..(2138): NCBI GI: 255955711 Blast Desc: Pc21g16000 [Penicillium chrysogenum Wisconsin 54-1255] gi|211590319|emb|CAP96497.1| Pc21g16000 [Penicillium chrysogenum Wisconsin 54-1255]
  misc_feature (7)..(2140): NCBI GI: 44888969 Blast Desc: WA_EMENI RecName: Full=Conidial yellow pigment biosynthesis polyketide synthase; Short=PKS gi|14715677|emb|CAA46695.2| polyketide synthase for naphthopyrone
  misc_feature (7)..(2138): NCBI GI: 211909601 Blast Desc: polyketide synthase Alb1p [Aspergillus fumigatus]
  misc_feature (7)..(2138): NCBI GI: 159130150 Blast Desc: polyketide synthetase PksP [Aspergillus fumigatus A1163]
  misc_feature (7)..(2138): NCBI GI: 145242622 Blast Desc: An09g05730 [Aspergillus niger] gi|134078436|emb|CAL00851.1| protein product [Aspergillus niger]
  misc_feature (1)..(2138): NCBI GI: 242792088 Blast Desc: conidial pigment polyketide synthase PksP/Alb1 [Talaromyces stipitatus ATCC 10500] gi|218718470|gb|EED17890.1| conidial pigment polyketide synthase PksP/Alb1 [Talaromyces ATCC
  misc_feature (7)..(2138): NCBI GI: 71002828 Blast Desc: conidial pigment polyketide synthase PksP/Alb1 [Aspergillus fumigatus Af293] gi|66853733|gb|EAL94057.1| conidial pigment polyketide synthase PksP/Alb1 [Aspergillus fumigatus
  misc_feature (7)..(2138): NCBI GI: 3136092 Blast Desc: polyketide synthase [Aspergillus fumigatus]
  misc_feature (11)..(2138): NCBI GI: 211909591 Blast Desc: polyketide synthase Alb1p [Aspergillus fumigatus]
  misc_feature (7)..(2138): NCBI GI: 3163925 Blast Desc: polyketide synthase [Aspergillus fumigatus]
  misc_feature: Useful for fungicidal and/or biocontrol applications
MVTSGHVLLFGDQASDFVPGLRSLLRIKDSPMLKSFLEKTHLALRQEITQQRREVQEFLPRFSNTFDLFAAYTAERDSAPVLASTLTTIYQLGSFIRYYGDGCRQYPSGDDTLAMGMCTGQLAASAVASASTVNELLALAVEAVVVAFRVGLHVTRVRDLLADGADKNQHWSFVVPKLSADIAQSKIDEFSQMANLPIGSRPFIGTIAPSSVTIFGQPGTLKNFFGSSLMSNVKSISVPILAPYHEPHLYANTDVDDILESLGENAAGATPKLSVISGVTGEPIKAVTFRDLLHFSLEEILRQPLRLDRIVLSLAAGAKIHDSWTVSSISSSAAQIFVSTLQEISRNPVELEQITPAPATDKLKPRTNTTGRAEQSGIAIIGYSGRFPEAANPEGLWKILQEGRDCHREIPADRFDIDAHYDPTGKRKNTMTIRNGCFINEPGVFDARFFNISPKEADQADPAQRLALMTAYEALEMGGIVPDRTPSTQRDRVGVFYGMTSDDWREVNGGQEVGTYFIPGGNRAFTPGRINYFFKFSGPSVNVDTACSSSAAAIHLACNSLWRNDCDTAIAGGTNVMTNPDNFVGLDKGHFLCKNGNCKTFDDGADGYCRADAVGTVVLKRLEDALADKDPIQAVICGAYTNHSAEAESITRPHIGAQAAIFRRILNDAGHDPLDVSYIEMHGTGTQAGDAVEMRSVLDVFAGERSGRTAADPLYLGSVKANIGHAESGSGVASLIKVMMMMKNSEIPKHIGIKTKINRGFPTDLAERGIRIALEATPWQRPTDRRRMAFLNNFSAAGGNSALLLEDAPVAVEPVAAEDARTAHVIAVSAKTAKSLRRNIERLAEHLTENPDLALGSLAYTTTARRLHHNYRLSVTGRTLADIQKALQRSADMDARPIPRKTPQVAFAFTGQGSVYQGMGKILLASFKVIREEIRRLDRIAQSFGFDSFMPVTNGQTTSEAITPQASQLALVCFEIALARLWQSLGIVPSVVVGHSLGEYAALHIAGVLSARDVVYLVGTRARIMQEKCTAGTHAMLAVKSRSASLAPFLQEHHLEIACINAPEQTVLAGLDADVERTQDALRTAGMKTTKLNTPYAFHSAQVAPVQEEFEKAIRGITFKNPKFPVLSPLLADVITNGSDFTAAYLGRHCRETVDFVGAVNSALSQKLVSEDTICMEIGPDPIVAGMFKAAIGPSTRIVASVRKSDGLWPTFSDALSTLYQAGLDLQWGEYHRDFDRFHQVISLPAYSWDLKNHWIQYMHNWCLTKGDAPAVVTELPSAPTVTPKFLSATCQKVLKSEHGRDRSFVLVESDIAHPELRAVFEAHKVNGAPLCPSSAYADIAMTLGHFLNEGNTVNSNTGLEVADMNSMKPLLMRTPGETELFRVSAEADWALQEAKIAFYSVNARGQTTIEHATCTVRFGNPTSWMQEWKRSAHLVRSRMLSLQRSAADGSCHLIKRGMAYKLFENCVEYGDKFQGLEGVYLDSEGHEATARVVLKDKSTCFQANPYHIDSLGHLSGFIMNATESFDYKQQVFLNHGWDSMRCATKLSPAETYHTYVKMEATDATHYVGDVYIFSGDTIIGVNQGVSFQSVPRKVLDYLLPKSAKATGAPISQTNQPSKASANPTVPLNNKRRADKTQTPPKTKLAQAKAAVLPEPDVIAKPLLLVQAMSIISEETGIPVAEMHNDLVLADIGVDSLLSLTVCSRLREELDMDVSPTLFIEFPAVRDLKRLFGATSESVTLSNSSSDSATPSSAFSYEECETASTVTLDEPEKLNPPTEKSSIPAICSILAEEIGVTVEEVQSAPSLAELGLDSLMSLTVLGRLREELDIDLPMDALLCDNVSTIQRNYLGSAPVSEAVPLSTSTPQTPANPQSTTSIPPATSVVIQGNLKLSRKVLFMFPDGSGSATSYGALPRVSPDVALVALNCPYMKRPQDMKCALQDLTAPYLAEVRRRQPHGPYYLGGWSAGGICAYDAAAELIAAGEKVESLILLDSPNPIHLEKLPVRMFHFLNSVGMFGSDGSKSPPEWLLQHFTAFLEALNKYEIKPFGRGATPPTYAIWAADGVYKTTGGKKMAVQPDDTREMKWLLNERTDFGPNGWDAVIESDKLHMEVLGGANHFTMMEGQQGHRLSQLLAKAMGV

SEQ ID NO: 11057 - DNA, 660 bp, Muscodor strobelii
  misc_feature: SGI cDNA ID NO. 563536
  misc_feature: Encodes the peptide sequence at SEQ ID NO 11058
atgattagcgaagcaggcatagagccaaaggatgtggccgccaaggcgtgtagcaacgttcacattttcgttgctcgtgaaactgacgagccctatcctggacgacaagctggattgatcggggctatctgctatgggctcaaagattgtgcctatgaggatcttatatatcccgctaattacccctactgcgcttcttctcaggcaggagtgatggatggcaagaagcaaatcatggaatatgctcagcgctgccctcactccaagatcgttccgactggatactctcaggtagcggaggtactgggcgacatcctcggtggagggggcggcaactacttcggctgtcaccaagacaccaggtcacctcttaagagagatggtatcgcgaccaaaaacatcaaagctattaccttgttcagtgacgttcgccacgtccggaaccaaccctacaacactggtaccgccacaggcggctacggcctctgccctcggactggatcctcactcgtgaatttgaacaagtacgagaacaagatcagatctttgtgcttgcaaggtgacaatgtctgcggaggcggtggtgatggaagtgctcacacgacgtattttgagatctacacacaggaggcagcaggatggatcaggagtaaactttaa

SEQ ID NO: 11058 - protein, 219 aa, Muscodor strobelii
  misc_feature: SGI Peptide ID NO. 563536
  misc_feature (15)..(219): Pfam Id: PF01083 Pfam Desc: Cutinase
  misc_feature (57)..(219): Pfam Id: PF01083 Pfam Desc: Cutinase
  misc_feature (17)..(219): NCBI GI: 46140067 Blast Desc: FG11548.1 [Gibberella zeae PH-1]
  misc_feature (12)..(219): NCBI GI: 46111569 Blast Desc: FG02666.1 [Gibberella zeae PH-1]
  misc_feature (16)..(219): NCBI GI: 256725988 Blast Desc: NECHADRAFT_8492 [Nectria haematococca mpVI 77-13-4]
  misc_feature (12)..(215): NCBI GI: 145607427 Blast Desc: MGG_04237 [Magnaporthe grisea 70-15] gi|145014983|gb|EDJ99551.1| MGG_04237 [Magnaporthe grisea 70-15]
  misc_feature (17)..(218): NCBI GI: 169620030 Blast Desc: SNOG_13216 [Phaeosphaeria nodorum SN15] gi|111058423|gb|EAT79543.1| SNOG_13216 [Phaeosphaeria nodorum SN15]
  misc_feature (6)..(219): NCBI GI: 189197909 Blast Desc: acetylxylan esterase precursor [Pyrenophora tritici-repentis Pt-1C-BFP] gi|187981240|gb|EDU47866.1| acetylxylan esterase precursor [Pyrenophora tritici-repentis
  misc_feature (5)..(215): NCBI GI: 39969811 Blast Desc: MGG_10515 [Magnaporthe grisea 70-15] gi|145010136|gb|EDJ94792.1| MGG_10515 [Magnaporthe grisea 70-15]
  misc_feature (17)..(219): NCBI GI: 145241506 Blast Desc: An09g00790 [Aspergillus niger] gi|134077937|emb|CAL00335.1| protein product [Aspergillus niger]
  misc_feature (17)..(219): NCBI GI: 189206690 Blast Desc: conserved [Pyrenophora tritici-repentis Pt-1C-BFP] gi|187975772|gb|EDU42398.1| conserved [Pyrenophora tritici-repentis Pt-1C-BFP]
  misc_feature (14)..(219): NCBI GI: 145606669 Blast Desc: MGG_12016 [Magnaporthe grisea 70-15] gi|145014343|gb|EDJ98911.1| MGG_12016 [Magnaporthe grisea 70-15]
  misc_feature (7)..(219): SWISSPROT Homolog: EC 3.1.1.72 Acetylxylan esterase
MISEAGIEPKDVAAKACSNVHIFVARETDEPYPGRQAGLIGAICYGLKDCAYEDLIYPANYPYCASSQAGVMDGKKQIMEYAQRCPHSKIVPTGYSQVAEVLGDILGGGGGNYFGCHQDTRSPLKRDGIATKNIKAITLFSDVRHVRNQPYNTGTATGGYGLCPRTGSSLVNLNKYENKIRSLCLQGDNVCGGGGDGSAHTTYFEIYTQEAAGWIRSKL

SEQ ID NO: 11059 - DNA, 284 bp, Muscodor strobelii
  misc_feature: SGI EST ID NO. CUFF.26132.0
  misc_feature: Variant of the nucleotide sequence at SEQ ID NO 11057
cttatatatcccgctaattacccctactgcgcttcttctcaggcaggagtgatggatggcaagaagcaaatcatggaatatgctcagcgctgccctcactccaagatcgttccgactggatactctcaggtagcggaggtactgggcgacatcctcggtggagggggcggcaactacttcggctgtcaccaagacaccaggtcacctcttaagagagatggtatcgcgaccaaaaacatcaaagctattaccttgttcagtgacgttcgccacgtccggaacca

SEQ ID NO: 11060 - DNA, 1890 bp, Muscodor strobelii
  misc_feature: SGI cDNA ID NO. 563537
  misc_feature: Encodes the peptide sequence at SEQ ID NO 11061
atgaaagaaggattggaacagccgccatcattgcctaccggctcgcgattactcctcactctcatcgcgtgctgcatcgttcttttgctgcaagctctggataccactatcgtatcaactgccattcctgctatcgcaaatgaatttggaacaacattggacgaagggtggtatggctccgcttacttcctcggcatgtgtgctttccagatcttctggggtcgcctgtacactttctacgacctgaagacggtatacattacttcgattgtcattttcgagatcggcagtgccgtatgtggtgctgctcccacatctgcagcatttatagttgggcgcgccattgccggagtgggcgccggaggtgtcttttcgggaagctttactacggtagctttcagtgtcccattagtcaagcgtcccatatatgctagtattcttggcaccgtatatggtgtcgctagtgtgcttggacctcccattggtggtgccttcacaaccaatgtaacttggcgatggagcttctatataaatctgcctctcggggcggtcgtcatcgcgggtctggtgcctttctttaaatcacccgaggcagctgctaggcttaaacatttaccgacaaaggaaaagattcaacgattggacctcttcggcacaacgctcatgatcggatcagtggcttccctgcttctcgctctgcaattagcgcctcagacatttgcttgggacaacggccgcatcgtctctctcttcgaacttttcggtttcttgtttattgcatgggtatgttggcagatataccttggcccaaaagctacgatcaccaaagccgttattggccagcgtagtgtcgcagccgcttcttggtatgcctttgctcaaggtggagtgaactttggcattttatactacgcgcccatatggtttcagggtgtgagagggaaagatgcggtcaatagtggtcttgatatagtaacctttgttgctggtcagactgttgtcatgctggcgttgggcttctatctctctcgaggtggatattcggctccgttcatgatcttatctgtcgctattacactcattgcaacaggtcttttgaatacctggacacccagtataagcgatgataaagtattcggctatttgacattgtacggtattggtcaaggttttggctggcagcagccaactttgatcgctcagactatgctttcagccgcagacattccgaccggtactgcgctcgcaaacatctgcaaactcctcggcggtactctttcagtctccattgctcagaatctattcaacagcaagttgatgaagcttgttgcgcaacgcattccctctctggatccggaatacctactgactattggggctttggagctgcgtaacaagctggacccagatgttcttcccgctgtcattgactgttataacgatgctctcaaagatgtctggtggatgctcttcgcctttgcttcggtcgccctctttggcgcgctcacagtcgagtggaggagcgtcacggacaaggtcgccaatcaagctcccccggcacgtcctctttcacagagaccactgtcgcaggccatgcggccgacatcccaagccatacggccaccatcacaggcagcccaatcacatgtatgctgtaattgtcaacgaatgtcgattcaatcatggccttcaaccgtctcatcttgcgaagatctcaccaggacgtactcaggcgacactcttgatgctcttacgatcaggaagaacaggagatcagagttctggagattttccaacatcactgcttaccgttgggatgaggagtcaaattatgatcaggatatcgtagatcatccagaagctcacatgatccatgcatttggcgtttag

SEQ ID NO: 11061 - protein, 629 aa, Muscodor strobelii
  misc_feature: SGI Peptide ID NO. 563537
  misc_feature (24)..(428): Pfam Id: PF07690 Pfam Desc: Major Facilitator Superfamily
  misc_feature (19)..(122): Pfam Id: PF00083 Pfam Desc: Sugar (and other) transporter
  misc_feature (34)..(505): NCBI GI: 238842574 Blast Desc: major facilitator superfamily transporter [Microsporum canis CBS 113480]
  misc_feature (12)..(517): NCBI GI: 156036306 Blast Desc: conserved [Sclerotinia sclerotiorum 1980] gi|154698247|gb|EDN97985.1| conserved [Sclerotinia sclerotiorum 1980]
  misc_feature (12)..(512): NCBI GI: 110265121 Blast Desc: major facilitator superfamily transporter [Mycosphaerella graminicola]
  misc_feature (3)..(517): NCBI GI: 14389419 Blast Desc: AF238225_1 DHA14-like major facilitator [Botryotinia fuckeliana]
  misc_feature (13)..(512): NCBI GI: 238844737 Blast Desc: major facilitator superfamily transporter [Microsporum canis CBS 113480]
  misc_feature (14)..(512): NCBI GI: 226282407 Blast Desc: major facilitator superfamily transporter [Paracoccidioides brasiliensis Pb01]
  misc_feature (14)..(512): NCBI GI: 225680738 Blast Desc: vacuolar basic amino acid transporter 3 [Paracoccidioides brasiliensis Pb03]
  misc_feature (14)..(512): NCBI GI: 226292424 Blast Desc: major facilitator superfamily transporter [Paracoccidioides brasiliensis Pb18]
  misc_feature (12)..(518): NCBI GI: 255950952 Blast Desc: Pc22g23520 [Penicillium chrysogenum Wisconsin 54-1255] gi|211593260|emb|CAP99640.1| Pc22g23520 [Penicillium chrysogenum Wisconsin 54-1255]
  misc_feature (6)..(512): NCBI GI: 164422928 Blast Desc: NCU10945 [Neurospora crassa OR74A] gi|157069875|gb|EAA28867.2| conserved [Neurospora crassa OR74A]
MKEGLEQPPSLPTGSRLLLTLIACCIVLLLQALDTTIVSTAIPAIANEFGTTLDEGWYGSAYFLGMCAFQIFWGRLYTFYDLKTVYITSIVIFEIGSAVCGAAPTSAAFIVGRAIAGVGAGGVFSGSFTTVAFSVPLVKRPIYASILGTVYGVASVLGPPIGGAFTTNVTWRWSFYINLPLGAVVIAGLVPFFKSPEAAARLKHLPTKEKIQRLDLFGTTLMIGSVASLLLALQLAPQTFAWDNGRIVSLFELFGFLFIAWVCWQIYLGPKATITKAVIGQRSVAAASWYAFAQGGVNFGILYYAPIWFQGVRGKDAVNSGLDIVTFVAGQTVVMLALGFYLSRGGYSAPFMILSVAITLIATGLLNTWTPSISDDKVFGYLTLYGIGQGFGWQQPTLIAQTMLSAADIPTGTALANICKLLGGTLSVSIAQNLFNSKLMKLVAQRIPSLDPEYLLTIGALELRNKLDPDVLPAVIDCYNDALKDVWWMLFAFASVALFGALTVEWRSVTDKVANQAPPARPLSQRPLSQAMRPTSQAIRPPSQAAQSHVCCNCQRMSIQSWPSTVSSCEDLTRTYSGDTLDALTIRKNRRSEFWRFSNITAYRWDEESNYDQDIVDHPEAHMIHAFGV

SEQ ID NO: 11062 - DNA, 1854 bp, Muscodor strobelii
  misc_feature: SGI cDNA ID NO. 563538
  misc_feature: Encodes the peptide sequence at SEQ ID NO 11063
atgtggcggaagattctcacgacagtaattctagggttgggggcaggacttcctgtcatccatggccacccttctccttcgaaaaatgtcgcaagcccgcgcaagttcgacttggttatcacccaggaaaatcatgcgccgaatggcatcagccgagaaatgattttagtaaacggaatgtctcctggacccttgatcgacattaatcaaggcgatgaggtttggatcacagttcacaacaagcttccagtaccaacgacgatgcattggcatggtatcgaacaattcaacacaccttggtcagacggtgtacccggcgtgactcagagggaaatccagtcgggaaagtcgttcgtctacaaatggactgcggatcagtacggcgagtattggtatcatgctcatcacaagggccagctgaatgacggtcaatatgggccgctcatcatacaccccagaaaggaaacacctacgccgttcaagctcatctctcaagacatcagtactttgcaggcaatcgaaaaggccgctttcaacatcaagcctttgatgctgagcgattggagaaatatcaatgccgatgaggcctgggacattgagatcgctgctagcatggaacttccttgcttcgattcgctgctcattaacgggcaaggacgagtgaaatgcttgggtgccgatgagtatgcatccttggtaacgccaaagatgaagggcttgcttggaattttcaacgagactagcttgggacctaagggatgtcttcccaagaaagtagctgctttcgccgttgctggtggtttcccaaccaacacatcagcaattccagctgagatctttgatatctgtacccctaccagcgcaaagaatcctgtgtacaccatcaacgaatcttcttgcggtaaggacaagagcggcacatgggctgcgttcgaaatcgtgggtacatacacgactttccaaactgccttctcaattgacgggctgtcaatgtgggtgtatgcagtagatgcagagttcattgagccccagctggtcgatgccatcagtgtcataaacggcgacaggtattctattctggtccatctcgtcgatagcgccgattacacaattcgtcactctgcaaccttgcctatccaagtgatcagtggcgaagccactctttcctacaggtccaacaaatcgacacatcatgtcgacaaagaactcacgcagcatgttcttgataacgggctaccggcaagcccagatgtaatcttcttcaaccagacaacacagaaggcatacccccccattgcggttggtcaaaatgcagatcaaaccttcatactcactttgagcaatactcaaggtttaggatatatgtgggcgatgaatggcacatcgtcgccaatgtcgctcgatagctctaatgaacccgttcttttcaagccacagcccgatcttgtcaacaatcttacgattacaactcaaaataacacgtgggtggacctcatcttccaggtcacgcaattcccacagccagcgcatcctatccacaagcatggtaacaagatgttcctcattgggtctggcatgggcgtgttcaactacaccagtgtagcagaggctatcaaggtcattcctcagaacttcaacttagtcgatccgcctcggagagatgggtttgccacgattgacgcagctaggaatccaacttggatcgctgtccggtaccaggtgacaaatcctggggcgtggttccttcattgccacattagtagccatctggaaggcggtatggccatcgttattcaagacggcgttgactccttcccctcgataccatctgaatatcttaattatggagcataa

SEQ ID NO: 11063 - protein, 617 aa, Muscodor strobelii
  misc_feature: SGI Peptide ID NO. 563538
  misc_feature (179)..(393): Pfam Id: PF00394 Pfam Desc: Multicopper oxidase
  misc_feature (475)..(604): Pfam Id: PF07731 Pfam Desc: Multicopper oxidase
  misc_feature (39)..(155): Pfam Id: PF07732 Pfam Desc: Multicopper oxidase
  misc_feature (324)..(393): Pfam Id: PF00394 Pfam Desc: Multicopper oxidase
  misc_feature (487)..(604): Pfam Id: PF07731 Pfam Desc: Multicopper oxidase
  misc_feature (33)..(615): NCBI GI: 39946754 Blast Desc: MGG_08523 [Magnaporthe grisea 70-15] gi|145012365|gb|EDJ97021.1| MGG_08523 [Magnaporthe grisea 70-15]
  misc_feature (34)..(616): NCBI GI: 152013646 Blast Desc: Lcc5 [Fusarium oxysporum]
  misc_feature (34)..(612): NCBI GI: 256720703 Blast Desc: NECHADRAFT_50101 [Nectria haematococca mpVI 77-13-4]
  misc_feature (34)..(616): NCBI GI: 46137759 Blast Desc: FG10395.1 [Gibberella zeae PH-1]
  misc_feature (35)..(612): NCBI GI: 145231072 Blast Desc: An01g14010 [Aspergillus niger] gi|134055928|emb|CAK37405.1| protein product [Aspergillus niger]
  misc_feature (35)..(612): NCBI GI: 121700853 Blast Desc: laccase TilA, [Aspergillus clavatus NRRL 1] gi|119396834|gb|EAW07265.1| laccase TilA, [Aspergillus clavatus NRRL 1]
  misc_feature (31)..(612): NCBI GI: 119494739 Blast Desc: laccase TilA, [Neosartorya fischeri NRRL 181] gi|119412345|gb|EAW22286.1| laccase TilA, [Neosartorya fischeri NRRL 181]
  misc_feature (9)..(612): NCBI GI: 145259490 Blast Desc: An04g10400 [Aspergillus niger] gi|134075020|emb|CAK44820.1| protein product [Aspergillus niger]
  misc_feature (35)..(612): NCBI GI: 70996356 Blast Desc: laccase TilA [Aspergillus fumigatus Af293] gi|66850568|gb|EAL90895.1| laccase TilA [Aspergillus fumigatus Af293] gi|159131687|gb|EDP56800.1| laccase TilA, [Aspergillus
  misc_feature (27)..(612): NCBI GI: 115397631 Blast Desc: ATEG_05229 [Aspergillus terreus NIH2624] gi|114192598|gb|EAU34298.1| ATEG_05229 [Aspergillus terreus NIH2624]
  misc_feature (38)..(607): SWISSPROT Homolog: EC 1.10.3.2 Laccase
MWRKILTTVILGLGAGLPVIHGHPSPSKNVASPRKFDLVITQENHAPNGISREMILVNGMSPGPLIDINQGDEVWITVHNKLPVPTTMHWHGIEQFNTPWSDGVPGVTQREIQSGKSFVYKWTADQYGEYWYHAHHKGQLNDGQYGPLIIHPRKETPTPFKLISQDISTLQAIEKAAFNIKPLMLSDWRNINADEAWDIEIAASMELPCFDSLLINGQGRVKCLGADEYASLVTPKMKGLLGIFNETSLGPKGCLPKKVAAFAVAGGFPTNTSAIPAEIFDICTPTSAKNPVYTINESSCGKDKSGTWAAFEIVGTYTTFQTAFSIDGLSMWVYAVDAEFIEPQLVDAISVINGDRYSILVHLVDSADYTIRHSATLPIQVISGEATLSYRSNKSTHHVDKELTQHVLDNGLPASPDVIFFNQTTQKAYPPIAVGQNADQTFILTLSNTQGLGYMWAMNGTSSPMSLDSSNEPVLFKPQPDLVNNLTITTQNNTWVDLIFQVTQFPQPAHPIHKHGNKMFLIGSGMGVFNYTSVAEAIKVIPQNFNLVDPPRRDGFATIDAARNPTWIAVRYQVTNPGAWFLHCHISSHLEGGMAIVIQDGVDSFPSIPSEYLNYGA

SEQ ID NO: 11064 - DNA, 519 bp, Muscodor strobelii
  misc_feature: SGI EST ID NO. CUFF.26147.0
  misc_feature: Variant of the nucleotide sequence at SEQ ID NO 11062
cgaacaattcaacacaccttggtcagacggtgtacccggcgtgactcagagggaaatccagtcgggaaagtcgttcgtctacaaatggactgcggatcagtacggcgagtattggtatcatgctcatcacaagggccagctgaatgacggtcaatatgggccgctcatcatacaccccagaaaggaaacacctacgccgttcaagctcatctctcaagacatcagtactttgcaggcaatcgaaaaggccgctttcaacatcaagcctttgatgctgagcgattggagaaatatcaatgccgatgaggcctgggacattgagatcgctgctagcatggaacttccttgcttcgattcgctgctcattaacgggcaaggacgagtgaaatgcttgggtgccgatgagtatgcatccttggtaacgccaaagatgaagggcttgcttggaattttcaacgagactagcttgggacctaagggatgtcttcccaagaaagtagctgctttcgccgttgctgg

SEQ ID NO: 11065 - DNA, 1608 bp, Muscodor strobelii
  misc_feature: SGI cDNA ID NO. 563539
  misc_feature: Encodes the peptide sequence at SEQ ID NO 11066
atgaagtctttcctagctgccgcccagcttttgctggttgctggcgtctctgccagcttcgagagagctcgtactcctggtatgcaacttggtcctatcgacgaggacatgctcagagctgcggacttctcgaacggcacagttggatggggtacctttgatcagctcctcgaccacaacaacccttccctcggtaccttcaagcagcgatggtggtatggtgcacaatactggaagggtcctacttctcccatcatcatggtcaacccgggcgagcaagccgcaaccaacttcaacatttcgtatacttccttccagcgtctcactggtttgatggctcaacaggttggaggtgccgtcgtcattcttgagcacagatattggggagagtcgtcaccttttgaggagctgactaacgacaacctcgagtaccttactctcgagaactcgatcaaggacaacacctatttcgctaacaactgggttgctccttttgactcgaccggcaagtctactgccaaggacgctccttgggtattcaccggcggttcttaccctggcgccttggctggctggattgcttctgtcgaccctggcactttctgggcttactatggcacgagcggtgtcgtggaggctatcagcgacttctggcaatacttcacgcctgttcaggaagcaactcccgcgaactgctccagggatgtcaatgctgtcatcgaatatgtcgataataccatgaagcatggcagccacaaggaaaagaccaaactgaaggcaaaattcggtctccagagtctgcaggatgctgatttcggatccgctctcgagaacggcccctggacgtggcaatccggccaattctactctcagccgctcaatggttataccccattctaccagttctgcgactatgtcgagaatgtctggccaaactccaccaacaaagttccaggcgcgaaaggagtaggcttgcacaaagctttggaaggctatgccaaatggtggaacgaggttgaattccccggctactgcgaaagctacggctacttcgagggtgaattcaacgcggagtgtcttcagggcttgaacgcctcaaatcccatctaccacgatcttaccccttctaacgccggaaatcgccaatggaactggatgctctgcgatgctccgttcgagtattggcaagatggagcccccaagggccagagaaccctggtctctcgtcttgtgaccgcagagtactggcgctcgcagtgcgcactttggtttcccggtaaggactttggcttcgacaagggcaagtccgccgagagcgtcaacaaatacactggcgggtggttcgaaaccaacacgactcgtctgatgatgaccaacggcgagtgggacccgtggcgtgactcgaccttgagctctatctaccgccctggcggtcctctcaagagcaccgagcagcttccaatccgtgtcctgaagcacggtactcactgttcggatctctacggccagaactgggctgtcaacgaagatgccaactccaccgcgtggagcgaggttctccagatgaagggatggattcaggagttttacgagactggtaaatactaa

SEQ ID NO: 11066 - protein, 535 aa, Muscodor strobelii
  misc_feature: SGI Peptide ID NO. 563539
  misc_feature (55)..(523): Pfam Id: PF05577 Pfam Desc: Serine carboxypeptidase S28
  misc_feature (55)..(226): Pfam Id: PF05577 Pfam Desc: Serine carboxypeptidase S28
  misc_feature (24)..(531): NCBI GI: 85090193 Blast Desc: NCU09992 [Neurospora crassa OR74A] gi|28919648|gb|EAA29065.1| conserved [Neurospora crassa OR74A]
  misc_feature (17)..(532): NCBI GI: 39968365 Blast Desc: MGG_02275 [Magnaporthe grisea 70-15] gi|145014159|gb|EDJ98800.1| MGG_02275 [Magnaporthe grisea 70-15]
  misc_feature (52)..(529): NCBI GI: 121711132 Blast Desc: serine peptidase, [Aspergillus clavatus NRRL 1] gi|119401332|gb|EAW11756.1| serine peptidase, [Aspergillus clavatus NRRL 1]
  misc_feature (34)..(534): NCBI GI: 39942514 Blast Desc: MGG_03337 [Magnaporthe grisea 70-15] gi|145015650|gb|EDK00140.1| MGG_03337 [Magnaporthe grisea 70-15]
  misc_feature (49)..(529): NCBI GI: 119497857 Blast Desc: serine peptidase, [Neosartorya fischeri NRRL 181] gi|119413850|gb|EAW23789.1| serine peptidase, [Neosartorya fischeri NRRL 181]
  misc_feature (1)..(530): NCBI GI: 145239841 Blast Desc: serine peptidase, [Neosartorya fischeri NRRL 181] gi|119413850|gb|EAW23789.1| serine peptidase, [Neosartorya fischeri NRRL 181]
  misc_feature (49)..(529): NCBI GI: 146322738 Blast Desc: serine peptidase [Aspergillus fumigatus Af293] gi|129556778|gb|EAL87223.2| serine peptidase, [Aspergillus fumigatus Af293]
  misc_feature (49)..(529): NCBI GI: 159128675 Blast Desc: serine peptidase, [Aspergillus fumigatus A1163]
  misc_feature (1)..(530): NCBI GI: 156058698 Blast Desc: SS1G_03361 [Sclerotinia sclerotiorum 1980] gi|154701148|gb|EDO00887.1| SS1G_03361 [Sclerotinia sclerotiorum 1980]
  misc_feature (47)..(530): NCBI GI: 154303088 Blast Desc: BC1G_09564 [Botryotinia fuckeliana B05.10] gi|150855027|gb|EDN30219.1| BC1G_09564 [Botryotinia fuckeliana B05.10]
MKSFLAAAQLLLVAGVSASFERARTPGMQLGPIDEDMLRAADFSNGTVGWGTFDQLLDHNNPSLGTFKQRWWYGAQYWKGPTSPIIMVNPGEQAATNFNISYTSFQRLTGLMAQQVGGAVVILEHRYWGESSPFEELTNDNLEYLTLENSIKDNTYFANNWVAPFDSTGKSTAKDAPWVFTGGSYPGALAGWIASVDPGTFWAYYGTSGVVEAISDFWQYFTPVQEATPANCSRDVNAVIEYVDNTMKHGSHKEKTKLKAKFGLQSLQDADFGSALENGPWTWQSGQFYSQPLNGYTPFYQFCDYVENVWPNSTNKVPGAKGVGLHKALEGYAKWWNEVEFPGYCESYGYFEGEFNAECLQGLNASNPIYHDLTPSNAGNRQWNWMLCDAPFEYWQDGAPKGQRTLVSRLVTAEYWRSQCALWFPGKDFGFDKGKSAESVNKYTGGWFETNTTRLMMTNGEWDPWRDSTLSSIYRPGGPLKSTEQLPIRVLKHGTHCSDLYGQNWAVNEDANSTAWSEVLQMKGWIQEFYETGKY

SEQ ID NO: 11067 - DNA, 2031 bp, Muscodor strobelii
  misc_feature: SGI EST ID NO. CUFF.26210.0
  misc_feature: Variant of the nucleotide sequence at SEQ ID NO 11065
gcaatacttggcactaaactttcgacaataccaagacttcgcccgcctgcatgcttgtcaaagcattgtcccgccagtcgggattaccagcaacagggttagccttgaagagcagctggtagttcgtccggccaatcgcgtgataagatgtggcgagctgggaacttgcatgggcatctatctctcttggtcacgtatgctggggaccagggttcgcgccttataagaggcgacccgtctcctgggtcaaacactgtttcttgggactgtagagattaccgcatttctgcgtaggtgtctggaaccgattaccaaaaaagggtcaccagcgtcgagatgaagtctttcctagctgccgcccagcttttgctggttgctggcgtctctgccagcttcgagagagctcgtactcctggtatgcaacttggtcctatcgacgaggacatgctcagagctgcggacttctcgaacggcacagttggatggggtacctttgatcagctcctcgaccacaacaacccttccctcggtaccttcaagcagcgatggtggtatggtgcacaatactggaagggtcctacttctcccatcatcatggtcaacccgggcgagcaagccgcaaccaacttcaacatttcgtatacttccttccagcgtctcactggtttgatggctcaacaggttggaggtgccgtcgtcattcttgagcacagatattggggagagtcgtcaccttttgaggagctgactaacgacaacctcgagtaccttactctcgagaactcgatcaaggacaacacctatttcgctaacaactgggttgctccttttgactcgaccggcaagtctactgccaaggacgctccttgggtattcaccggcggttcttaccctggcgccttggctggctggattgcttctgtcgaccctggcactttctgggcttactatggcacgagcggtgtcgtggaggctatcagcgacttctggcaatacttcacgcctgttcaggaagcaactcccgcgaactgctccagggatgtcaatgctgtcatcgaatatgtcgataataccatgaagcatggcagccacaaggaaaagaccaaactgaaggcaaaattcggtctccagagtctgcaggatgctgatttcggatccgctctcgagaacggcccctggacgtggcaatccggccaattctactctcagccgctcaatggttataccccattctaccagttctgcgactatgtcgagaatgtctggccaaactccaccaacaaagttccaggcgcgaaaggagtaggcttgcacaaagctttggaaggctatgccaaatggtggaacgaggttgaattccccggctactgcgaaagctacggctacttcgagggtgaattcaacgcggagtgtcttcagggcttgaacgcctcaaatcccatctaccacgatcttaccccttctaacgccggaaatcgccaatggaactggatgctctgcgatgctccgttcgagtattggcaagatggagcccccaagggccagagaaccctggtctctcgtcttgtgaccgcagagtactggcgctcgcagtgcgcactttggtttcccggtaaggactttggcttcgacaagggcaagtccgccgagagcgtcaacaaatacactggcgggtggttcgaaaccaacacgactcgtctgatgatgaccaacggcgagtgggacccgtggcgtgactcgaccttgagctctatctaccgccctggcggtcctctcaagagcaccgagcagcttccaatccgtgtcctgaagcacggtactcactgttcggatctctacggccagaactgggctgtcaacgaagatgccaactccaccgcgtggagcgaggttctccagatgaagggatggattcaggagttttacgagactggtaaatactaaaattggtaaattagtcataattcataatgaatacggtgcataattattcaaacaagaaaatcgtcaccctaccaacatgataatcgt

SEQ ID NO: 11068 - DNA, 2055 bp, Muscodor strobelii
  misc_feature: SGI cDNA ID NO. 563540
  misc_feature: Elevated expression when VOC is produced
  misc_feature: Encodes the peptide sequence at SEQ ID NO 11069
atgggtgtcgatagaaggcgcaacacacgccgccaaaaggctgctcaggcgattctgacaagttcggtagtgaccaccgttctggcagcacctttcaccgggcaatatcctacgcctcccacacaggccgatgattttgcagttctcgacccgcaaaactacgtgcttcccgccaatatgacatgggacgactacgtgaagcctccggggacgaattggtcagatcccaatttgaggggctcagagaggaactttaacattgcccttgttacggtcgactactcggacctccctttcgagattacacaagaagctggatcaactatctggacgaatccgcagcctgtcgtgtcggggttaagccgtgatgaagtcccggaattttatcgcgatttcctgaataagcccggcgagttgaaccgcatgcacactatacacgagtactggatggaagactctggcggtaaatatggtgttgatctgactgtgttcggtgcctataggcttcctagtctctcctatcaatatggagtagacgacgagcgtggcggctttaacccagacgcctgccccgaggctgggccttgctctgtcgacctccgcactgacgccctgggtgcatggcgcaaagacgtaggaaacgaaacagccgatgcattcgagcttgttttcatcctatctgcaggacaggacgagtcctcaacctggcaggagtttggcgagattaaattccaaacacctgaagatgtacctgatgccttcggaccgccggatgactccattccaaactgggcacacactcgctacgtcaactggacatcgtgggcttcggcgtcttccatttggcctaatgctggcgacggttcctcgacgcaggctgagagttctggcatggctacatacgcacacgagttgagtcatctgctaggaatcggagacaactacaataatccgtacagcgacccgcagcgacgcgactattcgggtccattctcaatgttgggtcgtggcagcttcaacggacccggcggtccgcatacacgatggatgattccagcacagatgggaggatcgatgggctctgcacacacgatgggtgataagttgcgcattggactcgtagaagacgcgaaggtgctcatggtgtctcgtgacgcattggcagactcaggtcttgtggtggctgagatcacggcgcgtgttgtgaaacctggggatggcgagcttatgggattgcacatcatcatgggcgaagacctctcaccagagtgcgacacgcagaccgacccgtactgtgacggtggtggttactacagctatgatctcgaggtgattgatcgtatgggaacagattcgttcgtgcctgaccatggagtcatgatcagcaagacgaagaatgaaagcgatagcgcgccattccagtggactattgacgcgaacccacaggacatcgatgtcatcgacttctatcgtcccgatggaacaccatcgtacttcacgatcggtgattaccgtcagctcgcggacgcgcttttccatgctggcactcgatctggctcggagtttgaattcgaagacgactccaatcgtctgcatttctacatagtggatatccgaagagaggataatggcgtgctgcactacacagtcgcggttcgctcgcttgacggaagcggagctagcacctacggcgtcgagcttggagctccggctcagaataaaataacgaaggcaactcagagcagcgtgacgtgctcttttgggctcacgaactcgggcacatacgtagacggtggcgctgaccacccccaggatctctctgcatatctccaatccgatgtctaccgcctgagcgctgaggtcgagggaagtggatggcgcgttgcgttgccgaacgcattggctgctgtggagttcggaatgtcgactactgttagcgttgctgttggagctcagggcaacgcaaccacgactgccgttgtcacacttacagcaacctcagaatcggaccccactgtttctggcactgcccagtgtcaagtgatcaaggcatag

SEQ ID NO: 11069 - protein, 684 aa, Muscodor strobelii
  misc_feature: SGI Peptide ID NO. 563540
  misc_feature (47)..(682): NCBI GI: 271968125 Blast Desc: Sros_6872 [Streptosporangium roseum DSM 43021] gi|270511300|gb|ACZ89578.1| conserved [Streptosporangium roseum DSM 43021]
  misc_feature (47)..(682): NCBI GI: 284032138 Blast Desc: M6 family metalloprotease domain protein [Kribbella flavida DSM 17836] gi|283811431|gb|ADB33270.1| M6 family metalloprotease domain protein [Kribbella flavida DSM 17836]
  misc_feature (47)..(671): NCBI GI: 256671765 Blast Desc: StAA4_31666 [Streptomyces sp. AA4]
  misc_feature (42)..(683): NCBI GI: 240105045 Blast Desc: CPC735_046080 [Coccidioides posadasii C735 delta SOWgp]
  misc_feature (42)..(683): NCBI GI: 119195063 Blast Desc: CIMG_01906 [Coccidioides immitis RS]
  misc_feature (14)..(684): NCBI GI: 238845373 Blast Desc: mucin [Microsporum canis CBS 113480]
  misc_feature (19)..(681): NCBI GI: 258566279 Blast Desc: conserved [Uncinocarpus reesii 1704] gi|237907585|gb|EEP81986.1| conserved [Uncinocarpus reesii 1704]
  misc_feature (44)..(683): NCBI GI: 239611167 Blast Desc: conserved [Ajellomyces dermatitidis ER-3]
  misc_feature (46)..(681): NCBI GI: 189197721 Blast Desc: conserved [Pyrenophora tritici-repentis Pt-1C-BFP] gi|187981146|gb|EDU47772.1| conserved [Pyrenophora tritici-repentis Pt-1C-BFP]
  misc_feature (11)..(684): NCBI GI: 226289967 Blast Desc: conserved [Paracoccidioides brasiliensis Pb18]
  misc_feature: Useful for introducing or modulating the production of volatile compounds
MGVDRRRNTRRQKAAQAILTSSVVTTVLAAPFTGQYPTPPTQADDFAVLDPQNYVLPANMTWDDYVKPPGTNWSDPNLRGSERNFNIALVTVDYSDLPFEITQEAGSTIWTNPQPVVSGLSRDEVPEFYRDFLNKPGELNRMHTIHEYWMEDSGGKYGVDLTVFGAYRLPSLSYQYGVDDERGGFNPDACPEAGPCSVDLRTDALGAWRKDVGNETADAFELVFILSAGQDESSTWQEFGEIKFQTPEDVPDAFGPPDDSIPNWAHTRYVNWTSWASASSIWPNAGDGSSTQAESSGMATYAHELSHLLGIGDNYNNPYSDPQRRDYSGPFSMLGRGSFNGPGGPHTRWMIPAQMGGSMGSAHTMGDKLRIGLVEDAKVLMVSRDALADSGLVVAEITARVVKPGDGELMGLHIIMGEDLSPECDTQTDPYCDGGGYYSYDLEVIDRMGTDSFVPDHGVMISKTKNESDSAPFQWTIDANPQDIDVIDFYRPDGTPSYFTIGDYRQLADALFHAGTRSGSEFEFEDDSNRLHFYIVDIRREDNGVLHYTVAVRSLDGSGASTYGVELGAPAQNKITKATQSSVTCSFGLTNSGTYVDGGADHPQDLSAYLQSDVYRLSAEVEGSGWRVALPNALAAVEFGMSTTVSVAVGAQGNATTTAVVTLTATSESDPTVSGTAQCQVIKA

SEQ ID NO: 11070 - DNA, 2400 bp, Muscodor strobelii
  misc_feature: SGI EST ID NO. CUFF.26229.0
  misc_feature: Variant of the nucleotide sequence at SEQ ID NO 11068
cctgattcactggcgaccatgcacaaagtagttggagatcagaacgccaagatgatgagcatcttggcagcttatctgagccgaaagctcaccaacttgcatagagcgatcggcaatagctaggtacagcagataaagctccaatctcagctatttaatcacccacacctgctggaggctggcgagcttacgataacttcatcccctcggccctgattcttcgaggcggtgttgtcgttgacaatccttgaaatcctcgctccgattcctaatctaatcgtcaaagatgggtgtcgatagaaggcgcaacacacgccgccaaaaggctgctcaggcgattctgacaagttcggtagtgaccaccgttctggcagcacctttcaccgggcaatatcctacgcctcccacacaggccgatgattttgcagttctcgacccgcaaaactacgtgcttcccgccaatatgacatgggacgactacgtgaagcctccggggacgaattggtcagatcccaatttgaggggctcagagaggaactttaacattgcccttgttacggtcgactactcggacctccctttcgagattacacaagaagctggatcaactatctggacgaatccgcagcctgtcgtgtcggggttaagccgtgatgaagtcccggaattttatcgcgatttcctgaataagcccggcgagttgaaccgcatgcacactatacacgagtactggatggaagactctggcggtaaatatggtgttgatctgactgtgttcggtgcctataggcttcctagtctctcctatcaatatggagtagacgacgagcgtggcggctttaacccagacgcctgccccgaggctgggccttgctctgtcgacctccgcactgacgccctgggtgcatggcgcaaagacgtaggaaacgaaacagccgatgcattcgagcttgttttcatcctatctgcaggacaggacgagtcctcaacctggcaggagtttggcgagattaaattccaaacacctgaagatgtacctgatgccttcggaccgccggatgactccattccaaactgggcacacactcgctacgtcaactggacatcgtgggcttcggcgtcttccatttggcctaatgctggcgacggttcctcgacgcaggctgagagttctggcatggctacatacgcacacgagttgagtcatctgctaggaatcggagacaactacaataatccgtacagcgacccgcagcgacgcgactattcgggtccattctcaatgttgggtcgtggcagcttcaacggacccggcggtccgcatacacgatggatgattccagcacagatgggaggatcgatgggctctgcacacacgatgggtgataagttgcgcattggactcgtagaagacgcgaaggtgctcatggtgtctcgtgacgcattggcagactcaggtcttgtggtggctgagatcacggcgcgtgttgtgaaacctggggatggcgagcttatgggattgcacatcatcatgggcgaagacctctcaccagagtgcgacacgcagaccgacccgtactgtgacggtggtggttactacagctatgatctcgaggtgattgatcgtatgggaacagattcgttcgtgcctgaccatggagtcatgatcagcaagacgaagaatgaaagcgatagcgcgccattccagtggactattgacgcgaacccacaggacatcgatgtcatcgacttctatcgtcccgatggaacaccatcgtacttcacgatcggtgattaccgtcagctcgcggacgcgcttttccatgctggcactcgatctggctcggagtttgaattcgaagacgactccaatcgtctgcatttctacatagtggatatccgaagagaggataatggcgtgctgcactacacagtcgcggttcgctcgcttgacggaagcggagctagcacctacggcgtcgagcttggagctccggctcagaataaaataacgaaggcaactcagagcagcgtgacgtgctcttttgggctcacgaactcgggcacatacgtagacggtggcgctgaccacccccaggatctctctgcatatctccaatccgatgtctaccgcctgagcgctgaggtcgagggaagtggatggcgcgttgcgttgccgaacgcattggctgctgtggagttcggaatgtcgactactgttagcgttgctgttggagctcagggcaacgcaaccacgactgccgttgtcacacttacagcaacctcagaatcggaccccactgtttctggcactgcccagtgtcaagtgatcaaggcatagatagtatgacattatgaaatatacctaccgaataatctctacttcaaattgttcctgaa

SEQ ID NO: 11071 - DNA, 489 bp, Muscodor strobelii
  misc_feature: SGI cDNA ID NO. 563541
  misc_feature: Encodes the peptide sequence at SEQ ID NO 11072
atgtcgagcggcaatgctttccccgccgctgccaacggcgcaaacgtctcagcagcgaccctgccgcccgaggccatcaacttcgcgacccgcatgtacaacgccgcgcgcgagggcgacatcgatatctttacgcagactctacctgccggcttgcccgccaacctcaccaacgacaagggcgatacactgctcatgctcgccgcataccacggccatgcagacctcgtcactctactgatttcacacggtgctgacccgaaccgccttaatgaccggggccagagtccactctccggcgccgtcttcaagaaggaagacgctgtcattgaagctctattgcaaggaggtgccgacccggagcatggccacccctccgccgtccagtgcctagccatgttcaagcaggaggacacatggggccccaagttcgacgccgctccaggtaagggcaagggcaagggcaaggctgagaccgccggatcatag

SEQ ID NO: 11072 - protein, 162 aa, Muscodor strobelii
  misc_feature: SGI Peptide ID NO. 563541
  misc_feature (60)..(92): Pfam Id: PF00023 Pfam Desc: Ankyrin repeat
  misc_feature (1)..(160): NCBI GI: 46123899 Blast Desc: FG06327.1 [Gibberella zeae PH-1]
  misc_feature (17)..(156): NCBI GI: 261354568 Blast Desc: ankyrin [Verticillium albo-atrum VaMs.102]
  misc_feature (20)..(158): NCBI GI: 256732463 Blast Desc: NECHADRAFT_78693 [Nectria haematococca mpVI 77-13-4]
  misc_feature (8)..(152): NCBI GI: 156039575 Blast Desc: SS1G_11924 [Sclerotinia sclerotiorum 1980] gi|154697661|gb|EDN97399.1| SS1G_11924 [Sclerotinia sclerotiorum 1980]
  misc_feature (8)..(152): NCBI GI: 154301310 Blast Desc: BC1G_10325 [Botryotinia fuckeliana B05.10] gi|150856226|gb|EDN31418.1| BC1G_10325 [Botryotinia fuckeliana B05.10]
  misc_feature (23)..(138): NCBI GI: 239939860 Blast Desc: ankyrin-like protein [Streptomyces roseosporus NRRL 15998] gi|239986345|ref|ZP_04707009.1| ankyrin-like protein [Streptomyces roseosporus NRRL 11379]
  misc_feature (17)..(136): NCBI GI: 189188406 Blast Desc: ankyrin domain containing protein [Pyrenophora tritici-repentis Pt-1C-BFP] gi|187972148|gb|EDU39647.1| ankyrin domain containing protein [Pyrenophora tritici-repentis
  misc_feature (23)..(138): NCBI GI: 282866148 Blast Desc: Ankyrin [Streptomyces sp. ACTE] gi|282558932|gb|EFB64487.1| Ankyrin [Streptomyces sp. ACTE]
  misc_feature (23)..(138): NCBI GI: 182439911 Blast Desc: ankyrin-like protein [Streptomyces griseus subsp. griseus NBRC 13350] gi|282872612|ref|ZP_06281596.1| Ankyrin [Streptomyces sp. ACT-1] gi|178468427|dbj|BAG22947.1| protein sp.
  misc_feature (21)..(138): NCBI GI: 229494083 Blast Desc: ankyrin [Rhodococcus erythropolis SK121] gi|229319016|gb|EEN84870.1| ankyrin [Rhodococcus erythropolis SK121]
  misc_feature (32)..(118): SWISSPROT Homolog: EC 2.7.11.1 Non-specific serine/threonine protein kinase
MSSGNAFPAAANGANVSAATLPPEAINFATRMYNAAREGDIDIFTQTLPAGLPANLTNDKGDTLLMLAAYHGHADLVTLLISHGADPNRLNDRGQSPLSGAVFKKEDAVIEALLQGGADPEHGHPSAVQCLAMFKQEDTWGPKFDAAPGKGKGKGKAETAGS

SEQ ID NO: 11073 - DNA, 2011 bp, Muscodor strobelii
  misc_feature: SGI EST ID NO. CUFF.26166.0
  misc_feature: Variant of the nucleotide sequence at SEQ ID NO 11071
aaatgtgcgatgacctgcactaccgtaccttcggtattctgaatcattccgaaccagatgctctgcttctggtattcatcccatgattttaagtggattgcaaaattcatgccaatcgtgaaatgccaaatctgtagattcgtctttgattagcacgagaggttgcctccatatatctcatctgttgctggggatgatgacctgtggtgcttaatataggatggaaattgtgcagtaaacggcaaccgatgacttcatcgatgtcagactcaaggtcgcacctgctcaacattctcacacggcgcgccactcgtggttaaagagtcaacaacttacaacaatcaagacacctgtgacactcattcacgatgtcgagcggcaatgctttccccgccgctgccaacggcgcaaacgtctcagcagcgaccctgccgcccgaggccatcaacttcgcgacccgcatgtacaacgccgcgcgcgagggcgacatcgatatctttacgcagactctacctgccggcttgcccgccaacctcaccaacgacaagggcgatacactgctcatgctcgccgcataccacggccatgcagacctcgtcactctactgatttcacacggtgctgacccgaaccgccttaatgaccggggccagagtccactctccggcgccgtcttcaagaaggaagacgctgtcattgaagctctattgcaaggaggtgccgacccggagcatggccacccctccgccgtccagtgcctagccatgttcaagcaggaggacacatggggccccaagttcgacgccgctccaggtaagggcaagggcaagggcaaggctgagaccgccggatcatagcgagggatccgcgagagcgttgatgtgccgcctgctttagacaagatacccagttgctatgattttagactctttcaatattgcccccacgtccacgcgtgaaatttgcaaactgcctacgaagcccttgaatttgaacacatctcttcccgtagtcgaggatgcaatgggcgaagcagtgagaagaggttgaggcatacgcgacatgatgactgtcaccctaacgatgtcgagcgttcccatatgaccatctcggacggacgacttctacgaagagcagattccctgaacgtcacacggcaggatatttctgctacccggaacggctcagacttgacgattcagtttatgtgaaaacgtctcataagaacattggacttacatatttcgtgatacagccatcgctaacgcatagttctactacttattttgagatgtcgcgcaatagctcaccactcggcgcaaaggggcgcgagcacgttgacctgtcgcaaccatctccacacaaaccagcctaggaagcataatgcacagatcgatcacttcgaggtacccgaactatccattatgttgagcttcaatcttcctcacttttcacttttcacttctgggggatccttcccgcatttagtagacaaagatgtgattgatcaaggttcatcagaccagtggtctattactcggcacaggagaacgcgatgggtgatgagtcaagatcaatgtcttcgtcaaatgtcagacgttcacgattcaaagcggggaggaccatatttgggataaaactagatcttggtttgaacttgctatcatgactcggccactgattaaaagagagagatggtatatggtctgaccccgtcgttcggcgacctctgtcacggcataaaacgcagtgctacacaagggcactatggacacacaagttccgaggcaggaggcttctcttcgccgtcactaccgcgccctgtcaggcatcccgcttttcgggttatgatcaagatacgaaactagccttgagacttctacagcaatgaaggacagagaacggagtggagacgcggtgaacgggacgggtgaaacgaagaagcgacaaatcacagtatatggtagacataatttatatatgattaatacagtcattatctgtgtgtagg

SEQ ID NO: 11074 - DNA, 498 bp, Muscodor strobelii
  misc_feature: SGI cDNA ID NO. 563542
  misc_feature: Encodes the peptide sequence at SEQ ID NO 11075
atgattcagaataccgaaggtacggtagtgcaggtcatcgcacatttggcgaccgaggctccgagcaatcgatctatcgtcatcccaccacagcacagcagcaacgcccattggagctccaagatgcctccccaaccagcgttacgtctcctcaggcctgcattgcgtatcgcgcggctgtactcgaccgagacggggcccctgatcacggtgacgaacctgccggcgcccaactcgggccacatccgcgtgctcgagctcaaccggccggccgcgcggaatgccatctccaaagccctgctggccgccctgcgagccgaggtcgacgacgtgcactcccagtacacccccgagggcgacgaaaggcaccccgcccgcttcggcggcgtagaggagaggagtccgacgcgggcgctcgtcctggccagcggcatcgactccagcttctgcgccggcgccgatctgaaggagaggaggggcttcacccaggaagagtga

SEQ ID NO: 11075 - protein, 165 aa, Muscodor strobelii
  misc_feature: SGI Peptide ID NO. 563542
  misc_feature (51)..(165): NCBI GI: 85090740 Blast Desc: NCU09058 [Neurospora crassa OR74A] gi|28919934|gb|EAA29326.1| NCU09058 [Neurospora crassa OR74A]
  misc_feature (44)..(165): NCBI GI: 46123413 Blast Desc: FG06084.1 [Gibberella zeae PH-1]
  misc_feature (59)..(165): NCBI GI: 256732583 Blast Desc: [Nectria haematococca mpVI 77-13-4]
  misc_feature (60)..(165): NCBI GI: 171679010 Blast Desc: protein product [Podospora anserina] gi|170937576|emb|CAP62233.1| protein product [Podospora anserina]
  misc_feature (38)..(165): NCBI GI: 39942510 Blast Desc: MGG_03335 [Magnaporthe grisea 70-15] gi|145015652|gb|EDK00142.1| MGG_03335 [Magnaporthe grisea 70-15]
  misc_feature (51)..(165): NCBI GI: 169618032 Blast Desc: SNOG_12204 [Phaeosphaeria nodorum SN15] gi|111059496|gb|EAT80616.1| SNOG_12204 [Phaeosphaeria nodorum SN15]
  misc_feature (58)..(165): NCBI GI: 189200451 Blast Desc: enoyl-CoA hydratase, mitochondrial precursor [Pyrenophora tritici-repentis Pt-1C-BFP] gi|187983661|gb|EDU49149.1| enoyl-CoA hydratase, mitochondrial
  misc_feature (38)..(165): NCBI GI: 226288842 Blast Desc: mitochondrial methylglutaconyl-CoA hydratase [Paracoccidioides brasiliensis Pb18]
  misc_feature (38)..(165): NCBI GI: 225681696 Blast Desc: methylglutaconyl-CoA hydratase [Paracoccidioides brasiliensis Pb03]
  misc_feature (56)..(165): NCBI GI: 238843054 Blast Desc: methylglutaconyl-CoA hydratase [Microsporum canis CBS 113480]
MIQNTEGTVVQVIAHLATEAPSNRSIVIPPQHSSNAHWSSKMPPQPALRLLRPALRIARLYSTETGPLITVTNLPAPNSGHIRVLELNRPAARNAISKALLAALRAEVDDVHSQYTPEGDERHPARFGGVEERSPTRALVLASGIDSSFCAGADLKERRGFTQEE

SEQ ID NO: 11076 - DNA, 669 bp, Muscodor strobelii
  misc_feature: SGI cDNA ID NO. 563543
  misc_feature: Reduced expression when VOC is produced
  misc_feature: Encodes the peptide sequence at SEQ ID NO 11077
atgggcgttctcttacggcggctatctagcgaccagcctttggggccagagccaccaaaccagcacaacccgccgaatccagatagctcaggacacgacacaacaacaccagttatcaatggttggctcatcgctgtcattgttgttggcggtctaatcattacaaccctcgccatcttcataatatcacattacatcaagtcgaggcagagaaaggcagatagagaccaagcgacggaacctatgagttcggtagccatacacaggcatagacgaaaccgcagctcggccggtcaacaagcggcagaggaggaggaacgcaatctaatgatccgaaagtctttggcaaatcgatactcaatggcaccaagcgcgcaccattcgcgagtgtcatcactctcgacagattaccagtttactggatcgacggacgacgagcacgacgagaccgtaggcgtcaaggatgactggaaagcatgggaagcgcagctccagagcgacccccgaaactcgagccccagactcgaccagcatccagcattcagtcagatctcattgccagagccaacgcgcgaaccctcaccgtatcgtggaagtctgcctccagctttatacacgccaccgcagcattatacaacagcatcaacgcaaaagtacacaccactttag

SEQ ID NO: 11077 - protein, 222 aa, Muscodor strobelii
  misc_feature: SGI Peptide ID NO. 563543
  misc_feature (57)..(196): NCBI GI: 256734488 Blast Desc: NECHADRAFT_98795 [Nectria haematococca mpVI 77-13-4]
  misc_feature: Useful for introducing or modulating the production of volatile compounds
MGVLLRRLSSDQPLGPEPPNQHNPPNPDSSGHDTTTPVINGWLIAVIVVGGLIITTLAIFIISHYIKSRQRKADRDQATEPMSSVAIHRHRRNRSSAGQQAAEEEERNLMIRKSLANRYSMAPSAHHSRVSSLSTDYQFTGSTDDEHDETVGVKDDWKAWEAQLQSDPRNSSPRLDQHPAFSQISLPEPTREPSPYRGSLPPALYTPPQHYTTASTQKYTPL

SEQ ID NO: 11078 - DNA, 1573 bp, Muscodor strobelii
  misc_feature: SGI EST ID NO. CUFF.26186.0
  misc_feature: Variant of the nucleotide sequence at SEQ ID NO 11076
ctcccacagccccaaacgatgtctagatggatatgtctcgtcggcccaataatagcatcctattcgtaacttggggccaataccaccctagcctgcatagataacattcttcatggagctagcatactccaaaggtcaagggtcggcaaatgctaccgattacgaggggtagcgagacgtatcatacgtttgcaaatatataggcagctatggatctcgtatttctaatcggctcttgtcctcaagggagattttcagtatcgctcatcagcagttcgcgaagatatcacgcaaaaacaaatatctgagtgtttaaaatgggcgttctcttacggcggctatctagcgaccagcctttggggccagagccaccaaaccagcacaacccgccgaatccagatagctcaggacacgacacaacaacaccagttatcaatggttggctcatcgctgtcattgttgttggcggtctaatcattacaaccctcgccatcttcataatatcacattacatcaagtcgaggcagagaaaggcagatagagaccaagcgacggaacctatgagttcggtagccatacacaggcatagacgaaaccgcagctcggccggtcaacaagcggcagaggaggaggaacgcaatctaatgatccgaaagtctttggcaaatcgatactcaatggcaccaagcgcgcaccattcgcgagtgtcatcactctcgacagattaccagtttactggatcgacggacgacgagcacgacgagaccgtaggcgtcaaggatgactggaaagcatgggaagcgcagctccagagcgacccccgaaactcgagccccagactcgaccagcatccagcattcagtcagatctcattgccagagccaacgcgcgaaccctcaccgtatcgtggaagtctgcctccagctttatacacgccaccgcagcattatacaacagcatcaacgcaaaagtacacaccactttagttagttaatggtagcatcggctgagtcccttgttcaattattctggtaatagtcattttagcaaggtgtttaggccacttaggataccctcatgaagtttgaaagcaatggcgttaaatggtatttgccaagaaagcataagcggtgggtgtttcggattacaaaggaagcgttttgtttgcttgctcttattatgcttattgtgtcattccgttggatgggcatatgaatggtgtatttaatgatctctacaagaggattttggaagcaataagcttaaatctatccgtatgtttgctacattgttcaatggtgatttgttcggttggcaggtgggcagggcgaagttagaataaaacgcggcttgagtacaagaggaaggcacgtcaatgggcggacgtaattgaagcaaacaaggtcccctgtaacgcattgtacatctacctgactgcccgattgttcagacgatgaaaggcgtgctgccaaaatcaaagaatctgtttctcacatctcattaccatataatttggtcaccagaggtcggcatccttcgtcctctctacttcccatcgctctgattgaggacg

SEQ ID NO: 11079 - DNA, 1095 bp, Muscodor strobelii
  misc_feature: SGI cDNA ID NO. 563544
  misc_feature: Reduced expression when VOC is produced
  misc_feature: Encodes the peptide sequence at SEQ ID NO 11080
atggcggcggacggatcctactctcgctcggatgcgttcatcgcgtcgatgacggccagcgcggcgcaggcgacggctgacgccccggccgaggagccctggaagcagaacctcaacgagatcgtcatgtgccccgactgccgagagtacccgcccaacctcatcgaggagttctcctcgggcgacatggtctgcgcatcctgcggcctcgtcctcggcgaccgcatcatcgacacccgctccgagtggcgcaccttcgccaatgacgaccagaacaacgacgaccccagccgtgtcggagacgccgtcaacccgctgctcaacggctcccagctcgagaccaccatcgccttcggtgagggccgcaactcccgcgacctgcagcgcacccagaacaagctgtcgcgcgacaagagcacccagtccctgctggccgcctaccgcgagatctctgacttctgcaatgctatggacattcagaaggccacccaggacgccgccaagcacatcttcaagctcgtcgatgacgccaaactcttcaaaggcaaggacacgaaggtcattgtcgccggctgcatcttcatagcttgtcgccagtctaaggctccccgcaccttccgcgatatcttccgcctgacgaacgtccccaagaaggagattggcaggatcttcaagacgcttgagaagttcctgcagagcaatcccactggcaccacctatctgcgcaccaccgaggaaggcggccccagcacctcctcgaccaacgccaccgagctttgcgagcgctactgtagtgcactgcgcttcaacaatgttcacctcatggcacgcttgtcgtcggagctctgcgagaagacttcttctgtcgctgatctcgctggtcgctcccctctctcggtcgctgccgcctgcatctacatgatctcgcatctcatgggtgagggcaagcagtcgcggcagatcgccaacgtcgctggtgttagtgacggcacaatcaagacggcctaccgtttcctgcataacgagcgcgagactctggttgaggcggattggctggccaagggcggctctcttgatagacttcccattaattag

SEQ ID NO: 11080 - protein, 364 aa, Muscodor strobelii
  misc_feature: SGI Peptide ID NO. 563544
  misc_feature (150)..(220): Pfam Id: PF00382 Pfam Desc: Transcription factor TFIIB repeat
  misc_feature (260)..(332): Pfam Id: PF00382 Pfam Desc: Transcription factor TFIIB repeat
  misc_feature (42)..(86): Pfam Id: PF08271 Pfam Desc: TFIIB zinc-binding
  misc_feature (292)..(332): Pfam Id: PF00382 Pfam Desc: Transcription factor TFIIB repeat
  misc_feature (34)..(364): NCBI GI: 156062044 Blast Desc: SS1G_01136 [Sclerotinia sclerotiorum 1980] gi|154696474|gb|EDN96212.1| SS1G_01136 [Sclerotinia sclerotiorum 1980]
  misc_feature (34)..(363): NCBI GI: 154292104 Blast Desc: BC1G_14861 [Botryotinia fuckeliana B05.10] gi|150846288|gb|EDN21481.1| BC1G_14861 [Botryotinia fuckeliana B05.10]
  misc_feature (34)..(364): NCBI GI: 261357837 Blast Desc: transcription initiation factor IIB [Verticillium albo-atrum VaMs.102]
  misc_feature (29)..(364): NCBI GI: 85068255 Blast Desc: NCU07289 [Neurospora crassa OR74A] gi|28923740|gb|EAA32907.1| conserved [Neurospora crassa OR74A]
  misc_feature (34)..(347): NCBI GI: 170940166 Blast Desc: protein product [Podospora anserina]
  misc_feature (31)..(362): NCBI GI: 256734489 Blast Desc: [Nectria haematococca mpVI 77-13-4]
  misc_feature (29)..(364): NCBI GI: 238838237 Blast Desc: transcription initiation factor IIB [Microsporum canis CBS 113480]
  misc_feature (21)..(362): NCBI GI: 70999680 Blast Desc: transcription initiation protein [Aspergillus fumigatus Af293] gi|66852194|gb|EAL92519.1| transcription initiation protein [Aspergillus fumigatus Af293] transcription
  misc_feature (34)..(362): NCBI GI: 121705606 Blast Desc: transcription initiation protein [Aspergillus clavatus NRRL 1] gi|119399212|gb|EAW09640.1| transcription initiation protein [Aspergillus clavatus NRRL 1]
  misc_feature (21)..(362): NCBI GI: 119491805 Blast Desc: transcription initiation protein [Neosartorya fischeri NRRL 181] gi|119411557|gb|EAW21500.1| transcription initiation protein [Neosartorya fischeri NRRL 181]
  misc_feature: Useful for introducing or modulating the production of volatile compounds
MAADGSYSRSDAFIASMTASAAQATADAPAEEPWKQNLNEIVMCPDCREYPPNLIEEFSSGDMVCASCGLVLGDRIIDTRSEWRTFANDDQNNDDPSRVGDAVNPLLNGSQLETTIAFGEGRNSRDLQRTQNKLSRDKSTQSLLAAYREISDFCNAMDIQKATQDAAKHIFKLVDDAKLFKGKDTKVIVAGCIFIACRQSKAPRTFRDIFRLTNVPKKEIGRIFKTLEKFLQSNPTGTTYLRTTEEGGPSTSSTNATELCERYCSALRFNNVHLMARLSSELCEKTSSVADLAGRSPLSVAAACIYMISHLMGEGKQSRQIANVAGVSDGTIKTAYRFLHNERETLVEADWLAKGGSLDRLPIN

SEQ ID NO: 11081 - DNA, 2196 bp, Muscodor strobelii
  misc_feature: SGI EST ID NO. CUFF.26506.1
  misc_feature: Variant of the nucleotide sequence at SEQ ID NO 11079
aagcgcaagccccacctcaaagtacccaagtacgcttctccgagcacctgacaggctgagtgagcactgagcactgagcataagccaccgcctctgcgacgtccacctcgtcgctgcttctttccctcaacaacaacatcctctccgttgttcaacccctccgccccctcacccatctcccctcccacgccaccatcgtcaagcacaactctcaccatggcggcggacggatcctactctcgctcggatgcgttcatcgcgtcgatgacggccagcgcggcgcaggcgacggctgacgccccggccgaggagccctggaagcagaacctcaacgagatcgtcatgtgccccgactgccgagagtacccgcccaacctcatcgaggagttctcctcgggcgacatggtctgcgcatcctgcggcctcgtcctcggcgaccgcatcatcgacacccgctccgagtggcgcaccttcgccaatgacgaccagaacaacgacgaccccagccgtgtcggagacgccgtcaacccgctgctcaacggctcccagctcgagaccaccatcgccttcggtgagggccgcaactcccgcgacctgcagcgcacccagaacaagctgtcgcgcgacaagagcacccagtccctgctggccgcctaccgcgagatctctgacttctgcaatgctatggacattcagaaggccacccaggacgccgccaagcacatcttcaagctcgtcgatgacgccaaactcttcaaaggcaaggacacgaaggtcattgtcgccggctgcatcttcatagcttgtcgccagtctaaggctccccgcaccttccgcgatatcttccgcctgacgaacgtccccaagaaggagattggcaggatcttcaagacgcttgagaagttcctgcagagcaatcccactggcaccacctatctgcgcaccaccgaggaaggcggccccagcacctcctcgaccaacgccaccgagctttgcgagcgctactgtagtgcactgcgcttcaacaatgttcacctcatggcacgcttgtcgtcggagctctgcgagaagacttcttctgtcgctgatctcgctggtcgctcccctctctcggtcgctgccgcctgcatctacatgatctcgcatctcatgggtgagggcaagcagtcgcggcagatcgccaacgtcgctggtgttagtgacggcacaatcaagacggcctaccgtttcctgcataacgagcgcgagactctggttgaggcggattggctggccaagggcggctctcttgatagacttcccattaattaggaacctgagaagtttaaggagatgtctgagaagaggatgcttgagagggcgatgcttgagaaggcagtgaagagcgagtagatgggtgtatcgcttggtgtgccatatctctcggcgccttagcgttggtagtgtggcatttcgcacacactacgttcaagagggatttgagcccctcctgcaccgatatccctttcgcgttggtactgctgttatcgaggcgaccaacagatgcaaaaaaaaaacacagccctagggtggtaccgttggccgtgttagcatttcccattgttcgtcgtctccgtcgacagccgcgaacgaagaaactggtctcttgagaaacagagtaccagatactattacgccttctcgtggctgcgttcctgcagccggaatcgagattcgtactacatcagacttccgagaatgatacacagtctggtcggtgggtggcattgttgagagcacctctggagggctctcattcccagcagcggaaaataagtggttgggggcattagatctgtgctttttctagctttcagatcgatcatagctacaatcactattattttccacatgaaaattgtctgtgtgatgctattgcgctgctataaggtgaagttcgcaggtcaagtatccctctgccccttgtcttcttacatttactccattacctagcttttcgtacttatcattgataccccttttgtctattcattgtcttgatagtctttgcgttgcacgaagaaggcgtacgttatctgtattagacagttcatgagaaatagatctcatgttacttgccttgtagcatagacctaaagttcgtcgaaaacattccataccatttagctattaatagaccataaatgaaattagcat

SEQ ID NO: 11082 - DNA, 450 bp, Muscodor strobelii
  misc_feature: SGI cDNA ID NO. 563545
  misc_feature: Elevated expression when VOC is produced
  misc_feature: Encodes the peptide sequence at SEQ ID NO 11083
atgggtgtcaccaagactacacgtcaggagggtaccggtccccagcctaaggttggccagacggtcatcatggagtacgaaggctgggtcaaggacacttccaagcctgacaacaagaccctcccctctttcgattcttccaagcacttctctacggccattggcgtcggtcgcgtcatcaaaggttgggatgagggcgtcattcagatgaaggtcggagagaaggctactctcgacatctccagtgactatgcctatggcgccaacggatttcctggcgctattcctcccaactctgacctcatcttcgatctcacattgaaggcaatccagctggagcacttcatccgtgttcgcaatctcagcgaggttctgcaactagccgcccaagatgccgcacttttgccatttgtaccacgcacctacaaactgcgagaaatcgggaagtag

SEQ ID NO: 11083 - protein, 149 aa, Muscodor strobelii
  misc_feature: SGI Peptide ID NO. 563545
  misc_feature (11)..(108): Pfam Id: PF00254 Pfam Desc: FKBP-type peptidyl-prolyl cis-trans isomerase
  misc_feature (1)..(111): NCBI GI: 256726797 Blast Desc: NECHADRAFT_57924 [Nectria haematococca mpVI 77-13-4]
  misc_feature (1)..(111): NCBI GI: 145603466 Blast Desc: MGG_06035 [Magnaporthe grisea 70-15] gi|145011688|gb|EDJ96344.1| MGG_06035 [Magnaporthe grisea 70-15]
  misc_feature (1)..(111): NCBI GI: 171688430 Blast Desc: protein product [Podospora anserina] gi|170944177|emb|CAP70287.1| protein product [Podospora anserina]
  misc_feature (1)..(111): NCBI GI: 74611273 Blast Desc: FKB1B_NEUCR RecName: Full=Peptidyl-prolyl cis-trans isomerase fkr-3; Short=PPIase fkr-3; AltName: Full=FK506-binding protein 1B; Short=FKBP-1B; AltName: Full=Rapamycin-binding
  misc_feature (1)..(111): NCBI GI: 261352276 Blast Desc: FK506-binding protein 1B [Verticillium albo-atrum VaMs.102]
  misc_feature (1)..(110): NCBI GI: 116010470 Blast Desc: rapamycin binding protein FKBP12 [Gibberella fujikuroi]
  misc_feature (1)..(103): NCBI GI: 85078286 Blast Desc: NCU04371 [Neurospora crassa OR74A] gi|28917193|gb|EAA26908.1| conserved [Neurospora crassa OR74A]
  misc_feature (1)..(111): NCBI GI: 169601338 Blast Desc: SNOG_03533 [Phaeosphaeria nodorum SN15] gi|160705909|gb|EAT88738.2| SNOG_03533 [Phaeosphaeria nodorum SN15]
  misc_feature (1)..(110): NCBI GI: 189193769 Blast Desc: FK506-binding protein 1 [Pyrenophora tritici-repentis Pt-1C-BFP] gi|187978787|gb|EDU45413.1| FK506-binding protein 1 [Pyrenophora tritici-repentis Pt-1C-BFP]
  misc_feature (1)..(110): NCBI GI: 46136349 Blast Desc: FG09690.1 [Gibberella zeae PH-1]
  misc_feature (1)..(111): SWISSPROT Homolog: EC 5.2.1.8 Peptidylprolyl isomerase
  misc_feature: Useful for introducing or modulating the production of volatile compounds
MGVTKTTRQEGTGPQPKVGQTVIMEYEGWVKDTSKPDNKTLPSFDSSKHFSTAIGVGRVIKGWDEGVIQMKVGEKATLDISSDYAYGANGFPGAIPPNSDLIFDLTLKAIQLEHFIRVRNLSEVLQLAAQDAALLPFVPRTYKLREIGK

SEQ ID NO: 11084 - DNA, 785 bp, Muscodor strobelii
  misc_feature: SGI EST ID NO. CUFF.26169.0
  misc_feature: Variant of the nucleotide sequence at SEQ ID NO 11082
cgggcacattgaataatagtgcaggtaaggcagctccgccccgcttgccctgccctggcccctcaccatcgacccggctgcggaaataaaggcactaaacatcccacttacatctcaccctccagcttcgtctcagctctacaactatctcagaacatttccccaccctatcccacttcacaacacaacacagcacatctctcatcatgggtgtcaccaagactacacgtcaggagggtaccggtccccagcctaaggttggccagacggtcatcatggagtacgaaggctgggtcaaggacacttccaagcctgacaacaagaccctcccctctttcgattcttccaagcacttctctacggccattggcgtcggtcgcgtcatcaaaggttgggatgagggcgtcattcagatgaaggtcggagagaaggctactctcgacatctccagtgactatgcctatggcgccaacggatttcctggcgctattcctcccaactctgacctcatcttcgatctcacattgaaggcaatccagtaagccggccatcgacatgggatactcagtgtggtgatcacgcacaatatccatgaccagaggtctttagaaggctcctagctggttctcatctggctgttactgagtcttaagacgcaagagttgtcgtcttaattgacttctacatatagagtgcaaatcagataaaaaacatgcccgcctgagttcacagctgaccggtgtactcaatgaaaaaaataaatcctcaaaacatttctctagaaa

SEQ ID NO: 11085 - DNA, 627 bp, Muscodor strobelii
  misc_feature: SGI cDNA ID NO. 563546
  misc_feature: Encodes the peptide sequence at SEQ ID NO 11086
atgaaattcgtccttgctgcccagactcttgtgtctgcagtcgcggccacaactctgccgagactggtcgattccgtcccagaaggttacaccatcgctgatatcaattggacaatgccgattgtcgacggcggacccgagtacacttttcaaggcactgtacagcaagtcatcgcacaggtcaatgacatgcggaagcaagctggtctgtcttcttttggcgatgatgcatcttatggtaccacggctgcttttaacgggacagcgtctcccctctctgccatagccgacacttatacccattcggtctgcaaggttgtcacaaaggagtcggcgaattatagggcaactgaagatggtataagttatctcgaagggctcacgggtaaatgtacgatgagtggccctaaggtttgcggtcgtgtatcctgttcttataactctggaatctggtggtgcaatgacaacgatggtgactctacgtaccagtgctctgaatttggcgaactcgccaagcaggttgtggagcactgcacgatcaaggtttaccaagtcgaggatcaggtctggggccagtcgttcgatagccgcaacttcaacgtttatgttggaggggcttggtgttga

SEQ ID NO: 11086 - protein, 208 aa, Muscodor strobelii
  misc_feature: SGI Peptide ID NO. 563546
  misc_feature (6)..(208): NCBI GI: 256723698 Blast Desc: NECHADRAFT_86628 [Nectria haematococca mpVI 77-13-4]
  misc_feature (3)..(208): NCBI GI: 39971861 Blast Desc: MGG_07246 [Magnaporthe grisea 70-15] gi|145019746|gb|EDK03974.1| MGG_07246 [Magnaporthe grisea 70-15]
  misc_feature (19)..(208): NCBI GI: 121717032 Blast Desc: conserved [Aspergillus clavatus NRRL 1] gi|119404141|gb|EAW14558.1| conserved [Aspergillus clavatus NRRL 1]
  misc_feature (1)..(208): NCBI GI: 238839568 Blast Desc: [Microsporum canis CBS 113480]
  misc_feature (1)..(178): NCBI GI: 238486654 Blast Desc: conserved [Aspergillus flavus NRRL3357] gi|220699444|gb|EED55783.1| conserved [Aspergillus flavus NRRL3357]
  misc_feature (30)..(203): NCBI GI: 170940149 Blast Desc: protein product [Podospora anserina]
  misc_feature (23)..(178): NCBI GI: 169770867 Blast Desc: [Aspergillus oryzae RIB40] gi|83767762|dbj|BAE57901.1| protein product [Aspergillus oryzae]
  misc_feature (5)..(155): NCBI GI: 115386460 Blast Desc: [Aspergillus terreus NIH2624] gi|114190769|gb|EAU32469.1| [Aspergillus terreus NIH2624]
  misc_feature (30)..(203): NCBI GI: 171680404 Blast Desc: protein product [Podospora anserina] gi|170939829|emb|CAP65054.1| protein product [Podospora anserina]
  misc_feature (5)..(156): NCBI GI: 169785397 Blast Desc: [Aspergillus oryzae RIB40] gi|83775907|dbj|BAE66026.1| protein product [Aspergillus oryzae]
MKFVLAAQTLVSAVAATTLPRLVDSVPEGYTIADINWTMPIVDGGPEYTFQGTVQQVIAQVNDMRKQAGLSSFGDDASYGTTAAFNGTASPLSAIADTYTHSVCKVVTKESANYRATEDGISYLEGLTGKCTMSGPKVCGRVSCSYNSGIWWCNDNDGDSTYQCSEFGELAKQVVEHCTIKVYQVEDQVWGQSFDSRNFNVYVGGAWC

SEQ ID NO: 11087 - DNA, 2769 bp, Muscodor strobelii
  misc_feature: SGI cDNA ID NO. 563547
  misc_feature: Reduced expression when VOC is produced
  misc_feature: Encodes the peptide sequence at SEQ ID NO 11088
atgcaaatccggtcaatcttggccgctgcccttgtggcttcggcatcgattgccgctgccgttcccgaacacgataacaagccgagaatctactacccgaagcgcgtcaacaggaggttcacgaaccacaccatcacgagcgctgcgtccgaactcccgagcagctccgccgacgtttcatcgacgaagagagatgggattagtgatcttttgagcggtcttttgggtggaggctcgtcgtcatcgtcgtcgagcagcgattcgagcgacgatgtcacgactgtcgtcagaatgtccacggtcaccgtgtctccttcaaccaccacatcgacggcagacaagagcgacaagaccacaactacggaaaagggaggactgagcataccgtctctgagcttggacatctcgaccgttcttggcggtggctcgaaaacgacgacctcatcgcctacgaaaactgcgacatccagcgattcatcagcaacatccgactcttcttccgccacagacgactcctccagcgactctgccgccgatgcgacgacttccacaggaatcattgtcttccccacgggcgcatccactatcacgacaaccgccagtgtcactagatcgacatcggactcgtccgtgacatcgagcagtgatggtggtcttctcggaggtgtgacaagcatcatcggcggcattggtggctcttccacaactgctaacgctacggaatctgcgtcgtcaactagcatcaagtcctcgaccgactctgacgcttcgccgacaaccacgaagaagtcggacacaacgacgaccactgaggaacccaccaaggcgacaactaaggcgagctcgacatcatcatcgggcggtctgctgggcggtcttactagcgtgatcggcggcgcaacgagcgacttgttcccaagctcaacggccaatgcaaccgaaaccgcggccagtccgacaactaaggtcaccacgactcccacatcgaaggcctctgcgacggttacgacgaaagcatccgagacaaccaccgctgctgccagcccctcgtcttcatccagcggcttgcttggtggattgaccagcatcattggcggcgtcaccagcgccctggacccaactccatccgccaatgccacggactcgtcaaccaacgtagctgttacaccgacctcgtctacgggcggtctcttgccaactttgtctatcacgctggttcccacgacgacggacgctccaaccagcagccccaacggaactgatgtgacactgacgtcgtcttccagtggtctcctgccgtccttgtctatcacgctcgtccctacatcgaccgatgtgcctaccagcagccccaatgcgacagactcgacaagtgtgcctactcagtccgtcagtctccccggctcaatcacgccaacctcgaccccgtcgcccaccgtgtcgaccaatggcaccacgaccgatatccctacgtccacgaccgttccaacctcggtccccacgtcttccgagactaccgttccaggcaactctacgtctgtcaccgatactcccacgtcttcaacagtgattccgacctccctcccgacctcgtccgacactcagatcccgcagaactcgacttcagtccctactacctcgacttctgtgccggcaactacaacggatatccccaccacgactacgccaattacaacgcaaccgcccacgacggtcatctctagcacgacatcgacatcgtccaggactcgggtcaccagtgtcgtacccacaaacacgatcactgactctcagtcttggttgccgacatctcttattgtgcagccatcgacaacctcattcagcacaggacacgttcctaccacagctactggcattcccacgtctctccccaaggccatcaacccctccacaactgccattatccagccctcgggcaccaggctgatccagatctcattcttgtatggcgagaactatgagcatctcgtggagaagccggtcgctgccgcccaggtgttcgaatatcttcctcaaggcctggcctatttgccccacatgaagcctgaggatgtgacggtatatcagatcagaccgtacgacacgatgtctaccctgggttacattacctcgcaggctctggtttactatccagaggacaaggtctaccagcttgccgctgatatcaaggcgccttacgccgccctgtaccaaaatcacaaggatactttgaccgggaatctgacgtcccaaatcaacaccgccattcctatctggcttggatcaggactggacggcggggacccgaacggtagtggagactccggcggcagtggtaacggcggatccagcaacaacaatggctttgagaacaacggctctggcgaccagacagcttctcagaagggaacaaccgctggtatcgctgttggtgctatcagtgtagtgggtgcatatggtgctgccatgttcgtcgtcgcccgacgatacaagcgcaagaagcaaagacatcagcgaagcagctctgtttctgcggtggatgagatgcgccagaccggtagccctgcccttatgggtggagccctcctgagccgtgatttcacagacagcccgaactacagcagcaatcaaggttacggcagcacttctggcggcaacttgcgcgatagtcagggtagcggaaggagcggcaccaccggcggctactcagcccgtacagccaacatctcggctcctgttgctgccgagaattcgctaggctggaactga

SEQ ID NO: 11088 - protein, 922 aa, Muscodor strobelii
  misc_feature: SGI Peptide ID NO. 563547
  misc_feature (348)..(922): NCBI GI: 46122511 Blast Desc: FG05633.1 [Gibberella zeae PH-1]
  misc_feature (587)..(922): NCBI GI: 145603468 Blast Desc: MGG_06033 [Magnaporthe grisea 70-15] gi|145011690|gb|EDJ96346.1| MGG_06033 [Magnaporthe grisea 70-15]
  misc_feature (450)..(922): NCBI GI: 116196598 Blast Desc: CHGG_04897 [Chaetomium globosum CBS 148.51] gi|88180810|gb|EAQ88278.1| CHGG_04897 [Chaetomium globosum CBS 148.51]
  misc_feature (509)..(922): NCBI GI: 171688432 Blast Desc: protein product [Podospora anserina] gi|170944178|emb|CAP70288.1| protein product [Podospora anserina]
  misc_feature (293)..(867): NCBI GI: 261352277 Blast Desc: conserved [Verticillium albo-atrum VaMs.102]
  misc_feature (497)..(922): NCBI GI: 85078295 Blast Desc: NCU04373 [Neurospora crassa OR74A] gi|28917195|gb|EAA26910.1| NCU04373 [Neurospora crassa OR74A] gi|40882252|emb|CAF06077.1| [Neurospora crassa]
  misc_feature (555)..(922): NCBI GI: 154299818 Blast Desc: BC1G_11535 [Botryotinia fuckeliana B05.10] gi|150857225|gb|EDN32417.1| BC1G_11535 [Botryotinia fuckeliana B05.10]
  misc_feature (590)..(921): NCBI GI: 50549557 Blast Desc: YALI0D00627p [Yarrowia lipolytica] gi|49648117|emb|CAG80435.1| YALI0D00627p [Yarrowia lipolytica]
  misc_feature (601)..(922): NCBI GI: 154272115 Blast Desc: [Ajellomyces capsulatus NAm1] gi|150408897|gb|EDN04353.1| [Ajellomyces capsulatus NAm1]
  misc_feature (622)..(922): NCBI GI: 169618864 Blast Desc: SNOG_12624 [Phaeosphaeria nodorum SN15] gi|160703696|gb|EAT79922.2| SNOG_12624 [Phaeosphaeria nodorum SN15]
  misc_feature: Useful for introducing or modulating the production of volatile compounds
MQIRSILAAALVASASIAAAVPEHDNKPRIYYPKRVNRRFTNHTITSAASELPSSSADVSSTKRDGISDLLSGLLGGGSSSSSSSSDSSDDVTTVVRMSTVTVSPSTTTSTADKSDKTTTTEKGGLSIPSLSLDISTVLGGGSKTTTSSPTKTATSSDSSATSDSSSATDDSSSDSAADATTSTGIIVFPTGASTITTTASVTRSTSDSSVTSSSDGGLLGGVTSIIGGIGGSSTTANATESASSTSIKSSTDSDASPTTTKKSDTTTTTEEPTKATTKASSTSSSGGLLGGLTSVIGGATSDLFPSSTANATETAASPTTKVTTTPTSKASATVTTKASETTTAAASPSSSSSGLLGGLTSIIGGVTSALDPTPSANATDSSTNVAVTPTSSTGGLLPTLSITLVPTTTDAPTSSPNGTDVTLTSSSSGLLPSLSITLVPTSTDVPTSSPNATDSTSVPTQSVSLPGSITPTSTPSPTVSTNGTTTDIPTSTTVPTSVPTSSETTVPGNSTSVTDTPTSSTVIPTSLPTSSDTQIPQNSTSVPTTSTSVPATTTDIPTTTTPITTQPPTTVISSTTSTSSRTRVTSVVPTNTITDSQSWLPTSLIVQPSTTSFSTGHVPTTATGIPTSLPKAINPSTTAIIQPSGTRLIQISFLYGENYEHLVEKPVAAAQVFEYLPQGLAYLPHMKPEDVTVYQIRPYDTMSTLGYITSQALVYYPEDKVYQLAADIKAPYAALYQNHKDTLTGNLTSQINTAIPIWLGSGLDGGDPNGSGDSGGSGNGGSSNNNGFENNGSGDQTASQKGTTAGIAVGAISVVGAYGAAMFVVARRYKRKKQRHQRSSSVSAVDEMRQTGSPALMGGALLSRDFTDSPNYSSNQGYGSTSGGNLRDSQGSGRSGTTGGYSARTANISAPVAAENSLGWN

SEQ ID NO: 11089 - DNA, 4217 bp, Muscodor strobelii
  misc_feature: SGI EST ID NO. CUFF.27119.1
  misc_feature: Variant of the nucleotide sequence at SEQ ID NO 11087
caccacccgctcactcatcagactcgtcacccagccggctgttcatccagacactggcacccacctgcaccaccacggcactcctcactgttccctcgtctggtgtctctggctctctggcgcctgtctagccttggcctgcccagcctgcctcgcgtttcccctttcctcgtgcacaccctccaccacacccgcctctttccctcacctacccttttcgctccacctcacctctcgtctctcctttccccttcactcgccgccttcgtgaggtttaccttccgacgacaacgcttctccccggcgcaccctcagtctcgacaacttccgtctctttcgttcgtcgcgcgccagtacgaccgacgttcgaaatcgagcacagaggacccaggcgacaatctgccaagctcccaatgtcgtcctgaactctgtttcgaccaacgcaaacgatccaggccgccaacctcgatatatctcaaccagttttgatgatctactagacgattcaatcgtcttgccactctttttaaatacagcacatatactaaaatctatcgcttgtcaaagacaagcatccactcgttgacaatatctgtcaagtacattcgttcagaacattcctgactctagagaccttgtacacctaattcttgatcaccgcgccccgagcaggaccggcaagtaaacatacaatacctgggattaattggaagagggtcgaacatgcaaatccggtcaatcttggccgctgcccttgtggcttcggcatcgattgccgctgccgttcccgaacacgataacaagccgagaatctactacccgaagcgcgtcaacaggaggttcacgaaccacaccatcacgagcgctgcgtccgaactcccgagcagctccgccgacgtttcatcgacgaagagagatgggattagtgatcttttgagcggtcttttgggtggaggctcgtcgtcatcgtcgtcgagcagcgattcgagcgacgatgtcacgactgtcgtcagaatgtccacggtcaccgtgtctccttcaaccaccacatcgacggcagacaagagcgacaagaccacaactacggaaaagggaggactgagcataccgtctctgagcttggacatctcgaccgttcttggcggtggctcgaaaacgacgacctcatcgcctacgaaaactgcgacatccagcgattcatcagcaacatccgactcttcttccgccacagacgactcctccagcgactctgccgccgatgcgacgacttccacaggaatcattgtcttccccacgggcgcatccactatcacgacaaccgccagtgtcactagatcgacatcggactcgtccgtgacatcgagcagtgatggtggtcttctcggaggtgtgacaagcatcatcggcggcattggtggctcttccacaactgctaacgctacggaatctgcgtcgtcaactagcatcaagtcctcgaccgactctgacgcttcgccgacaaccacgaagaagtcggacacaacgacgaccactgaggaacccaccaaggcgacaactaaggcgagctcgacatcatcatcgggcggtctgctgggcggtcttactagcgtgatcggcggcgcaacgagcgacttgttcccaagctcaacggccaatgcaaccgaaaccgcggccagtccgacaactaaggtcaccacgactcccacatcgaaggcctctgcgacggttacgacgaaagcatccgagacaaccaccgctgctgccagcccctcgtcttcatccagcggcttgcttggtggattgaccagcatcattggcggcgtcaccagcgccctggacccaactccatccgccaatgccacggactcgtcaaccaacgtagctgttacaccgacctcgtctacgggcggtctcttgccaactttgtctatcacgctggttcccacgacgacggacgctccaaccagcagccccaacggaactgatgtgacactgacgtcgtcttccagtggtctcctgccgtccttgtctatcacgctcgtccctacatcgaccgatgtgcctaccagcagccccaatgcgacagactcgacaagtgtgcctactcagtccgtcagtctccccggctcaatcacgccaacctcgaccccgtcgcccaccgtgtcgaccaatggcaccacgaccgatatccctacgtccacgaccgttccaacctcggtccccacgtcttccgagactaccgttccaggcaactctacgtctgtcaccgatactcccacgtcttcaacagtgattccgacctccctcccgacctcgtccgacactcagatcccgcagaactcgacttcagtccctactacctcgacttctgtgccggcaactacaacggatatccccaccacgactacgccaattacaacgcaaccgcccacgacggtcatctctagcacgacatcgacatcgtccaggactcgggtcaccagtgtcgtacccacaaacacgatcactgactctcagtcttggttgccgacatctcttattgtgcagccatcgacaacctcattcagcacaggacacgttcctaccacagctactggcattcccacgtctctccccaaggccatcaacccctccacaactgccattatccagccctcgggcaccaggctgatccagatctcattcttgtatggcgagaactatgagcatctcgtggagaagccggtcgctgccgcccaggtgttcgaatatcttcctcaaggcctggcctatttgccccacatgaagcctgaggatgtgacggtatatcagatcagaccgtacgacacgatgtctaccctgggttacattacctcgcaggctctggtttactatccagaggacaaggtctaccagcttgccgctgatatcaaggcgccttacgccgccctgtaccaaaatcacaaggatactttgaccgggaatctgacgtcccaaatcaacaccgccattcctatctggcttggatcaggactggacggcggggacccgaacggtagtggagactccggcggcagtggtaacggcggatccagcaacaacaatggctttgagaacaacggctctggcgaccagacagcttctcagaagggaacaaccgctggtatcgctgttggtgctatcagtgtagtgggtgcatatggtgctgccatgttcgtcgtcgcccgacgatacaagcgcaagaagcaaagacatcagcgaagcagctctgtttctgcggtggatgagatgcgccagaccggtagccctgcccttatgggtggagccctcctgagccgtgatttcacagacagcccgaactacagcagcaatcaaggttacggcagcacttctggcggcaacttgcgcgatagtcagggtagcggaaggagcggcaccaccggcggctactcagcccgtacagccaacatctcggctcctgttgctgccgagaattcgctaggctggaactgatcgagaacgaatgcatacgactacacgtccgtcccttttattacttgctattgtttttttggacttcttacctcgatacccgtccaggtggccttgttagatctctcggtgtggtagacgttatccgagcgaaccgatgagcgccttggaaacgcgatcaattttttgggcagccgctcacattttcttgtcatttaaccgcgtctcgggcatcgtcgatgatcttggcccaccttttgctggctgtggtcagatgtctagatgacttttatttaatgcatcttatttgtacttggctggggaaaagcggagacgatccgcagaggtcctcgaggacagcggctcgtagggcaagtgatgaagttggactgatgagggacgaaagggagctgcagtatcaccgcgccacggaattgtatatcacggttttgccccttctgtgtgcgtgtactgagcaaatgcatagttcaaccgcatgggaaaagtcgaaacggctcccctgacacctctcggaataatgcatatatgacgaatagaccaaaagaaaattttgaaaatacataactcatgacaatatcagatacgacgtgcctttgccatgtgtacattgtccggcagagtcgctgaatatccgatgttttagtttctatcgtatagtagtattatgagccctcgggctcgtttgtatattttaatttaatatccatgtggattcttcttttcca

SEQ ID NO: 11090 - DNA, 1608 bp, Muscodor strobelii
  misc_feature: SGI cDNA ID NO. 563548
  misc_feature: Encodes the peptide sequence at SEQ ID NO 11091
atggagcgcgatatgctgaattcggcggattggagggatcctaacgaaattgagatgaatgagatggatgggcatcgaaagtttgtggaggagggcgatagtgaggatgaggatgaggatgcggtcgagttgagtcgtgtgttcggagtggggcagggcgagagaggtgaaagagggtatacggatgatgaggaacaggctgttgtgaggttgtttgataggaagcttgtggtcttccttgcggcttgttattgtctttcttttgtcgatcgatctaatatcggaaatgctcgtatagcaggaatggaagacgatcttcagacagtgcacccacgagagaactactttgagtgggcaatccgtgctttctacatagcgtatatcgcgttcgaatggatgtctttactctggcgtattgtgccagctcacatctatgtttcgcttgtcatattatcatgggggatcattgcgtcgttgcaagcgactgtcacgagctatcccgttctcatattcctacgtggcttgttgggtatcggtgaagctggatttacgggtgttccgttctacctgtcgtttttctataagaggagagaattggcctttaggactgctctttttatttctgctgctcctctggccagtgcatttgctggattcctggcttggattatcctgctcttcggcaagacggtacctatcgcttcatggcgtctattatttctggtcgagggctttccctcagtcgtcgtctcaactatagcatggggtttaataccagactcaccggcatctgccaaatatcttactcatcgacagcaaagaattgcgcatctacgattgaataacgataattctcacgcccgctcttcatctccaaataatacaaataatacaaagagatcaaaactcaatcccaaagaggttctggctgctttcgctgacccaaaggcctggctcacggcattcatgttcttcctagccaacatggcctattccaccctcccagcgtttctccccacgatcctgaaggatatgggacacagcgacttgcaatcagaagctctctccgcaccaccaaatctacttgcattcggtatagtgctcctaacagcacatatttcagaccgcgcacaagtccgctcatcattcatcatcccccacgctctactctcgggaacaggatacttactccttgctctcgccgaaccgctgggtctgagtcctatggtgcgatatatcgccgtatatcccgctgctgtcgggttcttcagtgttgttgtattgattatatcttggtctattaataaccagccagaagaaggacgacggggcggtgggttcgtgttgttccagatcgttggacagtgtgggccgctgttgggcgcgcagttgtatcctgatcgggatgcgccgttctttgacaggggtatgtgggcttgtgctgctgctatgtttggagttgctgttcttgcgggagtgttgagggtttatttgaagtggttgaatcggaggttggagaggatggaggataagggtgagaaggatgaggcgaagggattggtcggtgatggaggtgtgaaggatagggggtttcggtttatgctttga

SEQ ID NO: 11091 - protein, 535 aa, Muscodor strobelii
  misc_feature: SGI Peptide ID NO. 563548
  misc_feature (80)..(462): Pfam Id: PF07690 Pfam Desc: Major Facilitator Superfamily
  misc_feature (146)..(462): Pfam Id: PF07690 Pfam Desc: Major Facilitator Superfamily
  misc_feature (60)..(535): NCBI GI: 46136105 Blast Desc: FG09568.1 [Gibberella zeae PH-1]
  misc_feature (60)..(535): NCBI GI: 256727011 Blast Desc: [Nectria haematococca mpVI 77-13-4]
  misc_feature (20)..(506): NCBI GI: 164429470 Blast Desc: NCU04374 [Neurospora crassa OR74A] gi|157073491|gb|EAA26911.2| conserved [Neurospora crassa OR74A]
  misc_feature (20)..(506): NCBI GI: 40882251 Blast Desc: related to nicotinamide mononucleotide permease [Neurospora crassa]
  misc_feature (60)..(522): NCBI GI: 261352322 Blast Desc: conserved [Verticillium albo-atrum VaMs.102]
  misc_feature (60)..(504): NCBI GI: 154317272 Blast Desc: BC1G_03538 [Botryotinia fuckeliana B05.10] gi|150844955|gb|EDN20148.1| BC1G_03538 [Botryotinia fuckeliana B05.10]
  misc_feature (60)..(535): NCBI GI: 156059322 Blast Desc: SS1G_03673 [Sclerotinia sclerotiorum 1980] gi|154701460|gb|EDO01199.1| SS1G_03673 [Sclerotinia sclerotiorum 1980]
  misc_feature (24)..(530): NCBI GI: 258573337 Blast Desc: conserved [Uncinocarpus reesii 1704] gi|237901116|gb|EEP75517.1| conserved [Uncinocarpus reesii 1704]
  misc_feature (30)..(535): NCBI GI: 242818692 Blast Desc: MFS transporter, [Talaromyces stipitatus ATCC 10500] gi|218713633|gb|EED13057.1| MFS transporter, [Talaromyces stipitatus ATCC 10500]
  misc_feature (24)..(529): NCBI GI: 226291886 Blast Desc: conserved [Paracoccidioides brasiliensis Pb18]
MERDMLNSADWRDPNEIEMNEMDGHRKFVEEGDSEDEDEDAVELSRVFGVGQGERGERGYTDDEEQAVVRLFDRKLVVFLAACYCLSFVDRSNIGNARIAGMEDDLQTVHPRENYFEWAIRAFYIAYIAFEWMSLLWRIVPAHIYVSLVILSWGIIASLQATVTSYPVLIFLRGLLGIGEAGFTGVPFYLSFFYKRRELAFRTALFISAAPLASAFAGFLAWIILLFGKTVPIASWRLLFLVEGFPSVVVSTIAWGLIPDSPASAKYLTHRQQRIAHLRLNNDNSHARSSSPNNTNNTKRSKLNPKEVLAAFADPKAWLTAFMFFLANMAYSTLPAFLPTILKDMGHSDLQSEALSAPPNLLAFGIVLLTAHISDRAQVRSSFIIPHALLSGTGYLLLALAEPLGLSPMVRYIAVYPAAVGFFSVVVLIISWSINNQPEEGRRGGGFVLFQIVGQCGPLLGAQLYPDRDAPFFDRGMWACAAAMFGVAVLAGVLRVYLKWLNRRLERMEDKGEKDEAKGLVGDGGVKDRGFRFML

SEQ ID NO: 11092 - DNA, 2841 bp, Muscodor strobelii
  misc_feature: SGI EST ID NO. CUFF.26204.0
  misc_feature: Variant of the nucleotide sequence at SEQ ID NO 11090
cctgtctgccaactgtttccgggcgcgtgtcaagaggacctctgctttctcatgttcagctccgaagctggggagagctcccaattgacttcagctaagcttgttagcttaacggtgctccgtgctgacgggtcctttgctcattcattcgttcttctgatcgcattattacattgacttgttgttatttgttttcttatgccatttcgttagtttatgcataggcattgttattgttgagatgcatggcatcttggctctcatgacgtagttccctggtcacttccaccttgcagacttcgcggctttcaatgctgtgcgagagacgcgtttcgaacggatttgaagtgagatggagcgcgatatgctgaattcggcggattggagggatcctaacgaaattgagatgaatgagatggatgggcatcgaaagtttgtggaggagggcgatagtgaggatgaggatgaggatgcggtcgagttgagtcgtgtgttcggagtggggcagggcgagagaggtgaaagagggtatacggatgatgaggaacaggctgttgtgaggttgtttgataggaagcttgtggtcttccttgcggcttgttattgtctttcttttgtcgatcgatctaatatcggaaatgctcgtatagcaggaatggaagacgatcttcagacagtgcacccacgagagaactactttgagtgggcaatccgtgctttctacatagcgtatatcgcgttcgaatggatgtctttactctggcgtattgtgccagctcacatctatgtttcgcttgtcatattatcatgggggatcattgcgtcgttgcaagcgactgtcacgagctatcccgttctcatattcctacgtggcttgttgggtatcggtgaagctggatttacgggtgttccgttctacctgtcgtttttctataagaggagagaattggcctttaggactgctctttttatttctgctgctcctctggccagtgcatttgctggattcctggcttggattatcctgctcttcggcaagacggtacctatcgcttcatggcgtctattatttctggtcgagggctttccctcagtcgtcgtctcaactatagcatggggtttaataccagactcaccggcatctgccaaatatcttactcatcgacagcaaagaattgcgcatctacgattgaataacgataattctcacgcccgctcttcatctccaaataatacaaataatacaaagagatcaaaactcaatcccaaagaggttctggctgctttcgctgacccaaaggcctggctcacggcattcatgttcttcctagccaacatggcctattccaccctcccagcgtttctccccacgatcctgaaggatatgggacacagcgacttgcaatcagaagctctctccgcaccaccaaatctacttgcattcggtatagtgctcctaacagcacatatttcagaccgcgcacaagtccgctcatcattcatcatcccccacgctctactctcgggaacaggatacttactccttgctctcgccgaaccgctgggtctgagtcctatggtgcgatatatcgccgtatatcccgctgctgtcgggttcttcagtgttgttgtattgattatatcttggtctattaataaccagccagaagaaggacgacggggcggtgggttcgtgttgttccagatcgttggacagtgtgggccgctgttgggcgcgcagttgtatcctgatcgggatgcgccgttctttgacaggggtatgtgggcttgtgctgctgctatgtttggagttgctgttcttgcgggagtgttgagggtttatttgaagtggttgaatcggaggttggagaggatggaggataagggtgagaaggatgaggcgaagggattggtcggtgatggaggtgtgaaggatagggggtttcggtttatgctttgattattatgtgtggatgattttgtgattgatgtatagacgttcgagatatggtcggactgtttttgcacattgcaatgatcttgaattgcgatatcgaaacactcatgatatatatagaacgaacatcaaaaaaacacacctgatatacggatgatgatacaatttccttctgtaattacacgtaagagcgattgactgtaggagagttgacccaatcaaccattccaaagactcgtcattattgtctacgaaatattgtcctcgatccacaaccccctttcttggatgctctgataactgaaagtgatttgggtatgtgtctttttccttatccgaagaccttctctcatatacaatagtaatactcgtattgtcctacagaagtttattgcgtaagagtcgacaaacgggacggcctctcggcgactacaggcccgacatgatgcagattgtttctattcgccaggctgagttgaaatagaacagctaacttccatgacttctcatcgcatcctagatagataagtcatatcggctttgtctgtccccgtaaagagggccagaagggaatgaaggatccacctaggaagaatgacacgtgtataaggtaagacggtgtctcgggcttttgttcctggcgagagcggtgtgacacgcagaccttataccatggtgccggactcccgtcaagtccgactttgatttcggggaatgtgaaactgtcatttatctcttagtgacatgggaatatcagtccaaattgtaatggataagcaatggaatatgattgcttgtcgtcgaatatgaccgaattgagagacaaatcgatcttttctgagatattgcgagcatgacaatcggtgcaggcgtgaatgtcaacg

SEQ ID NO: 11093 - DNA, 984 bp, Muscodor strobelii
  misc_feature: SGI cDNA ID NO. 563549
  misc_feature: Encodes the peptide sequence at SEQ ID NO 11094
atggataccaacatggaggacgtaggtcgggtcccgaccgagctggcccccgttacctcagaacccaccaccatccctacgctcgacggctggatcgagagtttgatgaactgcaaacagcttgccgagtccgacgtccagaggctctgcgagaaggcacgagaagttttacaggacgagtccaatgtgcagccagtgaaatgccccgtaacggtctgcggcgacattcacggccaattccacgatctgatggagttgttcaagatcggcggacccaacccagataccaactatctcttcatgggcgattacgttgaccgaggttactactccgtcgagacggtgaccctgcttgttgctttgaagattcgataccccggccgcatcaccatcctgcgcggcaaccacgagtcgagacagatcacgcaggtctacggcttctacgacgagtgtctgcggaaatacggcaacgccaacgtctggaagttcttcaccgacctgttcgactacctgcccctgaccgccctcatcgacaaccagatcttctgcctgcatggcggcctgtcccccagcatcgacaccctcgacaacatccgcgccctcgaccgcatccaggaggtcccacacgagggccccatgtgcgacctgctctggtccgatcctgacgatcgctgcggatggggcatctcccctcgtggcgccggttacaccttcggccaagacatctccgaggctttcaaccacaacaacggcctgaccctgatcgccagagctcaccagctggtcatggagggctacaactggtcgcaggacaggaatgtcgtcaccatcttctccgcacccaactactgctaccgatgcggtaaccaggctgctatcatggagatcgacgagcacttgaaatataccttcttacaattcgacccttgcccccgcgctggcgagcctatggtatctcgacgcacaccggactacttcctctag

SEQ ID NO: 11094 - protein, 327 aa, Muscodor strobelii
  misc_feature: SGI Peptide ID NO. 563549
  misc_feature (68)..(263): Pfam Id: PF00149 Pfam Desc: Calcineurin-like phosphoesterase
  misc_feature (1)..(327): NCBI GI: 164425032 Blast Desc: serine/threonine-protein phosphatase PP2A catalytic subunit [Neurospora crassa OR74A] gi|29611957|sp|P48580.3|PP2A1_NEUCR RecName: phosphatase PP2A
  misc_feature (1)..(327): NCBI GI: 256727556 Blast Desc: [Nectria haematococca mpVI 77-13-4]
  misc_feature (1)..(327): NCBI GI: 171690772 Blast Desc: protein product [Podospora anserina] gi|170945334|emb|CAP71446.1| protein product [Podospora anserina]
  misc_feature (5)..(327): NCBI GI: 145603364 Blast Desc: serine/threonine protein phosphatase PP2A catalytic subunit [Magnaporthe grisea 70-15] gi|145011609|gb|EDJ96265.1| serine/threonine protein phosphatase PP2A catalytic subunit
  misc_feature (1)..(327): NCBI GI: 189206039 Blast Desc: serine/threonine-protein phosphatase PP2A catalytic subunit [Pyrenophora tritici-repentis Pt-1C-BFP] gi|187975447|gb|EDU42073.1| serine/threonine-protein phosphatase
  misc_feature (5)..(327): NCBI GI: 261352395 Blast Desc: serine/threonine-protein phosphatase PP2A catalytic subunit [Verticillium albo-atrum VaMs.102]
  misc_feature (1)..(327): NCBI GI: 154303623 Blast Desc: serine/threonine protein phosphatase PP2A-2 catalytic subunit [Botryotinia fuckeliana B05.10] gi|150854490|gb|EDN29682.1| serine/threonine protein phosphatase
  misc_feature (1)..(327): NCBI GI: 91694271 Blast Desc: serine/threonine-protein phosphatase PP2A catalytic subunit [Hypocrea lixii]
  misc_feature (1)..(327): NCBI GI: 242819298 Blast Desc: protein phosphatase 2A catalytic subunit Pph21, [Talaromyces stipitatus ATCC 10500] gi|218713754|gb|EED13178.1| protein phosphatase 2A catalytic subunit Pph21, [Talaromyces ATCC
  misc_feature (1)..(327): NCBI GI: 225684080 Blast Desc: serine/threonine-protein phosphatase PP2A catalytic subunit [Paracoccidioides brasiliensis Pb03] gi|226293475|gb|EEH48895.1| serine/threonine-protein phosphatase
  misc_feature (1)..(327): SWISSPROT Homolog: EC 3.1.3.16 Phosphoprotein phosphatase
MDTNMEDVGRVPTELAPVTSEPTTIPTLDGWIESLMNCKQLAESDVQRLCEKAREVLQDESNVQPVKCPVTVCGDIHGQFHDLMELFKIGGPNPDTNYLFMGDYVDRGYYSVETVTLLVALKIRYPGRITILRGNHESRQITQVYGFYDECLRKYGNANVWKFFTDLFDYLPLTALIDNQIFCLHGGLSPSIDTLDNIRALDRIQEVPHEGPMCDLLWSDPDDRCGWGISPRGAGYTFGQDISEAFNHNNGLTLIARAHQLVMEGYNWSQDRNVVTIFSAPNYCYRCGNQAAIMEIDEHLKYTFLQFDPCPRAGEPMVSRRTPDYFL

SEQ ID NO: 11095 - DNA, 1943 bp, Muscodor strobelii
  misc_feature: SGI EST ID NO. CUFF.26444.1
  misc_feature: Variant of the nucleotide sequence at SEQ ID NO 11093
ccaccttctgtacgtgacatgtcttggtaacctcttcgcatttaccaccctgtcagaccttacgactacgaggaaaacgacgacaagctcgcattgtgcatctctctgcattgtttttatttcctgttggcggcgactgatagattagaaaccatctccttctgcgtgacttgtgacgacgacgacgatacccaaaacaacaccaccaccaattccatcatccaggccaggctgaccccacccccgagttcttgcttgctactgcagctacctctgctgttggacctgaggtgctgccatcgcgtgcccgaccatctcaacatccgccgccacttttccaaccctcaacggcgaccttgacgtgttctttgtgttttctttgcattcttcgctattgcatccttccgaactagtagatacacacgtgcgcgccccgcgacgacctctgctgatcccctccccacgtccgccgcccatcccaccgcctcgtcgttcacgtccaaatcccacatcagccagccatcgccatcatggataccaacatggaggacgtaggtcgggtcccgaccgagctggcccccgttacctcagaacccaccaccatccctacgctcgacggctggatcgagagtttgatgaactgcaaacagcttgccgagtccgacgtccagaggctctgcgagaaggcacgagaagttttacaggacgagtccaatgtgcagccagtgaaatgccccgtaacggtctgcggcgacattcacggccaattccacgatctgatggagttgttcaagatcggcggacccaacccagataccaactatctcttcatgggcgattacgttgaccgaggttactactccgtcgagacggtgaccctgcttgttgctttgaagattcgataccccggccgcatcaccatcctgcgcggcaaccacgagtcgagacagatcacgcaggtctacggcttctacgacgagtgtctgcggaaatacggcaacgccaacgtctggaagttcttcaccgacctgttcgactacctgcccctgaccgccctcatcgacaaccagatcttctgcctgcatggcggcctgtcccccagcatcgacaccctcgacaacatccgcgccctcgaccgcatccaggaggtcccacacgagggccccatgtgcgacctgctctggtccgatcctgacgatcgctgcggatggggcatctcccctcgtggcgccggttacaccttcggccaagacatctccgaggctttcaaccacaacaacggcctgaccctgatcgccagagctcaccagctggtcatggagggctacaactggtcgcaggacaggaatgtcgtcaccatcttctccgcacccaactactgctaccgatgcggtaaccaggctgctatcatggagatcgacgagcacttgaaatataccttgtaagacaaccccgttgccaccaccggcagagcccccgactcggtgtccatattaggacttacaattcgacccttgcccccgcgctggcgagcctatggtatctcgacgcacaccggactacttcctctagtcgtaatgaggtgtgtaccggtgaaatttcaaggtcatgcggcccgaggttctgacggccgagtaaggaccgatgcggagatatgtcggtgtcacgatcacgatcaaacaaaacacagtgaaggaacagcaagcgcaagcacaagcacagtcgagatagaggctcaggtaaggtctcgggtctgtgggtccgagatacccttgaagagtcgtcttccaagatatgctcgagggatcatgcggcatacgcttgtaggaaacgatgaaagagacgtccaagccaaaaaaaagacagtaggactatcctaagtagattcctgcgccccaatagagagaaatgttctcgtattagatgatgaatgaatagtgctt

SEQ ID NO: 11096 - DNA, 2025 bp, Muscodor strobelii
  misc_feature: SGI cDNA ID NO. 563550
  misc_feature: Reduced expression when VOC is produced
  misc_feature: Encodes the peptide sequence at SEQ ID NO 11097
atggactcaggcagaatctccctgagaaagggccccaagcggaagatcacctctcgcccgaccatcagtgcgccgaggcagatatccgccccgatccccaacaacgatggcccgagcccgagtacgatgcccaggactaggccagccgcttctcccgctgagagtgcaccgaggcaaccacgaccaccaatctcagggagcaagaccggcgacctcgtcaagcgtcgctactctactcgcttcaacaacttgcccgccaacttcgatgccgagaagccccccgtcccctccctacccaacgtcgacttctccaagtatgaagaacccacgagacagcgaccccctccctctcgcggccccgccagcggacctcctaccgtcgacccaaaggccctgcgtgattcgaggctgatgcccgatcagtatgtcgccgatatactcagtgaagccaccgaggacgagattagagactacgaggaagctctgcgcaaactcaagggcaaggcgtcaagcgatctacaacaaaatgtctaccagaaccgcacccagttcatcaagatcagcaaggaggccgagaagctcaagagcgagatgcgctctctgcgcaacttgttcaaggagctcgagaccaacaccaacgcactccgggctgccaccaacaaagagggccgcggcggcgagttctccaccggcctgagcaagcgcgacaagcggagttccgtcgcagacaggactgccctctggaactcccagatgcaggcgttgtacaaaaatgttgaaggctcacagaagtttctacctaactctatggggagacatgtggtacagaacgcaggaccgtggatcgaattagacaatgcaacgtacaaatccagacgatccatgcagatcttcctattgaacgatcatctgttggtcgcctcgcgcaagaaacgcaaggtcgacaacccaaatgatgcgcgcggaccggccacgaagttagtggcagaccgatgctggcctctactggagatcgaggtggtggatatggcggcaacaagcgaggcgtacagtggtaggaacaagcttgcggatgccatcatggtgcgaggagtcgggcaggaatctttcatctatcggacggagaagcccgaagaccccgagaaggcgacactgctgctcaacattcgcaaagccgtcgaggagctacggaaaggtttacagtcggagatggaggccaacacgaaggtcaaggagacaatcaactatttcgcctcgcgcgatcccggcttactacaaaagacagaactgttagagactctgtccgacatcaaggatatgctcatcgaagtagacggcaagcagcagaacttgcgctgggtagagggacagatggatcagctcgacatcgacatcgcgctacaaagttttgacgcagcggtggatcgcgtagagaaactgaagagtctagcgcgagggctcaagagcaacgcgattgcgcaagacttcatcgacttcaaggtggacgagcggagctccaagctagccgggttcatcatccgggagctggtagacacgcacgaccagcaacaaaagacgcggcgcaatgtgagctggttgaacagacttggatttgaggaccgggcgcgagaggcctatctggaagcgcgcgccgacctcatccagaagcgctgcaggcagtgcgtcttccaaggggatctccacgtgtacatctggcagctgtcgtttgtgtacttccgcatcatccgcaacacggtgagctgcttccagagctgcttcccgcaggcgatgatgagcgcgtgcgtgaaatgggccaaggaggaggtggacgcgttcaacgcgatcctcacccgacagctcagcagcacggagaaagggggcgaggtgtggaaccagtgcatggagagggccaagatccacgcgcagatgctggaggaggtgcagcttgacttcaaggacctcgtagggagagatgtaccggagacagtcaaggccagcggccccgttggacttgggcttgcttga

SEQ ID NO: 11097 - protein, 674 aa, Muscodor strobelii
  misc_feature: SGI Peptide ID NO. 563550
  misc_feature (132)..(218): Pfam Id: PF08700 Pfam Desc: Vps51/Vps67
  misc_feature (4)..(674): NCBI GI: 39975951 Blast Desc: MGG_06098 [Magnaporthe grisea 70-15] gi|145011610|gb|EDJ96266.1| MGG_06098 [Magnaporthe grisea 70-15]
  misc_feature (2)..(674): NCBI GI: 171690774 Blast Desc: protein product [Podospora anserina] gi|170945335|emb|CAP71447.1| protein product [Podospora anserina]
  misc_feature (66)..(674): NCBI GI: 164425034 Blast Desc: exocyst complex component EXO84 [Neurospora crassa OR74A] gi|157070763|gb|EAA32583.2| exocyst complex component EXO84 [Neurospora crassa OR74A]
  misc_feature (7)..(674): NCBI GI: 256727557 Blast Desc: NECHADRAFT_33152 [Nectria haematococca mpVI 77-13-4]
  misc_feature (2)..(674): NCBI GI: 46136601 Blast Desc: FG09816.1 [Gibberella zeae PH-1] gi|83288133|sp|Q4HYZ2.1|EXO84_GIBZE RecName: Full=Exocyst complex component EXO84
  misc_feature (5)..(659): NCBI GI: 116195792 Blast Desc: CHGG_04494 [Chaetomium globosum CBS 148.51] gi|88180407|gb|EAQ87875.1| CHGG_04494 [Chaetomium globosum CBS 148.51]
  misc_feature (6)..(674): NCBI GI: 156049563 Blast Desc: SS1G_08488 [Sclerotinia sclerotiorum 1980] gi|154692887|gb|EDN92625.1| SS1G_08488 [Sclerotinia sclerotiorum 1980]
  misc_feature (6)..(674): NCBI GI: 154303621 Blast Desc: BC1G_08695 [Botryotinia fuckeliana B05.10] gi|150854489|gb|EDN29681.1| BC1G_08695 [Botryotinia fuckeliana B05.10]
  misc_feature (5)..(673): NCBI GI: 261352389 Blast Desc: exocyst complex component EXO84 [Verticillium albo-atrum VaMs.102]
  misc_feature (1)..(659): NCBI GI: 145240411 Blast Desc: An08g07370 [Aspergillus niger] gi|134077370|emb|CAK39984.1| protein product [Aspergillus niger]
  misc_feature: Useful for introducing or modulating the production of volatile compounds
MDSGRISLRKGPKRKITSRPTISAPRQISAPIPNNDGPSPSTMPRTRPAASPAESAPRQPRPPISGSKTGDLVKRRYSTRFNNLPANFDAEKPPVPSLPNVDFSKYEEPTRQRPPPSRGPASGPPTVDPKALRDSRLMPDQYVADILSEATEDEIRDYEEALRKLKGKASSDLQQNVYQNRTQFIKISKEAEKLKSEMRSLRNLFKELETNTNALRAATNKEGRGGEFSTGLSKRDKRSSVADRTALWNSQMQALYKNVEGSQKFLPNSMGRHVVQNAGPWIELDNATYKSRRSMQIFLLNDHLLVASRKKRKVDNPNDARGPATKLVADRCWPLLEIEVVDMAATSEAYSGRNKLADAIMVRGVGQESFIYRTEKPEDPEKATLLLNIRKAVEELRKGLQSEMEANTKVKETINYFASRDPGLLQKTELLETLSDIKDMLIEVDGKQQNLRWVEGQMDQLDIDIALQSFDAAVDRVEKLKSLARGLKSNAIAQDFIDFKVDERSSKLAGFIIRELVDTHDQQQKTRRNVSWLNRLGFEDRAREAYLEARADLIQKRCRQCVFQGDLHVYIWQLSFVYFRIIRNTVSCFQSCFPQAMMSACVKWAKEEVDAFNAILTRQLSSTEKGGEVWNQCMERAKIHAQMLEEVQLDFKDLVGRDVPETVKASGPVGLGLA

SEQ ID NO: 11098 - DNA, 2721 bp, Muscodor strobelii
  misc_feature: SGI EST ID NO. CUFF.26239.2
  misc_feature: Variant of the nucleotide sequence at SEQ ID NO 11096
gcctgcgcatcttgagacagagacagccattgacactgcaacaagcaggctgcttgcctttgtggccagaactgcggcatatccctcgagcctctgtattgtacaaacactactgtctttgaaattagactacaattttcaacttagtcaggttcgacccaattgtctcaatcgcgggtgaacctaagttcaattccgtaaacctgttgcctgctcaattgcgcgcagcatcgtgtcacagctttgagctctgccgcctacgacaactctcctttcaaccttttcgttccgcacatactctctcccgacatatccgacaatggactcaggcagaatctccctgagaaagggccccaagcggaagatcacctctcgcccgaccatcagtgcgccgaggcagatatccgccccgatccccaacaacgatggcccgagcccgagtacgatgcccaggactaggccagccgcttctcccgctgagagtgcaccgaggcaaccacgaccaccaatctcagggagcaagaccggcgacctcgtcaagcgtcgctactctactcgcttcaacaacttgcccgccaacttcgatgccgagaagccccccgtcccctccctacccaacgtcgacttctccaagtatgaagaacccacgagacagcgaccccctccctctcgcggccccgccagcggacctcctaccgtcgacccaaaggccctgcgtgattcgaggctgatgcccgatcagtatgtcgccgatatactcagtgaagccaccgaggacgagattagagactacgaggaagctctgcgcaaactcaagggcaaggcgtcaagcgatctacaacaaaatgtctaccagaaccgcacccagttcatcaagatcagcaaggaggccgagaagctcaagagcgagatgcgctctctgcgcaacttgttcaaggagctcgagaccaacaccaacgcactccgggctgccaccaacaaagagggccgcggcggcgagttctccaccggcctgagcaagcgcgacaagcggagttccgtcgcagacaggactgccctctggaactcccagatgcaggcgttgtacaaaaatgttgaaggctcacagaagtttctacctaactctatggggagacatgtggtacagaacgcaggaccgtggatcgaattagacaatgcaacgtacaaatccagacgatccatgcagatcttcctattgaacgatcatctgttggtcgcctcgcgcaagaaacgcaaggtcgacaacccaaatgatgcgcgcggaccggccacgaagttagtggcagaccgatgctggcctctactggagatcgaggtggtggatatggcggcaacaagcgaggcgtacagtggtaggaacaagcttgcggatgccatcatggtgcgaggagtcgggcaggaatctttcatctatcggacggagaagcccgaagaccccgagaaggcgacactgctgctcaacattcgcaaagccgtcgaggagctacggaaaggtttacagtcggagatggaggccaacacgaaggtcaaggagacaatcaactatttcgcctcgcgcgatcccggcttactacaaaagacagaactgttagagactctgtccgacatcaaggatatgctcatcgaagtagacggcaagcagcagaacttgcgctgggtagagggacagatggatcagctcgacatcgacatcgcgctacaaagttttgacgcagcggtggatcgcgtagagaaactgaagagtctagcgcgagggctcaagagcaacgcgattgcgcaagacttcatcgacttcaaggtggacgagcggagctccaagctagccgggttcatcatccgggagctggtagacacgcacgaccagcaacaaaagacgcggcgcaatgtgagctggttgaacagacttggatttgaggaccgggcgcgagaggcctatctggaagcgcgcgccgacctcatccagaagcgctgcaggcagtgcgtcttccaaggggatctccacgtgtacatctggcagctgtcgtttgtgtacttccgcatcatccgcaacacggtgagctgcttccagagctgcttcccgcaggcgatgatgagcgcgtgcgtgaaatgggccaaggaggaggtggacgcgttcaacgcgatcctcacccgacagctcagcagcacggagaaagggggcgaggtgtggaaccagtgcatggagagggccaagatccacgcgcagatgctggaggaggtgcagcttgacttcaaggacctcgtagggagagatgtaccggagacagtcaaggccagcggccccgttggacttgggcttgcttgagtgctgacaacacgcgtggagggacgaaatgaatgcttgacgacgatgtaaatgagatcaatctacgactcttgtatatacccctatcatcgtgcgctcacgaatactaggcttttgaagcatatgatcattgacatgctggtgtttatttcgcgaatatctccgtgaccccttactatggaacctctcatagtctgaccataaagtcaatggtcagatagagggacgaagctccttccattaggtttgatcctacgtgtattctccaatgtcgtccatttggtatccaagtagctaacatataataaggtagaccatgagtatgtgtcgtagcttttagcattcatgcagcagatcaaacagaatggggagcagta

SEQ ID NO: 11099 - DNA, 534 bp, Muscodor strobelii
  misc_feature: SGI cDNA ID NO. 563551
  misc_feature: Reduced expression when VOC is produced
  misc_feature: Encodes the peptide sequence at SEQ ID NO 11100
atggttcagaccagcaccattgcgaccatatcggccgtcacggctgcaactggcttgatagcctactgcgtctacttcgaccaccagcgccgcgcagaccccaacttccgcaggaacctgagacgcgaggagcgcagacatgcccgcgccgagaaggaggctgccgtatcctctaccaagcagagacagcgcgatatccacgccgccgttgatgccgccgaggatgagggtttccccgagggcgtcaacgagaaggagcagtacttcatggagtgggtgcagcagggcgaggtcctgagttccgacccatccaaaactatcgagtctgctctcgctttctacaaggccctcaaggtctaccctactccccaggacctgatcggcatctacgataagactgtcgacaagcgcatccttgatgttctcgccgagatgatcgcatacgacaagtcgctggatctgggcaaaagcccaagcatgggtatgcccgcaggcatcaacctcgccgacctgcccaccgctggtctcgactag

SEQ ID NO: 11100 - protein, 177 aa, Muscodor strobelii
  misc_feature: SGI Peptide ID NO. 563551
  misc_feature (1)..(177): Pfam Id: PF02064 Pfam Desc: MAS20 protein import receptor
  misc_feature (1)..(155): Pfam Id: PF02064 Pfam Desc: MAS20 protein import receptor
  misc_feature (1)..(177): NCBI GI: 46136603 Blast Desc: FG09817.1 [Gibberella zeae PH-1]
  misc_feature (25)..(177): NCBI GI: 256726982 Blast Desc: [Nectria haematococca mpVI 77-13-4]
  misc_feature (1)..(177): NCBI GI: 261352388 Blast Desc: mitochondrial import receptor subunit tom-20 [Verticillium albo-atrum VaMs.102]
  misc_feature (1)..(177): NCBI GI: 154303619 Blast Desc: mitochondrial import receptor subunit tom-20 [Botryotinia fuckeliana B05.10] gi|150854488|gb|EDN29680.1| mitochondrial import receptor subunit tom-20 [Botryotinia B05.10]
  misc_feature (2)..(155): NCBI GI: 67516555 Blast Desc: AN0559.2 [Aspergillus nidulans FGSC A4] gi|40747502|gb|EAA66658.1| AN0559.2 [Aspergillus nidulans FGSC A4] gi|259489177|tpe|CBF89234.1| TPA: mitochondrial import FGSC
  misc_feature (1)..(177): NCBI GI: 156049561 Blast Desc: SS1G_08487 [Sclerotinia sclerotiorum 1980] gi|154692886|gb|EDN92624.1| SS1G_08487 [Sclerotinia sclerotiorum 1980]
  misc_feature (2)..(164): NCBI GI: 169773101 Blast Desc: [Aspergillus oryzae RIB40] gi|238491042|ref|XP_002376758.1| mitochondrial import receptor subunit (Tom20), [Aspergillus flavus NRRL3357] protein product
  misc_feature (2)..(164): NCBI GI: 70992345 Blast Desc: mitochondrial import receptor subunit (Tom20) [Aspergillus fumigatus Af293] gi|66848654|gb|EAL88983.1| mitochondrial import receptor subunit (Tom20), [Aspergillus
  misc_feature (2)..(164): NCBI GI: 119471999 Blast Desc: mitochondrial import receptor subunit (Tom20), [Neosartorya fischeri NRRL 181] gi|119406407|gb|EAW16358.1| mitochondrial import receptor subunit (Tom20), [Neosartorya NRRL
  misc_feature (2)..(164): NCBI GI: 121699940 Blast Desc: mitochondrial import receptor subunit (Tom20), [Aspergillus clavatus NRRL 1] gi|119396377|gb|EAW06809.1| mitochondrial import receptor subunit (Tom20), [Aspergillus NRRL
  misc_feature: Useful for introducing or modulating the production of volatile compounds
MVQTSTIATISAVTAATGLIAYCVYFDHQRRADPNFRRNLRREERRHARAEKEAAVSSTKQRQRDIHAAVDAAEDEGFPEGVNEKEQYFMEWVQQGEVLSSDPSKTIESALAFYKALKVYPTPQDLIGIYDKTVDKRILDVLAEMIAYDKSLDLGKSPSMGMPAGINLADLPTAGLD

SEQ ID NO: 11101 - DNA, 1472 bp, Muscodor strobelii
  misc_feature: SGI EST ID NO. CUFF.26518.0
  misc_feature: Variant of the nucleotide sequence at SEQ ID NO 11099
atcaagctcagcaccccctgcaaaaaattatatgtatggcgcgactctgcaggtcgggtcgttggtcggcgtggtaagagcgacctcagtacgaccgggttggagaaagtgcatctgcatctgcatctctttcctgcacagctgcccagcagtgaatccaatccattgacctcatctcgccgacaaccacctgccaccaccgctgcccctcctcccatcagcatctatttcgccgaggccaagcattgtcattcgtcgactatcccagtattcatctttcgccgcccatcgtctaatacttcccatcctcaccctcccaccacacaccaaaatggttcagaccagcaccattgcgaccatatcggccgtcacggctgcaactggcttgataggtatgtaccactatctgagctaataccaagaagaagaatcggatatcaccactgtagccatctcgcccggtctacatcgcaactatcttcatcctccaccagctcatagctgacatgcaagctctctccccacagcctactgcgtctacttcgaccaccagcgccgcgcagaccccaacttccgcaggaacctgagacgcgaggagcgcagacatgcccgcgccgagaaggaggctgccgtatcctctaccaagcagagacagcgcgatatccacgccgccgttgatgccgccgaggatgagggtttccccgagggcgtcaacgagaaggagcagtacttcatggagtgggtgcagcagggcgaggtcctgagttccgacccatccaaaactatcgagtctgctctcgctttctacaaggccctcaaggtctaccctactccccaggacctgatcggcatctacgataagactgtcgacaagcgcatccttgatgttctcgccgagatgatcgcatacgacaagtcgctggatctgggcaaaagcccaagcatgggtatgcccgcaggcatcaacctcgccgacctgcccaccgctggtctcgactagaggaacatctctccgattgcaccatccatacctccgctcttagcacacccctaagaaaaggaagccttgcacccacgccgcaaaatgagttgctcgagcttatgccataccacctacctctcccccacgaaaaaatcgtctcgctggtgatgagcgacgtactatactgttttatgtgtatcttgtaagaatatatggagatagagctgttgctgccgtccacatgcggaccgggcaagcaaaaacaccaaaacggaggatgacggccggagggttggctggattcaaatccattgtataaatccctttacaccctctttacgatttgtaattcgactcggggccggtatagacatatgacgaatgacaaatatccatctttcccatttcttgcctcttgacatcacactgtgagaaggtggtttgattgaaattcgtgaaactaatctcctgtgggcgtagataagctaat

SEQ ID NO: 11102 - DNA, 870 bp, Muscodor strobelii
  misc_feature: SGI cDNA ID NO. 563552
  misc_feature: Encodes the peptide sequence at SEQ ID NO 11103
atgttcaatgtcgcaatccctatcgttctcgatggacgacaacatgacaaacctcttgtccagatgctatcaaaggtacaggaacagctcaactgggccacggcaatgccgctctggactttcattgatttgttcgtgtctctaatccgcgctcgtcgttggtgggaattgtgcccgcgcctaggaggtaccgagcatcctgaccatcagttggtggcagcgattattgccttcagaaaggcagtggacgatggaattcaggatcatgatcctatgcgaagttatgaagacagcgagattccttcttggattgcagacttgtacaggaaagagtgttgcaatctccaccggccatccgttagcccatcccctgtggtgtatcctactggactgcttcctaaccgccgacccggtgaacgttatgacaggggacggattagatggcctcgaagcgttcgaacggcccgcacgcgaatcgctgtcgctgagcccacacatctacctgtggccgagtccacatcctcttctccgtctctcgagcagtccactaatattagccttgcgttgtcctcaaccactgctcccgaacagtcttccctcgccacgcctataccagaggtttccgacgcgactttgcctcctgttgaagaaattgcggctacattccagtgtattcattgtcgcgctatcattgagagaaaggccggtgagcgcctacgtcaagactgtcaacgccactggggaacatacgatgaggacggagaaaagcccctttggacttgctgtggtcatcccggcaagttgtcaaaacctctgacttgctgggactaccatgagcctcccgctggagcaatgaatggttcactgtag

SEQ ID NO: 11103 - protein, 289 aa, Muscodor strobelii
  misc_feature: SGI Peptide ID NO. 563552
MFNVAIPIVLDGRQHDKPLVQMLSKVQEQLNWATAMPLWTFIDLFVSLIRARRWWELCPRLGGTEHPDHQLVAAIIAFRKAVDDGIQDHDPMRSYEDSEIPSWIADLYRKECCNLHRPSVSPSPVVYPTGLLPNRRPGERYDRGRIRWPRSVRTARTRIAVAEPTHLPVAESTSSSPSLEQSTNISLALSSTTAPEQSSLATPIPEVSDATLPPVEEIAATFQCIHCRAIIERKAGERLRQDCQRHWGTYDEDGEKPLWTCCGHPGKLSKPLTCWDYHEPPAGAMNGSL

SEQ ID NO: 11104 - DNA, 582 bp, Muscodor strobelii
  misc_feature: SGI cDNA ID NO. 563553
  misc_feature: Encodes the peptide sequence at SEQ ID NO 11105
atggcgccagacaattcaggccacaacacgacgctcagcctgcgaggcattatgcctgctagcgggatcagtttcctgcacgagaataaaatcaccactctagacggagacaagaaaatcatcgacaatatgcgcgctcttggcatttcaatgactcgacagcgtatcaggaacctcatggaagagatgttcaagaacgcaaagcctatgttctacaagtacaatcgcaaggccaatcttgacttcattctacacgagctgaagaactcactcgattggggcgagctcgcctctcgcgtaaaagtcaatggcattcgcccccgacccacctcagccatggttgatgccatcgtcaatttcagacgtgccgttggagacggcatcaaggacttcgacgagggaaagaagtatacacctgcagagatcacctcatggatccaagacaagtacacacgatcgcgtcggcgagaggcctggctcaatgccattaagtcaactcgtggtggacctgccttattgcgttctgttcgtcgacgtagagagcgccagcagaatcgcccccctcgtcgtcctcgtacctaa

SEQ ID NO: 11105 - protein, 193 aa, Muscodor strobelii
  misc_feature: SGI Peptide ID NO. 563553
MAPDNSGHNTTLSLRGIMPASGISFLHENKITTLDGDKKIIDNMRALGISMTRQRIRNLMEEMFKNAKPMFYKYNRKANLDFILHELKNSLDWGELASRVKVNGIRPRPTSAMVDAIVNFRRAVGDGIKDFDEGKKYTPAEITSWIQDKYTRSRRREAWLNAIKSTRGGPALLRSVRRRRERQQNRPPRRPRT

SEQ ID NO: 11106 - DNA, 219 bp, Muscodor strobelii
  misc_feature: SGI cDNA ID NO. 563554
  misc_feature: Encodes the peptide sequence at SEQ ID NO 11107
atgattgtcgtcacaaaatcttcgcgacctacgggctcaattcaagagatctcgcagacctatgtatcctcgatctactacgccgcacgcctgaagacacgcccgaacattaccaatgcacttgccgaaaaggccgaagagccaaagagcgaggacgcaggcaagatggacgtcgactctgagggagactttgtcaagtcctgcctgcattttagatga

SEQ ID NO: 11107 - protein, 72 aa, Muscodor strobelii
  misc_feature: SGI Peptide ID NO. 563554
MIVVTKSSRPTGSIQEISQTYVSSIYYAARLKTRPNITNALAEKAEEPKSEDAGKMDVDSEGDFVKSCLHFR

SEQ ID NO: 11108 - DNA, 2634 bp, Muscodor strobelii
  misc_feature: SGI cDNA ID NO. 563555
  misc_feature: Encodes the peptide sequence at SEQ ID NO 11109
atggctggggatagtcaaatgtcgctcgagggtctcctcgctttatggcacgaccatagactgcctatcctggtcatcgtggcatctctgctctcagccgcatggtcattctattcttcgaaacagcagacgaaggatatcttaccagcctctttgcgccctactgacgtcaaggtaaagccaagacagtcagtggacggttcatctcaaaatgagaagacagcattgcttcaaccacagacgcaagatatcgtgccaggcccacggcgcatcaaaggcgaattgcgcaagaacgacggcgcaagacggaattccgactctgataccgtctctcagacgcagattctagttttcttctcttcattaaccacgaccactgggaaaatcgcaaacgactttgctgagactcttggcgcgtcacttaaggagcagtcggctgaaaacaaggacatatacctcgaacctcgagtcttggacttgactgaaatcgactacgatgaatacttcatcaacccgccgaaaccggcagactccactcctgtcaactacttttatcttttcataatacccagctataacatcgacacgatcaatgacaatttcctagagcacttgcaggaaacgcatcatgatttcaggatcgatactgcaccactacaaggcctcatcggatactcggtgttcggacttggcgaccgtgaaggatggccgaccgaagacgagggcttctgcttccaggcgaaagaggtcgatagatggatggctaagctgacgagcaggaaaagagcctacccattgggtatgggggataagaaggctgacttgaccgagagattgggcgaatggaccgaaggtgtcacagaagtcttgaagaacgtagcgaccacgggatccttgggtgaaggtgtaccgggtagtggagacgcggacgaaagcgactacgaatatgcttctggtgaggaagacgaagaagtcgaggtcgatgaatcactcgcgccgaacgacaagaagaaaagaaccaaaaccacgaacctcgaagatctcgaagatttaggaaggatcatcaaagcaggacagaccgagtcaaacagcacaaaggcagcaccaattgctgtcgatttcacgacctacgggaaacccaaagccaaaagaccacagcaagccatcaaggaaatggtaccaaagagctcaccaacatacgcctcactgacaaaacaaggatacgccatcgtcggctcacactccggcgtcaagatctgccgctggacaaagtccgcgcttcgaggtcgcggatcctgttacaaatactcattctacggcatcgcctcacatcaatgcatggaaacaactccctcgctatcctgttctaacaaatgcgtcttctgctggcgccacggcactaatcccgtcggcacaacttggcgctgggtcgtagacccaccggaactcattttcgatggcgtgaaggagaaccactacaagaaaatcaagatgatgcgcggcgtaccgggtgttcgtgccgagcgcttcgcggaggcaatgcgtattagacactgtgcactgagtctagtcggtgaaccgatcttctacccgcatatcaacgagtttctcgccatgttgcacggagagcgtatctcatcgttcctggtctgtaacgcacaacatccggatcagcttgcaacgctcaaggcagtgacacagctttatgtgtctatcgatgcgagtaacaaggaatcactgcgcaagatagaccgccctcttcatcgagatttctgggagagattccagcgctgtcttgacatactccgtgagaagcggttcaaacacaggactgtgtttagacttacgctcgtcaaggggtttaatgtcgatgatgaggttgaggggtatgctgatcttgttgagaagggattaccctgcttcgttgagatcaaaggtgtgacgtactgcggtacgtcgacgagtgctggggctgggctgagtatggcgaatgtccctttctacgcagaagtcatagagtttgtcgaggcgctcgacaaaaagctaaaggagcggggactggattacggtattgcggccgagcatgcgcattcttgctgtgtgcttatcgcgagcggtcggtttagaaaagagggcaagtggcatacgcggattgattatcagaggttctttgagctgcttgaggaacggggtgcggatggtgattggagacctgaggagtatatggggcctgaaacgccggagtgggcgacttgggggaatggtgggtttgatccgagggatgaacgggttgataggaaggggaggaagattgaggacactcgtggtcctaccactgtcccccagctagaactcaactcttatctgatttcaaaactgggagaggaccaacttggggtaacccccgagagggatccgaccgacctccgacctctccctacagcaaccagtcttgactttatgctccacatctgcgccacaaacagctgggcttcgtgcccaattccccccgtcgctcccatagcggaaaagaatgtcgctggtggcacaacatctccggacaatgctcctgtctctcctactagtggcacgacactccgggacgaccgccgcgtcaatcatagcgacgaataa

SEQ ID NO: 11109 - protein, 877 aa, Muscodor strobelii
  misc_feature: SGI Peptide ID NO. 563555
  misc_feature (449)..(634): Pfam Id: PF04055 Pfam Desc: Radical SAM superfamily
  misc_feature (117)..(282): Pfam Id: PF00258 Pfam Desc: Flavodoxin
  misc_feature (636)..(705): Pfam Id: PF08608 Pfam Desc: Wyosine base formation
  misc_feature (186)..(282): Pfam Id: PF00258 Pfam Desc: Flavodoxin
  misc_feature (9)..(772): NCBI GI: 46136605 Blast Desc: FG09818.1 [Gibberella zeae PH-1]
  misc_feature (15)..(772): NCBI GI: 171690778 Blast Desc: protein product [Podospora anserina] gi|170945337|emb|CAP71449.1| protein product [Podospora anserina]
  misc_feature (1)..(769): NCBI GI: 154303627 Blast Desc: BC1G_08698 [Botryotinia fuckeliana B05.10] gi|150854492|gb|EDN29684.1| BC1G_08698 [Botryotinia fuckeliana B05.10]
  misc_feature (1)..(769): NCBI GI: 156049569 Blast Desc: SS1G_08491 [Sclerotinia sclerotiorum 1980] gi|154692890|gb|EDN92628.1| SS1G_08491 [Sclerotinia sclerotiorum 1980]
  misc_feature (87)..(772): NCBI GI: 145603368 Blast Desc: MGG_06096 [Magnaporthe grisea 70-15] gi|145011612|gb|EDJ96268.1| MGG_06096 [Magnaporthe grisea 70-15]
  misc_feature (13)..(772): NCBI GI: 85104851 Blast Desc: NCU06633 [Neurospora crassa OR74A] gi|28923398|gb|EAA32585.1| NCU06633 [Neurospora crassa OR74A]
  misc_feature (9)..(769): NCBI GI: 242803420 Blast Desc: flavodoxin and radical SAM domain protein [Talaromyces stipitatus ATCC 10500] gi|218717515|gb|EED16936.1| flavodoxin and radical SAM domain protein [Talaromyces stipitatus ATCC 10500]
  misc_feature (5)..(770): NCBI GI: 238490946 Blast Desc: flavodoxin and radical SAM domain protein [Aspergillus flavus NRRL3357] gi|220697123|gb|EED53464.1| flavodoxin and radical SAM domain protein [Aspergillus flavus NRRL3357]
  misc_feature (5)..(770): NCBI GI: 169773013 Blast Desc: [Aspergillus oryzae RIB40] gi|83768836|dbj|BAE58973.1| protein product [Aspergillus oryzae]
  misc_feature (10)..(764): NCBI GI: 67516441 Blast Desc: AN0502.2 [Aspergillus nidulans FGSC A4] gi|40747445|gb|EAA66601.1| AN0502.2 [Aspergillus nidulans FGSC A4] gi|259489244|tpe|CBF89355.1| TPA: flavodoxin and radical SAM
MAGDSQMSLEGLLALWHDHRLPILVIVASLLSAAWSFYSSKQQTKDILPASLRPTDVKVKPRQSVDGSSQNEKTALLQPQTQDIVPGPRRIKGELRKNDGARRNSDSDTVSQTQILVFFSSLTTTTGKIANDFAETLGASLKEQSAENKDIYLEPRVLDLTEIDYDEYFINPPKPADSTPVNYFYLFIIPSYNIDTINDNFLEHLQETHHDFRIDTAPLQGLIGYSVFGLGDREGWPTEDEGFCFQAKEVDRWMAKLTSRKRAYPLGMGDKKADLTERLGEWTEGVTEVLKNVATTGSLGEGVPGSGDADESDYEYASGEEDEEVEVDESLAPNDKKKRTKTTNLEDLEDLGRIIKAGQTESNSTKAAPIAVDFTTYGKPKAKRPQQAIKEMVPKSSPTYASLTKQGYAIVGSHSGVKICRWTKSALRGRGSCYKYSFYGIASHQCMETTPSLSCSNKCVFCWRHGTNPVGTTWRWVVDPPELIFDGVKENHYKKIKMMRGVPGVRAERFAEAMRIRHCALSLVGEPIFYPHINEFLAMLHGERISSFLVCNAQHPDQLATLKAVTQLYVSIDASNKESLRKIDRPLHRDFWERFQRCLDILREKRFKHRTVFRLTLVKGFNVDDEVEGYADLVEKGLPCFVEIKGVTYCGTSTSAGAGLSMANVPFYAEVIEFVEALDKKLKERGLDYGIAAEHAHSCCVLIASGRFRKEGKWHTRIDYQRFFELLEERGADGDWRPEEYMGPETPEWATWGNGGFDPRDERVDRKGRKIEDTRGPTTVPQLELNSYLISKLGEDQLGVTPERDPTDLRPLPTATSLDFMLHICATNSWASCPIPPVAPIAEKNVAGGTTSPDNAPVSPTSGTTLRDDRRVNHSDE

SEQ ID NO: 11110 - DNA, 2696 bp, Muscodor strobelii
  misc_feature: SGI EST ID NO. CUFF.26350.0
  misc_feature: Variant of the nucleotide sequence at SEQ ID NO 11108
tcggaagctggccacacgccgtcaaggttcaagatcaaaagggcagtttgtcgcgacaggtatggaaaagatggctggggatagtcaaatgtcgctcgagggtctcctcgctttatggcacgaccatagactgcctatcctggtcatcgtggcatctctgctctcagccgcatggtcattctattcttcgaaacagcagacgaaggatatcttaccagcctctttgcgccctactgacgtcaaggtaaagccaagacagtcagtggacggttcatctcaaaatgagaagacagcattgcttcaaccacagacgcaagatatcgtgccaggcccacggcgcatcaaaggcgaattgcgcaagaacgacggcgcaagacggaattccgactctgataccgtctctcagacgcagattctagttttcttctcttcattaaccacgaccactgggaaaatcgcaaacgactttgctgagactcttggcgcgtcacttaaggagcagtcggctgaaaacaaggacatatacctcgaacctcgagtcttggacttgactgaaatcgactacgatgaatacttcatcaacccgccgaaaccggcagactccactcctgtcaactacttttatcttttcataatacccagctataacatcgacacgatcaatgacaatttcctagagcacttgcaggaaacgcatcatgatttcaggatcgatactgcaccactacaaggcctcatcggatactcggtgttcggacttggcgaccgtgaaggatggccgaccgaagacgagggcttctgcttccaggcgaaagaggtcgatagatggatggctaagctgacgagcaggaaaagagcctacccattgggtatgggggataagaaggctgacttgaccgagagattgggcgaatggaccgaaggtgtcacagaagtcttgaagaacgtagcgaccacgggatccttgggtgaaggtgtaccgggtagtggagacgcggacgaaagcgactacgaatatgcttctggtgaggaagacgaagaagtcgaggtcgatgaatcactcgcgccgaacgacaagaagaaaagaaccaaaaccacgaacctcgaagatctcgaagatttaggaaggatcatcaaagcaggacagaccgagtcaaacagcacaaaggcagcaccaattgctgtcgatttcacgacctacgggaaacccaaagccaaaagaccacagcaagccatcaaggaaatggtaccaaagagctcaccaacatacgcctcactgacaaaacaaggatacgccatcgtcggctcacactccggcgtcaagatctgccgctggacaaagtccgcgcttcgaggtcgcggatcctgttacaaatactcattctacggcatcgcctcacatcaatgcatggaaacaactccctcgctatcctgttctaacaaatgcgtcttctgctggcgccacggcactaatcccgtcggcacaacttggcgctgggtcgtagacccaccggaactcattttcgatggcgtgaaggagaaccactacaagaaaatcaagatgatgcgcggcgtaccgggtgttcgtgccgagcgcttcgcggaggcaatgcgtattagacactgtgcactgagtctagtcggtgaaccgatcttctacccgcatatcaacgagtttctcgccatgttgcacggagagcgtatctcatcgttcctggtctgtaacgcacaacatccggatcagcttgcaacgctcaaggcagtgacacagctttatgtgtctatcgatgcgagtaacaaggaatcactgcgcaagatagaccgccctcttcatcgagatttctgggagagattccagcgctgtcttgacatactccgtgagaagcggttcaaacacaggactgtgtttagacttacgctcgtcaaggggtttaatgtcgatgatgaggttgaggggtatgctgatcttgttgagaagggattaccctgcttcgttgagatcaaaggtgtgacgtactgcggtacgtcgacgagtgctggggctgggctgagtatggcgaatgtccctttctacgcagaagtcatagagtttgtcgaggcgctcgacaaaaagctaaaggagcggggactggattacggtattgcggccgagcatgcgcattcttgctgtgtgcttatcgcgagcggtcggtttagaaaagagggcaagtggcatacgcggattgattatcagaggttctttgagctgcttgaggaacggggtgcggatggtgattggagacctgaggagtatatggggcctgaaacgccggagtgggcgacttgggggaatggtgggtttgatccgagggatgaacgggttgataggaaggggaggaagattgaggtttgaggataagggtgcgtgctgggttaggaggtatggagttcgggattgatttggtagggaaaaggaatgtcaagttttaacatgaatgacataaattgcaaagctatggcacaagtgaaagtaattgggggcgtgttgtgtgagacattcaacgccctgttgtgtaagttgtgtatttcgagcttgtcaattcggtattgcgaactatgctcgatcttcaagaacagtcttatgtttattccagaagttagatctaccgctattcggaaaccattacctcatatgtcgagggagcgaccccttccga

SEQ ID NO: 11111 - DNA, 1326 bp, Muscodor strobelii
  misc_feature: SGI cDNA ID NO. 563556
  misc_feature: Encodes the peptide sequence at SEQ ID NO 11112
atggccagcttccgcgattggttttcgccccgctggcccaagtttagatctgtgggcggccagaatgcagctcctacaccaaagcaagagacagacaaggttctaactggtcgcgtctccaaagctaccgtcaagaagtcttcagcgtcatcctcaatctcggtttctagatctatcgccaaacccgactcctccgacattgaggatgctatgagcagcatagagatcgatgaacaaagttcctctcagcgcgacgagggatttatgcacagagaagatgaagatgggatgagccaggctatcgaggacgacgagtcgctgaatgctcatgacgacgacgaggatagccctggccaattagtcaatgacgaagcaggcgatgatgaacgcgataatggaagcgaagatgagctcaacatgaccgtcaatagtcttgctacgactcctcgcaaaccaatgcccgcgtttcctgacagcgaccctgaagatgatctagacgaagacgcagaatgcctcgaagacgtggacacgacatggcggcgagagcaagtctttctcaataccatcttgaatgcgcgacaacagtttacccttatgcctatcacgtggagaatgcacttccggggtatccctctgccagatagtctcttctatcatcaagagaatgccaaggccactcgtcccaagatctatgctagatcaccgaaatctgaatatagaggcacggtcgcgcttcgtaagctgatcgaggtgcatggtcgaattcaagaccttcggaaggaacagtggagcatccgacaggatcaggcgtcgagcgataagaagcaacaatctagatctgtgacttctggcattgtcaatcatctcgagaaggctctacaaacggcgatagactgggcgcacgacgacggcggtagtgccaagtacggtgatcaaatacctcgaaacatcaagattatcgagatcaaagacaagacttctgctgatgaggactctgccaataagattcaggttgagatggccgatttggcagacaagtggaggaagaaaatcactactgaggacgaagagcaagcccccgttgtctttgcctttgtcattctgagacatatcatcttcatcgtcaccctggatgcctccaatccagaggcagacatccatattccgtgtcagcttaatatggcagagaggaaccaacaccaatggaatgcgctggcgatcatggtgacgatatgctgggcaagagacgtgcttcttgactacatcgacagtgtgcatgagctgcaacctcagcagaagagcgactcaagtgacccggatgcttga

SEQ ID NO: 11112 - protein, 441 aa, Muscodor strobelii
  misc_feature: SGI Peptide ID NO. 563556
  misc_feature (164)..(440): NCBI GI: 171690818 Blast Desc: protein product [Podospora anserina] gi|170945357|emb|CAP71469.1| protein product [Podospora anserina]
  misc_feature (179)..(419): NCBI GI: 85105509 Blast Desc: NCU07730 [Neurospora crassa OR74A] gi|28923569|gb|EAA32744.1| [Neurospora crassa OR74A]
  misc_feature (177)..(355): NCBI GI: 256726855 Blast Desc: NECHADRAFT_90876 [Nectria haematococca mpVI 77-13-4]
  misc_feature (360)..(441): NCBI GI: 256726855 Blast Desc: NECHADRAFT_90876 [Nectria haematococca mpVI 77-13-4]
  misc_feature (179)..(427): NCBI GI: 169611276 Blast Desc: SNOG_08748 [Phaeosphaeria nodorum SN15] gi|160702258|gb|EAT83916.2| SNOG_08748 [Phaeosphaeria nodorum SN15]
MASFRDWFSPRWPKFRSVGGQNAAPTPKQETDKVLTGRVSKATVKKSSASSSISVSRSIAKPDSSDIEDAMSSIEIDEQSSSQRDEGFMHREDEDGMSQAIEDDESLNAHDDDEDSPGQLVNDEAGDDERDNGSEDELNMTVNSLATTPRKPMPAFPDSDPEDDLDEDAECLEDVDTTWRREQVFLNTILNARQQFTLMPITWRMHFRGIPLPDSLFYHQENAKATRPKIYARSPKSEYRGTVALRKLIEVHGRIQDLRKEQWSIRQDQASSDKKQQSRSVTSGIVNHLEKALQTAIDWAHDDGGSAKYGDQIPRNIKIIEIKDKTSADEDSANKIQVEMADLADKWRKKITTEDEEQAPVVFAFVILRHIIFIVTLDASNPEADIHIPCQLNMAERNQHQWNALAIMVTICWARDVLLDYIDSVHELQPQQKSDSSDPDA

SEQ ID NO: 11113 - DNA, 1911 bp, Muscodor strobelii
  misc_feature: SGI cDNA ID NO. 563557
  misc_feature: Reduced expression when VOC is produced
  misc_feature: Encodes the peptide sequence at SEQ ID NO 11114
atggtcgactacagcaagatgaaggtcgtcgaccttaaggctgaactgaagcggctgggtctgcctcagagcggtctcaaggctgagctcgttgaccgactgacgactgccaatgatgaaggcatgggcaacgaagactccgaaccatcaactgaagagaagatcgaccccgagcctagcaacgaccagcacgcagactcctccgaatctgctgagccagagaagcccgctaccgacatcgagcctgcccctgcggagcctgccaacgagatagccgaggacacagcccaagagatgcccgaggacagcaatgcgcccatagctgcaccacaagaagtcgccatctcagagaccccttctgtcccgccgacagaaatcatccaagacgtccagaagcgcaagcgaagatcgaccagtcctcccccctctgcccaagaatctgcccccaagcgccttcgacaagaagctgaagaagacagcgaagctcctgctgccttacctaccgagcctcactcgacagcgcatgagtcttcaagttcaggcaagcccgagtccgaccatcagccagaactgaatgtggaggtcgatgttatgaagattgacgagccacagtcagaatcgtatcaagcacaagatgcaatggacgtggaaaatgaccaccttaatggtcatagcccagctaatgatttaggcgacgctcgcggggatgcgacattcaatgaagaggtcccaatgcccagcaaccaggacttggctacctctccctccaccgggctgggcgtcgagccctcgattcaccctcctacctgtgcattgtacattaagaatcttatgaggcctcttcgaccacaggccctccgagagtacatcctcgagcttgctacgcccaccgatgctccagtcgacccgagcaccatcgtcaacttttatctggataatatccgcacccacgcttttgccgtgttcacttctgtctccggtgccacgcgcgtacgcaacgctttacacaatcgcgtctggcctgacgaaacgaaccgcaaggcactgtggctggacttcatccctcccgatcgcgttcatgagtggatcgagatggagctggagcccaaaccgacactcgacggaggcatctcgcgctgggaaatcatctacgagcgcgacggttacgatcatgttaccgcttacctcgactcagttgacggtacacaaggtagcaaacgtccgcctactcgtccccccactcgcagagaagactctcctcccgtacatcccgagcgacgagcttccattcctaccggtccccgcatcaccggtatcgagaatgcgcccacaggcccacgtaaccgccatcccaacaatgcgccgttcatgaaccccagccgtcaagagagagtcgagccgggcttcatcgagactgagacacgcccgagggtcaccttccgtcctgtcgctcccgatcttgcagaccgtcgtctagaggtcattgctaacgccaagagcaagtcttacaaggagagctccgcaaaagaataccaccgatactacttcgagcgcaataccaacctagtcaaccgagggcccgagattttcctcggcattcgaccgcctcatcgcgagaaggagcgtcgcgagcagctcgctcgaggtggcggagatcgtgaccgcgatcgtgaccagtttcgcgaccgcgaccgtgatcgcaacatcgatcgagattatcgtgatcgtcgtggtctcggtcctccgccatcttatcctggcgaacggcgcagacggggcggacgtggacagcgaaatcgaggcgtaccgaagggcggcgagagatatcgccctggtggaaatgattacgataggggtgactatggagccagagaccgcggcagactgaacgacggatatggtcgccgatga

SEQ ID NO: 11114 - protein, 636 aa, Muscodor strobelii
  misc_feature: SGI Peptide ID NO. 563557
  misc_feature (4)..(38): Pfam Id: PF02037 Pfam Desc: SAP domain
  misc_feature (1)..(550): NCBI GI: 261352200 Blast Desc: SAP domain-containing protein [Verticillium albo-atrum VaMs.102]
  misc_feature (2)..(533): NCBI GI: 39952533 Blast Desc: MGG_01842 [Magnaporthe grisea 70-15] gi|145020292|gb|EDK04421.1| MGG_01842 [Magnaporthe grisea 70-15]
  misc_feature (1)..(538): NCBI GI: 156056969 Blast Desc: SS1G_04215 [Sclerotinia sclerotiorum 1980] gi|154702001|gb|EDO01740.1| SS1G_04215 [Sclerotinia sclerotiorum 1980]
  misc_feature (1)..(537): NCBI GI: 256727001 Blast Desc: NECHADRAFT_91111 [Nectria haematococca mpVI 77-13-4]
  misc_feature (2)..(541): NCBI GI: 85105513 Blast Desc: NCU07731 [Neurospora crassa OR74A] gi|28923570|gb|EAA32745.1| [Neurospora crassa OR74A]
  misc_feature (1)..(538): NCBI GI: 154323768 Blast Desc: BC1G_00283 [Botryotinia fuckeliana B05.10] gi|150842512|gb|EDN17705.1| BC1G_00283 [Botryotinia fuckeliana B05.10]
  misc_feature (1)..(537): NCBI GI: 46136075 Blast Desc: FG09553.1 [Gibberella zeae PH-1]
  misc_feature (2)..(539): NCBI GI: 116195830 Blast Desc: CHGG_04513 [Chaetomium globosum CBS 148.51] gi|88180426|gb|EAQ87894.1| CHGG_04513 [Chaetomium globosum CBS 148.51]
  misc_feature (2)..(626): NCBI GI: 171690820 Blast Desc: protein product [Podospora anserina] gi|170945358|emb|CAP71470.1| protein product [Podospora anserina]
  misc_feature (1)..(528): NCBI GI: 212530566 Blast Desc: SAP domain protein [Penicillium marneffei ATCC 18224] gi|210074838|gb|EEA28925.1| SAP domain protein [Penicillium marneffei ATCC 18224]
  misc_feature: Useful for introducing or modulating the production of volatile compounds
MVDYSKMKVVDLKAELKRLGLPQSGLKAELVDRLTTANDEGMGNEDSEPSTEEKIDPEPSNDQHADSSESAEPEKPATDIEPAPAEPANEIAEDTAQEMPEDSNAPIAAPQEVAISETPSVPPTEIIQDVQKRKRRSTSPPPSAQESAPKRLRQEAEEDSEAPAALPTEPHSTAHESSSSGKPESDHQPELNVEVDVMKIDEPQSESYQAQDAMDVENDHLNGHSPANDLGDARGDATFNEEVPMPSNQDLATSPSTGLGVEPSIHPPTCALYIKNLMRPLRPQALREYILELATPTDAPVDPSTIVNFYLDNIRTHAFAVFTSVSGATRVRNALHNRVWPDETNRKALWLDFIPPDRVHEWIEMELEPKPTLDGGISRWEIIYERDGYDHVTAYLDSVDGTQGSKRPPTRPPTRREDSPPVHPERRASIPTGPRITGIENAPTGPRNRHPNNAPFMNPSRQERVEPGFIETETRPRVTFRPVAPDLADRRLEVIANAKSKSYKESSAKEYHRYYFERNTNLVNRGPEIFLGIRPPHREKERREQLARGGGDRDRDRDQFRDRDRDRNIDRDYRDRRGLGPPPSYPGERRRRGGRGQRNRGVPKGGERYRPGGNDYDRGDYGARDRGRLNDGYGRR

SEQ ID NO: 11115 - DNA, 2813 bp, Muscodor strobelii
  misc_feature: SGI EST ID NO. CUFF.26362.0
  misc_feature: Variant of the nucleotide sequence at SEQ ID NO 11113
gccagggtcattatcgcgactgctctcaacgcgcgccgcccaaattcatcaacatcgtccctgtattcatctggacagagacatctcacgtgtctagtgttcctatgcgcagattcgcgggaagaaactcaggtgtcgtttggatcgtacaagcaggttctccgctccttcgccagcgacactgttcgcagagctcgccacagctagctcctgggatgcgacatccttgaattgcgacgttcctctacagttcttgccattccacctttacctactaccgcgactacctggatagacctgccgttatcccactttcgatactctgtttcctcgtcggcgacactttggcatctacaacttatccttgtttctagactttgccgattgcgccaaggttgcacttgcatcgcctattgcccaattgcatgcgcactcctgcattctccctaacccctttcctacctcctgccaggcatgcgcaacagccgctgtcaggcacctacctgcagacaagatggtcgactacagcaagatgaaggtcgtcgaccttaaggctgaactgaagcggctgggtctgcctcagagcggtctcaaggctgagctcgttgaccgactgacgactgccaatgatgaaggcatgggcaacgaagactccgaaccatcaactgaagagaagatcgaccccgagcctagcaacgaccagcacgcagactcctccgaatctgctgagccagagaagcccgctaccgacatcgagcctgcccctgcggagcctgccaacgagatagccgaggacacagcccaagagatgcccgaggacagcaatgcgcccatagctgcaccacaagaagtcgccatctcagagaccccttctgtcccgccgacagaaatcatccaagacgtccagaagcgcaagcgaagatcgaccagtcctcccccctctgcccaagaatctgcccccaagcgccttcgacaagaagctgaagaagacagcgaagctcctgctgccttacctaccgagcctcactcgacagcgcatgagtcttcaagttcaggcaagcccgagtccgaccatcagccagaactgaatgtggaggtcgatgttatgaagattgacgagccacagtcagaatcgtatcaagcacaagatgcaatggacgtggaaaatgaccaccttaatggtcatagcccagctaatgatttaggcgacgctcgcggggatgcgacattcaatgaagaggtcccaatgcccagcaaccaggacttggctacctctccctccaccgggctgggcgtcgagccctcgattcaccctcctacctgtgcattgtacattaagaatcttatgaggcctcttcgaccacaggccctccgagagtacatcctcgagcttgctacgcccaccgatgctccagtcgacccgagcaccatcgtcaacttttatctggataatatccgcacccacgcttttgccgtgttcacttctgtctccggtgccacgcgcgtacgcaacgctttacacaatcgcgtctggcctgacgaaacgaaccgcaaggcactgtggctggacttcatccctcccgatcgcgttcatgagtggatcgagatggagctggagcccaaaccgacactcgacggaggcatctcgcgctgggaaatcatctacgagcgcgacggttacgatcatgttaccgcttacctcgactcagttgacggtacacaaggtagcaaacgtccgcctactcgtccccccactcgcagagaagactctcctcccgtacatcccgagcgacgagcttccattcctaccggtccccgcatcaccggtatcgagaatgcgcccacaggcccacgtaaccgccatcccaacaatgcgccgttcatgaaccccagccgtcaagagagagtcgagccgggcttcatcgagactgagacacgcccgagggtcaccttccgtcctgtcgctcccgatcttgcagaccgtcgtctagaggtcattgctaacgccaagagcaagtcttacaaggagagctccgcaaaagaataccaccgatactacttcgagcgcaataccaacctagtcaaccgagggcccgagattttcctcggcattcgaccgcctcatcgcgagaaggagcgtcgcgagcagctcgctcgaggtggcggagatcgtgaccgcgatcgtgaccagtttcgcgaccgcgaccgtgatcgcaacatcgatcgagattatcgtgatcgtcgtggtctcggtcctccgccatcttatcctggcgaacggcgcagacggggcggacgtggacagcgaaatcgaggcgtaccgaagggcggcgagagatatcgccctggtggaaatgattacgataggggtgactatggagccagagaccgcggcagactgaacgacggatatggtcgccgatgaatacctgctccttcaaagtttcaatgaggagtagggcaggagatcctagggataggtgattgtatagatatgactttgggggcaattctttgcctcagtggtgtataacaggaaggtccatatttcattcatgagacaggtggacgcattgcaaagaagtaaatctaagcttttatttgctgatgaagtcgcagaacgtgagaagaggcagaagtgtaagtcagatacccattcaaactcgatagctgggtcgtttgacagagtggcatttgatgagctggctgtcgtgcattaggactatggtacaatagcttagatacctaactagctagtttgcaggccaagagataataagccaatacagaagaataaaagagttgtcgactct

SEQ ID NO: 11116 - DNA, 1050 bp, Muscodor strobelii
  misc_feature: SGI cDNA ID NO. 563558
  misc_feature: Elevated expression when VOC is produced
  misc_feature: Encodes the peptide sequence at SEQ ID NO 11117
atgaatcttgacaacgagtggtgtgctcctgaacttgagacacatcgcatgtgggaagaggctcaagttatcatttattcatacgcctcattcccttcatgctatggtcatggctatgacgtagcaaatcggcgatggtatcgagtcaacgtttttatccagggctgccctaaagacgagcttaaagacgagcttatagacgagtggatggcaagcgtaatcgagagagagattgtgggtcaccgcgccaaatatggaaggacacccgacttcaatgttatcaacacgacgaagtacggcaaacgcatctcagttgagcagcgccccaatgaggaagtctgccgtcgtattcggggcaacttcacttatggtcgagcggaatccgacgacctcccaacgacgacattcgatcagataacacaaaagcgctacctagggaaagcagctgatcgatgtatttggaaagaccaggactgtgttttcaagcgaattgagttcactgaagatcttgaagtcatcgagcgagaagtcagatcccgcgaggcgcttctccgcgctctacatcaagcacctgcaggggagacattggagtcattctttcatgtgctccctatcacagctgttgtacataaatgctctgacaaggacgaagtcctcggaatactcacgccatattgtggaaaaagcttggaggatctagctggtggctaccactacggcatgggaccattcactcacgacttcgagatacctccaaagccgtggccatcgctgcccattactatgtcacaggttgagaacatggttaagggggttcgagcaatgtcacgtgcaggtgtcgtccacggggatatcgtggatagaaacgttcttctgtcttctgagcagcatctagtacttatagatctagggggtggagcattggattatgtgagcgacgcacatgcggttggtgacgtgatcctctgggctttagacagagtggagtgggacgatacagacagagaggcagctcggagcctcgcaggggatttacaatcttgcaactag

SEQ ID NO: 11117 - protein, 349 aa, Muscodor strobelii
  misc_feature: SGI Peptide ID NO. 563558
  misc_feature (12)..(213): NCBI GI: 261353972 Blast Desc: alpha-L-fucosidase [Verticillium albo-atrum VaMs.102]
  misc_feature (253)..(308): NCBI GI: 196157360 Blast Desc: Serine/threonine protein kinase [Alteromonas macleodii 'Deep ecotype'] gi|196113139|gb|ACG66855.1| Serine/threonine protein kinase [Alteromonas macleodii 'Deep ecotype']
  misc_feature: Useful for introducing or modulating the production of volatile compounds
MNLDNEWCAPELETHRMWEEAQVIIYSYASFPSCYGHGYDVANRRWYRVNVFIQGCPKDELKDELIDEWMASVIEREIVGHRAKYGRTPDFNVINTTKYGKRISVEQRPNEEVCRRIRGNFTYGRAESDDLPTTTFDQITQKRYLGKAADRCIWKDQDCVFKRIEFTEDLEVIEREVRSREALLRALHQAPAGETLESFFHVLPITAVVHKCSDKDEVLGILTPYCGKSLEDLAGGYHYGMGPFTHDFEIPPKPWPSLPITMSQVENMVKGVRAMSRAGVVHGDIVDRNVLLSSEQHLVLIDLGGGALDYVSDAHAVGDVILWALDRVEWDDTDREAARSLAGDLQSCN

SEQ ID NO: 11118 - DNA, 1514 bp, Muscodor strobelii
  misc_feature: SGI EST ID NO. CUFF.26371.0
  misc_feature: Variant of the nucleotide sequence at SEQ ID NO 11116
cccgtatgagcttgggctatataaaggcacgcccattcccacattcgcgcgtcaagttctagtatgccaagctacagcccaaactccagcagatctttcttgaatatcacacaccggcccccattgctaccggaattcacgattctgccgacagcctgatccctaagtagtcagcaatgaatcttgacaacgagtggtgtgctcctgaacttgagacacatcgcatgtgggaagaggctcaagttatcatttattcatacgcctcattcccttcatgctatggtcatggctatgacgtagcaaatcggcgatggtatcgagtcaacgtttttatccagggctgccctaaagacgagcttaaagacgagcttatagacgagtggatggcaagcgtaatcgagagagagattgtgggtcaccgcgccaaatatggaaggacacccgacttcaatgttatcaacacgacgaagtacggcaaacgcatctcagttgagcagcgccccaatgaggaagtctgccgtcgtattcggggcaacttcacttatggtcgagcggaatccgacgacctcccaacgacgacattcgatcagataacacaaaagcgctacctagggaaagcagctgatcgatgtatttggaaagaccaggactgtgttttcaagcgaattgagttcactgaagatcttgaagtcatcgagcgagaagtcagatcccgcgaggcgcttctccgcgctctacatcaagcacctgcaggggagacattggagtcattctttcatgtgctccctatcacagctgttgtacataaatgctctgacaaggacgaagtcctcggaatactcacgccatattgtggaaaaagcttggaggatctagctggtggctaccactacggcatgggaccattcactcacgacttcgagatacctccaaagccgtggccatcgctgcccattactatgtcacaggttgagaacatggttaagggggttcgagcaatgtcacgtgcaggtgtcgtccacggggatatcgtggatagaaacgttcttctgtcttctgagcagcatctagtacttatagatctagggggtggagcattggattatgtgagcgacgcacatgcggttggtgacgtgatcctctgggctttagacagagtggagtgggacgatacagacagagaggcagctcggagcctcgcaggggatttacaatcttgcaactagtcaatgattcaaagctgaggtataaaaagtactacgggaacactctcatggtatccctttcgttgcgatttcaactttagtacggccaagactaccaagaaaccgtgtaaatctataccgatagaaaattgacagactcataaaggttcgcaatggctcgcaacggcctataaggacttattttaggctgttgtctttatacatagagtcgaagcggtatctaaagtcggcttcgcacgcaaacagatagagatgacccatacgcaaaggtctataatgaaggtctcc

SEQ ID NO: 11119 - DNA, 1602 bp, Muscodor strobelii
  misc_feature: SGI cDNA ID NO. 563559
  misc_feature: Elevated expression when VOC is produced
  misc_feature: Encodes the peptide sequence at SEQ ID NO 11120
atggcggatttcatcatgactgcactgatattaggccgagtagtgctcctagtaatcttcctgatagggatctggcttcttgtcgcgaaaaagagtaaaggcccatcattgccaccaggaccgaagggttggcctatactaggcaatatcacagacctaccagccaacggtgagcgagagtgggagcattggctcaaacacaaagatgtatatggacccatcagctccgtaacggcattggggacgactatcatcatcttgcactcccgagaactcgcagtcgagctgttggagaagcagtcctcccgcaattcatctcgcatgagactcgaattcggcggagagatggttggatataataagagcctccctatactaccatatggcgagctatttcgtgctagcagaaaatgtgcacacgtcatgatcggcacgcgatcacgtatacagccgcacaatcctctactagaggctgaggtccatagattacttttccgcgtactggaggagcccgacaaactcgagacacatctacgaagccaagctggcgcagtcatcttgaaaatgatctacggatataaagttgaggcacacaagccggatccattgatcgaacttgccgaaaagtttgtgtacaatttctctgcggcagcagtccccggggcttttctagtggacgtaattcccgcgctgcgacatataccagaatggctgcctggtgctgggttcaagaggctggcaagagaatggcgagatatactgagagactccgtcgacacgccactgcgcttcacaaaaaagcagatgagccgaggcagatacgaaaaatcatgcgtggcggacttctacgaaagcgcgggagagaatattagcctggaggatgaagatattatcaagtggactgctctatctatctacgggggtggtgctgatactacccctggcatattgaggattttcatcctcgccatgatgctgcatccggaaatccagcgcaaggcccgggaagagatcgaccgagtcgttggttcaaatcgactacctacagacgacgaccgtgatcagctcccttatatccaagcgatagtgaccgagctatggcgttggcatccaatcgccccaatgggaggtcctccacacgtttcgagcgccgataatatgtttcaagggtacttcatcccaaagggtgcagttattcttccgaatatatggtggttcacgcacgaccccactgtgtatccaaatccctcagtgtttgacccatcgcgatacctaggttcggatccggccccagatccaggggacgatattttcggatacgggcggcgcatttgtccaggaaagtatcttgcagaggcaacggcgtggctgacgattgcaaagttactagctgtgtttgagatcagaaagagtttagacggcaacggttccgagatagaaccgattgtctctttctcgcctggcatcgttagccacccagagccgtttcaagttacaatcaagccgagatccccccaacacgaggctctgatacgcaagtttgcgcctctgcattccgaggaagaaagtgatgcgggggagctcgagatttcggaggcttga

SEQ ID NO: 11120 - protein, 533 aa, Muscodor strobelii
  misc_feature: SGI Peptide ID NO. 563559
  misc_feature (38)..(500): Pfam Id: PF00067 Pfam Desc: Cytochrome P450
  misc_feature (298)..(500): Pfam Id: PF00067 Pfam Desc: Cytochrome P450
  misc_feature (46)..(528): NCBI GI: 238494768 Blast Desc: cytochrome P450, [Aspergillus flavus NRRL3357] gi|220695270|gb|EED51613.1| cytochrome P450, [Aspergillus flavus NRRL3357]
  misc_feature (46)..(533): NCBI GI: 115401660 Blast Desc: conserved [Aspergillus terreus NIH2624] gi|114190359|gb|EAU32059.1| conserved [Aspergillus terreus NIH2624]
  misc_feature (47)..(529): NCBI GI: 259486936 Blast Desc: TPA: cytochrome P450, (Eurofung) [Aspergillus nidulans FGSC A4]
  misc_feature (48)..(529): NCBI GI: 255944851 Blast Desc: Pc20g06670 [Penicillium chrysogenum Wisconsin 54-1255] gi|211587928|emb|CAP85996.1| Pc20g06670 [Penicillium chrysogenum Wisconsin 54-1255]
  misc_feature (3)..(529): NCBI GI: 242817323 Blast Desc: cytochrome P450 oxidoreductase OrdA-like, [Talaromyces stipitatus ATCC 10500] gi|218713397|gb|EED12821.1| cytochrome P450 oxidoreductase OrdA-like, [Talaromyces stipitatus ATCC
  misc_feature (11)..(533): NCBI GI: 169765434 Blast Desc: [Aspergillus oryzae RIB40] gi|83765043|dbj|BAE55186.1| protein product [Aspergillus oryzae]
  misc_feature (6)..(529): NCBI GI: 212530868 Blast Desc: cytochrome P450 oxidoreductase OrdA-like, [Penicillium marneffei ATCC 18224] gi|210074989|gb|EEA29076.1| cytochrome P450 oxidoreductase OrdA-like, [Penicillium marneffei ATCC 18224]
  misc_feature (46)..(528): NCBI GI: 121716160 Blast Desc: Cytochrome P450 oxidoreductase, [Aspergillus clavatus NRRL 1] gi|119403846|gb|EAW14263.1| Cytochrome P450 oxidoreductase, [Aspergillus clavatus NRRL 1]
  misc_feature (10)..(529): NCBI GI: 255949436 Blast Desc: Pc22g15690 [Penicillium chrysogenum Wisconsin 54-1255] gi|211592502|emb|CAP98857.1| Pc22g15690 [Penicillium chrysogenum Wisconsin 54-1255]
  misc_feature (6)..(528): NCBI GI: 238489025 Blast Desc: cytochrome P450 oxidoreductase OrdA-like, [Aspergillus flavus NRRL3357] gi|220698138|gb|EED54478.1| cytochrome P450 oxidoreductase OrdA-like, [Aspergillus flavus NRRL3357]
  misc_feature (44)..(467): SWISSPROT Homolog: EC 1.14.13.21 Flavonoid 3'-monooxygenase
  misc_feature: Useful for introducing or modulating the production of volatile compounds
MADFIMTALILGRVVLLVIFLIGIWLLVAKKSKGPSLPPGPKGWPILGNITDLPANGEREWEHWLKHKDVYGPISSVTALGTTIIILHSRELAVELLEKQSSRNSSRMRLEFGGEMVGYNKSLPILPYGELFRASRKCAHVMIGTRSRIQPHNPLLEAEVHRLLFRVLEEPDKLETHLRSQAGAVILKMIYGYKVEAHKPDPLIELAEKFVYNFSAAAVPGAFLVDVIPALRHIPEWLPGAGFKRLAREWRDILRDSVDTPLRFTKKQMSRGRYEKSCVADFYESAGENISLEDEDIIKWTALSIYGGGADTTPGILRIFILAMMLHPEIQRKAREEIDRVVGSNRLPTDDDRDQLPYIQAIVTELWRWHPIAPMGGPPHVSSADNMFQGYFIPKGAVILPNIWWFTHDPTVYPNPSVFDPSRYLGSDPAPDPGDDIFGYGRRICPGKYLAEATAWLTIAKLLAVFEIRKSLDGNGSEIEPIVSFSPGIVSHPEPFQVTIKPRSPQHEALIRKFAPLHSEEESDAGELEISEA

SEQ ID NO: 11121 - DNA, 2549 bp, Muscodor strobelii
  misc_feature: SGI EST ID NO. CUFF.26513.2
  misc_feature: Variant of the nucleotide sequence at SEQ ID NO 11119
cgcttccattcaatacagcagacatgattctggcacttatataacgcctgtgccaggtaattaactagttgtagcagtatggctgatgagactcaatggttgccatattcattatggcggatttcatcatgactgcactgatattaggccgagtagtgctcctagtaatcttcctgatagggatctggcttcttgtcgcgaaaaagagtaaaggcccatcattgccaccaggaccgaagggttggcctatactaggcaatatcacagacctaccagccaacggtgagcgagagtgggagcattggctcaaacacaaagatgtatatggacccatcagctccgtaacggcattggggacgactatcatcatcttgcactcccgagaactcgcagtcgagctgttggagaagcagtcctcccgcaattcatctcgcatgagactcgaattcggcggagagatggttggatataataagagcctccctatactaccatatggcgagctatttcgtgctagcagaaaatgtgcacacgtcatgatcggcacgcgatcacgtatacagccgcacaatcctctactagaggctgaggtccatagattacttttccgcgtactggaggagcccgacaaactcgagacacatctacgaagccaagctggcgcagtcatcttgaaaatgatctacggatataaagttgaggcacacaagccggatccattgatcgaacttgccgaaaagtttgtgtacaatttctctgcggcagcagtccccggggcttttctagtggacgtaattcccgcgctgcgacatataccagaatggctgcctggtgctgggttcaagaggctggcaagagaatggcgagatatactgagagactccgtcgacacgccactgcgcttcacaaaaaagcagatgagccgaggcagatacgaaaaatcatgcgtggcggacttctacgaaagcgcgggagagaatattagcctggaggatgaagatattatcaagtggactgctgtgagcctgaccaatgtgctgctggacgtggctcaccaattctttgcctggatctgtagctttactgacttagctgtaatagctatctatctacgggggtggtgctgatactacccctggcatattgaggattttcatcctcgccatgatgctgcatccggaaatccagcgcaaggcccgggaagagatcgaccgagtcgttggttcaaatcgactacctacagacgacgaccgtgatcagctcccttatatccaagcgatagtgaccgagctatggcgttggcatccaatcgccccaatgggaggtcctccacacgtttcgagcgccgataatatgtttcaagggtacttcatcccaaagggtgcagttattcttccgaatatatggtggttcacgcacgaccccactgtgtatccaaatccctcagtgtttgacccatcgcgatacctaggttcggatccggccccagatccaggggacgatattttcggatacgggcggcgcatttgtccaggaaagtatcttgcagaggcaacggcgtggctgacgattgcaaagttactagctgtgtttgagatcagaaagagtttagacggcaacggttccgagatagaaccgattgtctctttctcgcctggcatcgttagccacccagagccgtttcaagttacaatcaagccgagatccccccaacacgaggctctgatacgcaagtttgcgcctctgcattccgaggaagaaagtgatgcgggggagctcgagatttcggaggcttgaaacgattgaggcgtttatactatgtgagcaatcggtagccaggtgcgacattgatttcggcctccgactgtgcagtaaaatgaagttgatacccatgttttctactttcaagcaagattcgcttctgaagcaagagaccggcaacaagagtgctctccgcaacagtttctactgagagggcttgtgcttgaagcaaaattttttttattccattcagggtgacagaacgttttcgggacctcttcctatcctttagcgccgattcctgccagttgagtttaagactttgcagagcctgcacgattgcaaaaagatgcttccgttcctctatgatttttgccacgtgcgagctgcgagtggttcctttcgaacttgtcatatacgttttagtgagagccagacgagatcgcaagagatcccagcgttttgcttgtgcgggttcgtaattcgttcgccgaatgataaattctatgtcgtctatgacatggtagtccagcagctagatttggaactgccgcagacggcgcgtgtatttatcagtcactgaaatccatttgtcgacgaagtgctcgttgggagtttggaagaattcaggctgcttccgcaacaattgagttctcaactttagtctattattgttggcctttccgattaaggtgccaattctctcggctatggcatcaatataggtatcatcttcatgcttttgacccctctttggttttttcttgtactgataagaaccaactggg

SEQ ID NO: 11122 - DNA, 1629 bp, Muscodor strobelii
  misc_feature: SGI cDNA ID NO. 563560
  misc_feature: Encodes the peptide sequence at SEQ ID NO 11123
atggcggatttcatcatgactgcactgatattaggccgagtagtgctcctagtaatcttcctgatagggatctggcttcttgtcgcgaaaaagagtaaaggcccatcattgccaccaggaccgaagggttggcctatactaggcaatatcacagacctaccagccaacggtgagcgagagtgggagcattggctcaaacacaaagatgtatatggacccatcagctccgtaacggcattggggacgactatcatcatcttgcactcccgagaactcgcagtcgagctgttggagaagcagtcctcccgcaattcatctcgcatgagactcgaattcggcggagagatggttggatataataagagcctccctatactaccatatggcgagctatttcgtgctagcagaaaatgtgcacacgtcatgatcggcacgcgatcacgtatacagccgcacaatcctctactagaggctgaggtccatagattacttttccgcgtactggaggagcccgacaaactcgagacacatctacgaagccaagctggcgcagtcatcttgaaaatgatctacggatataaagttgaggcacacaagccggatccattgatcgaacttgccgaaaagtttgtgtacaatttctctgcggcagcagtccccggggcttttctagtggacgtaattcccgcgctgcgacatataccagaatggctgcctggtgctgggttcaagaggctggcaagagaatggcgagatatactgagagactccgtcgacacgccactgcgcttcacaaaaaagcagatgagccgaggcagatacgaaaaatcatgcgtggcggacttctacgaaagcgcgggagagaatattagcctggaggatgaagatattatcaagtggactgctgtgagcctgaccaatgtgctgctggacctatctatctacgggggtggtgctgatactacccctggcatattgaggattttcatcctcgccatgatgctgcatccggaaatccagcgcaaggcccgggaagagatcgaccgagtcgttggttcaaatcgactacctacagacgacgaccgtgatcagctcccttatatccaagcgatagtgaccgagctatggcgttggcatccaatcgccccaatgggaggtcctccacacgtttcgagcgccgataatatgtttcaagggtacttcatcccaaagggtgcagttattcttccgaatatatggtggttcacgcacgaccccactgtgtatccaaatccctcagtgtttgacccatcgcgatacctaggttcggatccggccccagatccaggggacgatattttcggatacgggcggcgcatttgtccaggaaagtatcttgcagaggcaacggcgtggctgacgattgcaaagttactagctgtgtttgagatcagaaagagtttagacggcaacggttccgagatagaaccgattgtctctttctcgcctggcatcgttagccacccagagccgtttcaagttacaatcaagccgagatccccccaacacgaggctctgatacgcaagtttgcgcctctgcattccgaggaagaaagtgatgcgggggagctcgagatttcggaggcttga

SEQ ID NO: 11123 - protein, 542 aa, Muscodor strobelii
  misc_feature: SGI Peptide ID NO. 563560
  misc_feature (38)..(509): Pfam Id: PF00067 Pfam Desc: Cytochrome P450
  misc_feature (312)..(509): Pfam Id: PF00067 Pfam Desc: Cytochrome P450
  misc_feature (46)..(537): NCBI GI: 238494768 Blast Desc: cytochrome P450, [Aspergillus flavus NRRL3357] gi|220695270|gb|EED51613.1| cytochrome P450, [Aspergillus flavus NRRL3357]
  misc_feature (46)..(542): NCBI GI: 115401660 Blast Desc: conserved [Aspergillus terreus NIH2624] gi|114190359|gb|EAU32059.1| conserved [Aspergillus terreus NIH2624]
  misc_feature (47)..(538): NCBI GI: 259486936 Blast Desc: TPA: cytochrome P450, (Eurofung) [Aspergillus nidulans FGSC A4]
  misc_feature (48)..(538): NCBI GI: 255944851 Blast Desc: Pc20g06670 [Penicillium chrysogenum Wisconsin 54-1255] gi|211587928|emb|CAP85996.1| Pc20g06670 [Penicillium chrysogenum Wisconsin 54-1255]
  misc_feature (11)..(542): NCBI GI: 169765434 Blast Desc: [Aspergillus oryzae RIB40] gi|83765043|dbj|BAE55186.1| protein product [Aspergillus oryzae]
  misc_feature (3)..(538): NCBI GI: 242817323 Blast Desc: cytochrome P450 oxidoreductase OrdA-like, [Talaromyces stipitatus ATCC 10500] gi|218713397|gb|EED12821.1| cytochrome P450 oxidoreductase OrdA-like, [Talaromyces stipitatus ATCC
  misc_feature (6)..(538): NCBI GI: 212530868 Blast Desc: cytochrome P450 oxidoreductase OrdA-like, [Penicillium marneffei ATCC 18224] gi|210074989|gb|EEA29076.1| cytochrome P450 oxidoreductase OrdA-like, [Penicillium marneffei ATCC 18224]
  misc_feature (46)..(537): NCBI GI: 121716160 Blast Desc: Cytochrome P450 oxidoreductase, [Aspergillus clavatus NRRL 1] gi|119403846|gb|EAW14263.1| Cytochrome P450 oxidoreductase, [Aspergillus clavatus NRRL 1]
  misc_feature (10)..(538): NCBI GI: 255949436 Blast Desc: Pc22g15690 [Penicillium chrysogenum Wisconsin 54-1255] gi|211592502|emb|CAP98857.1| Pc22g15690 [Penicillium chrysogenum Wisconsin 54-1255]
  misc_feature (6)..(538): NCBI GI: 225562186 Blast Desc: O-methylsterigmatocystin oxidoreductase [Ajellomyces capsulatus G186AR]
  misc_feature (44)..(511): SWISSPROT Homolog: EC 1.14.14.1 Unspecific monooxygenase
MADFIMTALILGRVVLLVIFLIGIWLLVAKKSKGPSLPPGPKGWPILGNITDLPANGEREWEHWLKHKDVYGPISSVTALGTTIIILHSRELAVELLEKQSSRNSSRMRLEFGGEMVGYNKSLPILPYGELFRASRKCAHVMIGTRSRIQPHNPLLEAEVHRLLFRVLEEPDKLETHLRSQAGAVILKMIYGYKVEAHKPDPLIELAEKFVYNFSAAAVPGAFLVDVIPALRHIPEWLPGAGFKRLAREWRDILRDSVDTPLRFTKKQMSRGRYEKSCVADFYESAGENISLEDEDIIKWTAVSLTNVLLDLSIYGGGADTTPGILRIFILAMMLHPEIQRKAREEIDRVVGSNRLPTDDDRDQLPYIQAIVTELWRWHPIAPMGGPPHVSSADNMFQGYFIPKGAVILPNIWWFTHDPTVYPNPSVFDPSRYLGSDPAPDPGDDIFGYGRRICPGKYLAEATAWLTIAKLLAVFEIRKSLDGNGSEIEPIVSFSPGIVSHPEPFQVTIKPRSPQHEALIRKFAPLHSEEESDAGELEISEA

SEQ ID NO: 11124 - DNA, 2549 bp, Muscodor strobelii; identical to SEQ ID NO: 11121
  misc_feature: SGI EST ID NO. CUFF.26513.2
  misc_feature: Variant of the nucleotide sequence at SEQ ID NO 11122

SEQ ID NO: 11125 - DNA, 1329 bp, Muscodor strobelii
  misc_feature: SGI cDNA ID NO. 563561
  misc_feature: Encodes the peptide sequence at SEQ ID NO 11126
atgggttctacattattagcaatctgtatctatcttcagctctggatcataccgaccatagggactagaacagtcttcgggttcccccaggcgcaaacacagttcgtggactggtatgaacaatatggatacgtgtttgccagcgccattaaaaacaactgtacaaagcagtacaatgactatctgtacggcgtcggcacctgggaccatgtcatatgctcaggtttcgaggagcctattgtcacctacggaccgggaaccaatatcacgatagacttccaaaatggggccgacgaaccgagtagcatcactcaaccagtcattgcttgtcttctcaacaatactgctgattatatcaagagttcgatgtcaagcgcacaggttctcctaggtcttacgcctaccatggtacgtacccagatcatcttagctctgctcgggcctagccccatggagttgtcgttgttgactatcattgctagacgcccttttctagctcttcttttgtctcttgcgtgtccctcagtgtatttaagccgggctttcgataccacgtcggcgcttgacattctggccgatcgaccaggccgattccctcaatggcgtccgagaggctggcggatgacagcaacggccctaggccagtatttgatcgttattgctacactagctaatgttgctggtaaatcttgcgtatcctatctcatacctagaataatcattattgactgttcctgcatgttttggcccaatggaacagtagcccctgtcgtttggggtatgctggttctccccatccatatcgtagcaaccgtcgtgttccggctgcagattagacgggtttacagcgacgagaactcgcttcgattagaacacaacaactctttccgacattggctcaagcgatccccaaagcggtttatcgagctgaggcacacagaatttgtgccaagctcttgtcagaagaacgtcttcgttgtcacattcagagagaccataaagcttatttgtctcaactggtttctgacgccaggcatcatcatccacgttatcttcggcacgctcgtattgtcgagcttgacatttattggaccgcgagacgctctggaagttgttggtagattcatggtctctgttctggtgtgccgtgcggtgctcatgtatgagatcgctggcattagagatcgttataattctgatgatggcggactcgttccgaccttacctttcaaggagcctgatccgttgatcacagaggaggatgattcacctaagatgaacggggcatatacattggaaatcaacagagtctccgcgacggctcgatag

SEQ ID NO: 11126 - protein, 442 aa, Muscodor strobelii
  misc_feature: SGI Peptide ID NO. 563561
  misc_feature (34)..(399): NCBI GI: 171686992 Blast Desc: protein product [Podospora anserina] gi|170943457|emb|CAP69110.1| protein product [Podospora anserina]
  misc_feature (34)..(395): NCBI GI: 256726714 Blast Desc: NECHADRAFT_25871 [Nectria haematococca mpVI 77-13-4]
  misc_feature (34)..(436): NCBI GI: 256722868 Blast Desc: NECHADRAFT_52892 [Nectria haematococca mpVI 77-13-4]
  misc_feature (34)..(402): NCBI GI: 238490752 Blast Desc: conserved [Aspergillus flavus NRRL3357] gi|220697026|gb|EED53367.1| conserved [Aspergillus flavus NRRL3357]
  misc_feature (34)..(402): NCBI GI: 169772847 Blast Desc: [Aspergillus oryzae RIB40] gi|83768753|dbj|BAE58890.1| protein product [Aspergillus oryzae]
  misc_feature (31)..(403): NCBI GI: 116199195 Blast Desc: CHGG_07753 [Chaetomium globosum CBS 148.51] gi|88179032|gb|EAQ86500.1| CHGG_07753 [Chaetomium globosum CBS 148.51]
  misc_feature (35)..(428): NCBI GI: 46127805 Blast Desc: FG08280.1 [Gibberella zeae PH-1]
  misc_feature (107)..(395): NCBI GI: 256732899 Blast Desc: NECHADRAFT_5957 [Nectria haematococca mpVI 77-13-4]
  misc_feature (67)..(396): NCBI GI: 256732224 Blast Desc: NECHADRAFT_93753 [Nectria haematococca mpVI 77-13-4]
  misc_feature (120)..(395): NCBI GI: 145609221 Blast Desc: MGG_07429 [Magnaporthe grisea 70-15] gi|145016612|gb|EDK01042.1| MGG_07429 [Magnaporthe grisea 70-15]
MGSTLLAICIYLQLWIIPTIGTRTVFGFPQAQTQFVDWYEQYGYVFASAIKNNCTKQYNDYLYGVGTWDHVICSGFEEPIVTYGPGTNITIDFQNGADEPSSITQPVIACLLNNTADYIKSSMSSAQVLLGLTPTMVRTQIILALLGPSPMELSLLTIIARRPFLALLLSLACPSVYLSRAFDTTSALDILADRPGRFPQWRPRGWRMTATALGQYLIVIATLANVAGKSCVSYLIPRIIIIDCSCMFWPNGTVAPVVWGMLVLPIHIVATVVFRLQIRRVYSDENSLRLEHNNSFRHWLKRSPKRFIELRHTEFVPSSCQKNVFVVTFRETIKLICLNWFLTPGIIIHVIFGTLVLSSLTFIGPRDALEVVGRFMVSVLVCRAVLMYEIAGIRDRYNSDDGGLVPTLPFKEPDPLITEEDDSPKMNGAYTLEINRVSATAR

SEQ ID NO: 11127 - DNA, 1002 bp, Muscodor strobelii
  misc_feature: SGI cDNA ID NO. 563562
  misc_feature: Encodes the peptide sequence at SEQ ID NO 11128
atggagagagtgccgactcctcttgaagttgtcgactcgctggacgtcactgaaaggcctgtagtaccattggcgtatagaaactcttctccgttggtcttcccgaactacgacgatgcggtcaaagattgggaacaaagccggcaacatatgcgtgctcttagtttcatagctgatgacccattatacttgaaggagaaatcgttctgcatcaacattcccctaccaagtggccaaccaagatcgaatttgaatttcgataagcaaatagtcgcgttctgcgacgccaggggccgagaagatgtatttagtctagatacgcatggcttctgtttcgtcaagatgcctgagctgagcatagatattcgcgacgcacacactttgcgatctgtattcattgccgaaatggagaactggttgcataacagattcaaggctgatatggtacacgtatttgattatacagtccgtcaggtaaaaccattcggatactcctacgacgacagcgaaccgcgacctccagcacagggagctcacatcgatcagacaccaagtgctgctgccaggagattgacccttcacctgcaagagcatctcacagagttctacaagggcaggatccaactagtgaatctatggagggctctcaacgggcccttggaagactccctactcagtgtctgtgatgcccgcacaatcgagcgcgaagacctcatggcgcatgacctggtcttctcgcattatgtaggagagaacttccaactcaagtacaaccaaaaacagcgatggtactttcttgacggaatgacggccaatgaggccattctattcaagaactttgattccatgatggatggcagagctcggctatgtccgcatggctctcacaaacgagaaccccagagacagaatgagaaagaaattatgagagcaagcattgaaatcagagccattatcttccacaagaatgctcctccagacaagtaccgagagaccgagtga

SEQ ID NO: 11128 - protein, 333 aa, Muscodor strobelii
  misc_feature: SGI Peptide ID NO. 563562
  misc_feature (54)..(321): NCBI GI: 146341215 Blast Desc: BRADO4289 [Bradyrhizobium sp. ORS278] gi|146194021|emb|CAL78038.1| conserved [Bradyrhizobium sp. ORS278]
  misc_feature (54)..(322): NCBI GI: 148254706 Blast Desc: BBta_3280 [Bradyrhizobium sp. BTAi1] gi|146406879|gb|ABQ35385.1| BBta_3280 [Bradyrhizobium sp. BTAi1]
  misc_feature (54)..(323): NCBI GI: 27381560 Blast Desc: bll6449 [Bradyrhizobium japonicum USDA 110] gi|27354728|dbj|BAC51714.1| bll6449 [Bradyrhizobium japonicum USDA 110]
  misc_feature (61)..(323): NCBI GI: 261193415 Blast Desc: conserved [Ajellomyces dermatitidis SLH14081] gi|239588718|gb|EEQ71361.1| conserved [Ajellomyces dermatitidis SLH14081] gi|239613960|gb|EEQ90947.1| conserved [Ajellomyces
  misc_feature (47)..(323): NCBI GI: 242827473 Blast Desc: conserved [Talaromyces stipitatus ATCC 10500] gi|218711998|gb|EED11427.1| conserved [Talaromyces stipitatus ATCC 10500]
  misc_feature (47)..(323): NCBI GI: 242827468 Blast Desc: conserved [Talaromyces stipitatus ATCC 10500] gi|218711997|gb|EED11426.1| conserved [Talaromyces stipitatus ATCC 10500]
  misc_feature (91)..(321): NCBI GI: 154297779 Blast Desc: BC1G_12301 [Botryotinia fuckeliana B05.10] gi|150858430|gb|EDN33622.1| BC1G_12301 [Botryotinia fuckeliana B05.10]
  misc_feature (91)..(321): NCBI GI: 115390440 Blast Desc: conserved [Aspergillus terreus NIH2624] gi|114195121|gb|EAU36821.1| conserved [Aspergillus terreus NIH2624]
  misc_feature (95)..(323): NCBI GI: 169625338 Blast Desc: SNOG_15942 [Phaeosphaeria nodorum SN15] gi|160705638|gb|EAT76780.2| SNOG_15942 [Phaeosphaeria nodorum SN15]
  misc_feature (91)..(323): NCBI GI: 156043835 Blast Desc: SS1G_10921 [Sclerotinia sclerotiorum 1980] gi|154695308|gb|EDN95046.1| SS1G_10921 [Sclerotinia sclerotiorum 1980]
MERVPTPLEVVDSLDVTERPVVPLAYRNSSPLVFPNYDDAVKDWEQSRQHMRALSFIADDPLYLKEKSFCINIPLPSGQPRSNLNFDKQIVAFCDARGREDVFSLDTHGFCFVKMPELSIDIRDAHTLRSVFIAEMENWLHNRFKADMVHVFDYTVRQVKPFGYSYDDSEPRPPAQGAHIDQTPSAAARRLTLHLQEHLTEFYKGRIQLVNLWRALNGPLEDSLLSVCDARTIEREDLMAHDLVFSHYVGENFQLKYNQKQRWYFLDGMTANEAILFKNFDSMMDGRARLCPHGSHKREPQRQNEKEIMRASIEIRAIIFHKNAPPDKYRETE

SEQ ID NO: 11129 - DNA, 2406 bp, Muscodor strobelii
  misc_feature: SGI EST ID NO. CUFF.26402.0
  misc_feature: Variant of the nucleotide sequence at SEQ ID NO 11127
ctgattaacccgcccggaagttgtcagacgacgaccatccaaatcctacaatcgaatgtctactgctcatcataccaatagtgacgggacagcagcccaaaattcaaccgccttcgaggacattgcacgtgcacggttcatttccacaaccgtaacacctcccaggattcctgagctcataccatggctggccctggaatactcccgtcactcgagcagcaagggcatccaccttctcctttcccagatcgccgcattccaaagaaaaccatcttttactaaaaaaccgatcatcatggcgtgttttctcttctttcatcagatcagtgatagggacgcgggtgtcgagctcgccaggaacggtgatctccaatttgctgtagagctcacgccatggttgcactctattttcgttttgcgccgtggacctgatacattctacttcgggtttttgtttgggcattggcaggcacccaatgcctggttgaactctccttggaaaaggaagatgacacgttcatcgataggcaagcttaacacagggctgtcgacagtagataagcaccgagactccaagaagagcctcatcttccgtaaccgatatcaacggggatatcgtgaccatgacaacaaacacgaggatggtgtactgccatggccacaaattggctgttgagcgcgattatgctgcagatactacgcacgaccagtcaccagtcaatccctcctagttgcctcttccgggcacatggtgcgaggcagagccggtgatcgggcgggctttcgcccgttggcgtaatgtattggatgttggggttacttggatgcaccctaagccggctgcctacatggcaattttcggatggcatcgtctcgttatgcaacgacccaatcaattcgtgacacaccagccatattagcagaactcgcaccccctcccttccgttgtgccgatcatgtatgcccagtcaaagctctgtgatcgattttttcggcacaagtcgacaaatgtatgtaaaatccgattatttagaaagaaaccgaatctagctaatagtgaggctctgcgacttattaatcctcggcaattcagactgcataactctatactgtatttgcagtaaaatctacgtactcttgaccctcagtctatacaaattttactccggaggcatctattgatgtcttgtcaagccccgatcagcgtccgaatcacggatctaagacactttctggactgatctgatttaacaatcgaaaaacatggagagagtgccgactcctcttgaagttgtcgactcgctggacgtcactgaaaggcctgtagtaccattggcgtatagaaactcttctccgttggtcttcccgaactacgacgatgcggtcaaagattgggaacaaagccggcaacatatgcgtgctcttagtttcatagctgatgacccattatacttgaaggagaaatcgttctgcatcaacattcccctaccaagtggccaaccaagatcgaatttgaatttcgataagcaaatagtcgcgttctgcgacgccaggggccgagaagatgtatttagtctagatacgcatggcttctgtttcgtcaagatgcctgagctgagcatagatattcgcgacgcacacactttgcgatctgtattcattgccgaaatggagaactggttgcataacagattcaaggctgatatggtacacgtatttgattatacagtccgtcaggtaaaaccattcggatactcctacgacgacagcgaaccgcgacctccagcacagggagctcacatcgatcagacaccaagtgctgctgccaggagattgacccttcacctgcaagagcatctcacagagttctacaagggcaggatccaactagtgaatctatggagggctctcaacgggcccttggaagactccctactcagtgtctgtgatgcccgcacaatcgagcgcgaagacctcatggcgcatgacctggtcttctcgcattatgtaggagagaacttccaactcaagtacaaccaaaaacagcgatggtactttcttgacggaatgacggccaatgaggccattctattcaagaactttgattccatgatggatggcagagctcggctatgtccgcatggctctcacaaacgagaaccccagagacagaatgagaaagaaattatgagagcaagcattgaaatcagagccattatcttccacaagaatgctcctccagacaagtaccgagagaccgagtgatcagtagtcagtgccactggtttatagattcgaacgagagacacgggtatatagtttcgcatggatacaatttggctccatttgctgctgatgattgagatcactgctctttcgtattctatcccctaggacacattagaa

SEQ ID NO: 11130 - DNA, 1821 bp, Muscodor strobelii
  misc_feature: SGI cDNA ID NO. 563563
  misc_feature: Encodes the peptide sequence at SEQ ID NO 11131
atgaagatttacgaagccgacctcggaggattctatccaacctctatcgagaagcatctcttcaaattgcgtacctatctggcctctgatgacagcgaaattgccaaaaactcgatgcgcatatcgaccgttattcaggttggagaagtttcctacctttgtggaggaacaccgtttcactctttgaggctttcagaatctcccactataaagcagctagcgtcctttaccacgcctgagggttccattacatgtcgatcattgcaaaaggttatcgagcaggacttacagaatgacgacgttttatgctgctcattcatgacttctgttgtactaataacccaggacgagtctttggatgccgaatcactcaaagtattgtcttcgtttggttgcaagagaatctttcttacaaacttaaatcttgggaagggtccctttttctactctcgcgatggaatattcagggctttcagactgtatcctgacacgcacgatgctttcgtaacgagcgtaattcctagcccgactgataagaacgtataccagtctatcagtgcatcagcgtacggccaccgcactcgctgcgttgcggtaccctctcgcctctacttcaagcgcacggaagagttgcctcttgccgggcttcgactttccgtcaaggacgtttttcatttaaggggtgtgactacaaccaacggtaatcgggcgtacgagaacctgtacggcgaacaatccgttagctcggccgctgttcaggcagcgatcgacaaaggagcagtcatagttggaaaagcgacaacggtagagtttgccggggcccaggaagttgaaggtgactgggctgacttccggtatccaaaaaacccccgagcagatggatatctacgcgccacggggagtagtgttgggagcgcgtgtggcatggcagcttacccatggctagatgggtctctagggagtgattgcggcggcagtatcagagatcccgccgtcgtatttggtgtgcccggatttcgagcttcacatgatgggattcaggagcaaaacacctcggtgccatgcccgcgtttccagcgacctggatatcttaccagagatattaagatgctttatgaccttacacgtcatgcaatccgactgccatttgatggtcacgagtcgcagcggccgaagcgaatcattacgataatcgaatatgctagcggaagaaacgatgtggataaactatttgccaatgttgctgagaaattagccaagtggctcgatactaagcttgtcagcatctcgctagaggaagtctggaaacgtactaaaccaatcgaaactgacgaaggatttcttttgcattacgccaagaccttcatgactgtagttaggaaggattacttcgacagcggggctcaattccgtgaggactatcaccgcaaattcaattctgctccttttgtagcccagacgactcgatacctatggggaggcggctcagaacctcccgacaaatttctggcggctctagataaagtaaaggaacacaacgcgtggttctcgactaatatcattggcgaggacactatcatggttataccacgatttagtctcgatcgacgtgacgaatacttgccaagcgatccttggaagcgggaatggatggtttgggattccaacctgcatgcctcaatcggcggatttccaaatctcatgatgcctagcgccgatttatcgatacttcgcctcgtatacgaattcctagccgaacatggacctgccattggcgtgcaagctggcaagtcggcttactcagagaaactggccttctga

SEQ ID NO: 11131 - protein, 606 aa, Muscodor strobelii
  misc_feature: SGI Peptide ID NO. 563563
  misc_feature (163)..(577): Pfam Id: PF01425 Pfam Desc: Amidase
  misc_feature (42)..(570): NCBI GI: 242761675 Blast Desc: glutamyl-tRNA(Gln) amidotransferase, subunit A [Talaromyces stipitatus ATCC 10500] gi|218723422|gb|EED22839.1| glutamyl-tRNA(Gln) amidotransferase, subunit A [Talaromyces ATCC
  misc_feature (30)..(521): NCBI GI: 212529978 Blast Desc: glutamyl-tRNA(Gln) amidotransferase, subunit A [Penicillium marneffei ATCC 18224] gi|210074544|gb|EEA28631.1| glutamyl-tRNA(Gln) amidotransferase, subunit A [Penicillium ATCC
  misc_feature (43)..(570): NCBI GI: 261193419 Blast Desc: amidase [Ajellomyces dermatitidis SLH14081] gi|239588720|gb|EEQ71363.1| amidase [Ajellomyces dermatitidis SLH14081]
  misc_feature (43)..(540): NCBI GI: 256720629 Blast Desc: NECHADRAFT_50177 [Nectria haematococca mpVI 77-13-4]
  misc_feature (43)..(570): NCBI GI: 239613958 Blast Desc: amidase [Ajellomyces dermatitidis ER-3]
  misc_feature (57)..(521): NCBI GI: 171684273 Blast Desc: protein product [Podospora anserina] gi|170942097|emb|CAP67749.1| protein product [Podospora anserina]
  misc_feature (92)..(482): NCBI GI: 240275069 Blast Desc: amidase [Ajellomyces capsulatus H143]
  misc_feature (40)..(493): NCBI GI: 156064527 Blast Desc: SS1G_00271 [Sclerotinia sclerotiorum 1980] gi|154691133|gb|EDN90871.1| SS1G_00271 [Sclerotinia sclerotiorum 1980]
  misc_feature (92)..(482): NCBI GI: 225558626 Blast Desc: amidase [Ajellomyces capsulatus G186AR]
  misc_feature (42)..(570): NCBI GI: 156055540 Blast Desc: SS1G_05122 [Sclerotinia sclerotiorum 1980] gi|154702906|gb|EDO02645.1| SS1G_05122 [Sclerotinia sclerotiorum 1980]
MKIYEADLGGFYPTSIEKHLFKLRTYLASDDSEIAKNSMRISTVIQVGEVSYLCGGTPFHSLRLSESPTIKQLASFTTPEGSITCRSLQKVIEQDLQNDDVLCCSFMTSVVLITQDESLDAESLKVLSSFGCKRIFLTNLNLGKGPFFYSRDGIFRAFRLYPDTHDAFVTSVIPSPTDKNVYQSISASAYGHRTRCVAVPSRLYFKRTEELPLAGLRLSVKDVFHLRGVTTTNGNRAYENLYGEQSVSSAAVQAAIDKGAVIVGKATTVEFAGAQEVEGDWADFRYPKNPRADGYLRATGSSVGSACGMAAYPWLDGSLGSDCGGSIRDPAVVFGVPGFRASHDGIQEQNTSVPCPRFQRPGYLTRDIKMLYDLTRHAIRLPFDGHESQRPKRIITIIEYASGRNDVDKLFANVAEKLAKWLDTKLVSISLEEVWKRTKPIETDEGFLLHYAKTFMTVVRKDYFDSGAQFREDYHRKFNSAPFVAQTTRYLWGGGSEPPDKFLAALDKVKEHNAWFSTNIIGEDTIMVIPRFSLDRRDEYLPSDPWKREWMVWDSNLHASIGGFPNLMMPSADLSILRLVYEFLAEHGPAIGVQAGKSAYSEKLAF

SEQ ID NO: 11132 - DNA, 557 bp, Muscodor strobelii
  misc_feature: SGI EST ID NO. CUFF.26410.0
  misc_feature: Variant of the nucleotide sequence at SEQ ID NO 11130
tttatgaccttacacgtcatgcaatccgactgccatttgatggtcacgaggtgaagtcagcaactcttggttgacactgatcatggctgacgctctagctcagtcgcagcggccgaagcgaatcattacgataatcgaatatgctagcggaagaaacgatgtggataaactatttgccaatgttgctgagaaattagccaagtggctcgatactaagcttgtcagcatctcgctagaggaagtctggaaacgtactaaaccaatcgaaactgacgaaggatttcttttgcattacgccaagaccttcatgactgtagttaggaaggattacttcgacagcggggctcaattccgtgaggactatcaccgcaaattcaattctgctccttttgtagcccagacgactcgatacctatggggaggcggctcagaacctcccgacaaatttctggcggctctagataaagtaaaggaacacaacgcgtggttctcgactaatatcattggcgaggacactatcatggttataccacgatttagtctcgatcgacgtgacg

SEQ ID NO: 11133 - DNA, 2403 bp, Muscodor strobelii
  misc_feature: SGI cDNA ID NO. 563564
  misc_feature: Encodes the peptide sequence at SEQ ID NO 11134
atggtgaaaacatgcaaagggtttatcaatgtcgtacatatgtcacgcatcattccggatgagttcgagagttggccagcacttgtcctcggcagcctagcactctgcgtccgcgaactactaccgatgggagactcgagccgaaatcccttcctccccttgattgaagagctcacaaccaacacatctttacctctaccacctttcaaccggccgtgcgacaacgatagccctttggcagagtctctagctcagcttttcgcagaactcgcgctcagtctgctgaaacttgcattgttcatggtcaagcatcctacagggattgcgcttcgtcttggactacagacagtcgttctactctcccactcctcgagcaacgcacaacagaagcacgtgttcagacttaccaccctggtctcactacatggcttgccaggcattgggaagactcaactggcaatgcgatattgcaagtcccaagcggctcactataatatcattctatggaccgaagcagacacttcaatgaagattcaagaggcactatcgaaacacgctatcaacctcaaattaccaggggccgaagcacgaggggaaagcgcgttgaattgcggtatcttacttgattggctcgaggtaacgaataatacctggcttctggtctatgataatcttgacgatgtgcagatacttcggcagtattggcccgaaggaggcaagggccacatcatcgtcacgagccgcaacccctacattgcgagttttcgtgcttgttccagtatttccgtcttgccccttaatttggaggaatcggtcaatctattctatgatgaggtaggccggtctcaacacccacaacgaaatccgagaatcgaaaagctattgggagactggaaaggcgttccattggctatcaatcaaatgagcagtttcatcactggggttcgaatggacttggatcagttcgtaaagctttattacacgagtgcgccacgccttctacaaaaggccaatctttacgaagaatatccccatagtgttacgactgcgttcgcaaccgaacaattacaacaggacccgagggctattatacaggccatgtgtttctttgacccggatcgaataccctgcgaagtaattcaatctagtttcgatctggaggagacacaaggcttcaattcgattatgtgcgaaatggattacttagatagtctcgaaacgctcatgaggatgtccttgctcaccaagttcgagaatgacatgagtatccatcgcttggtacaggacgtggtgtatttgttcatgtccaaagacgaccgtcaaagggcttttgacgccgtgctcacacttctcagcacgaatttccccaaggggaccgggggtcagatgtggaaggactggaaaaagtgcgaaagatatctaccccatgctatctttctatgtcgccgctttggggaagattttcggggtcagaagtccatccaacttgccagcttggtgagctctgtcacatggtacctgtttgagcgcggccttttcaccgaaatcgactcattggtgaaccttggcctggcagcatctccggatgaagagaatcttgtagttggctcgctagtatggcctcttgctggcatactcttcgagaacaatcgtatcgttgaggcattgcccctattattaaaatctctcaaaattcgcgagactcttcttcctccaaatgatcctgttcttggcaacacatactactcaatcggcatcttctacatggaagacaatcagctagagaagtcgctggagtacaatctcaaagccctcgaagtgagacagaactgcggcgaccctgacgagggacctttggcatttacgtacggcaatttgggtttgatctatcgacgcatgggagagcttaaaaaggcatcggagtgcatggagaatggcgaaaagctgtggcgacggagctatggcacagactcagatagatatgcgatatgtatgtactacctcgggaacctgcggctcgaccaagggcggatcgctgaagcacgacactgccaccaaatgtcattcgatatatactgcaagatcctgcctcataacttcaagacaggactctgctggcataagatggccacattcttccgtcatgatggcgacttccataatgctgaatcatatgcacggaaggctatatctatcttccaaaaatgctttgacccagtcccgagactcgctcgctccacctatctgctatcagaggtgttcagagacagtggttgcatagatgaggcggacgaagtgcgagaggaggctgagaagctaaggagtggtattacgaccctcccatatgaggaaaactcaacttccgaggcatttgagagactcgttccatatttcttgaggtaa

SEQ ID NO: 11134 - protein, 800 aa, Muscodor strobelii
  misc_feature: SGI Peptide ID NO. 563564
  misc_feature (578)..(611): Pfam Id: PF00515 Pfam Desc: Tetratricopeptide repeat
  misc_feature (620)..(642): Pfam Id: PF00515 Pfam Desc: Tetratricopeptide repeat
  misc_feature (140)..(800): NCBI GI: 239613957 Blast Desc: pfs domain-containing protein [Ajellomyces dermatitidis ER-3]
  misc_feature (140)..(800): NCBI GI: 261193421 Blast Desc: pfs domain-containing protein [Ajellomyces dermatitidis SLH14081] gi|239588721|gb|EEQ71364.1| pfs domain-containing protein [Ajellomyces dermatitidis SLH14081]
  misc_feature (139)..(784): NCBI GI: 39940396 Blast Desc: MGG_05042 [Magnaporthe grisea 70-15] gi|145010713|gb|EDJ95369.1| MGG_05042 [Magnaporthe grisea 70-15]
  misc_feature (136)..(737): NCBI GI: 193215022 Blast Desc: TPR repeat-containing protein [Chloroherpeton thalassium ATCC 35110] gi|193088499|gb|ACF13774.1| TPR repeat-containing protein [Chloroherpeton thalassium ATCC 35110]
  misc_feature (140)..(799): NCBI GI: 255946221 Blast Desc: Pc20g14000 [Penicillium chrysogenum Wisconsin 54-1255] gi|211588613|emb|CAP86729.1| Pc20g14000 [Penicillium chrysogenum Wisconsin 54-1255]
  misc_feature (138)..(604): NCBI GI: 115491057 Blast Desc: [Aspergillus terreus NIH2624] gi|114197016|gb|EAU38716.1| [Aspergillus terreus NIH2624]
  misc_feature (135)..(777): NCBI GI: 73671136 Blast Desc: Mbar_A3708 [Methanosarcina barkeri str. Fusaro] gi|72398298|gb|AAZ72571.1| Mbar_A3708 [Methanosarcina barkeri str. Fusaro]
  misc_feature (139)..(681): NCBI GI: 169768920 Blast Desc: [Aspergillus oryzae RIB40] gi|83766788|dbj|BAE56928.1| protein product [Aspergillus oryzae]
  misc_feature (140)..(763): NCBI GI: 162452076 Blast Desc: ATP/GTP-binding protein [Sorangium cellulosum 'So ce 56'] gi|161162658|emb|CAN93963.1| ATP/GTP-binding protein [Sorangium cellulosum 'So ce 56']
  misc_feature (140)..(800): NCBI GI: 225560352 Blast Desc: tetratricopeptide repeat domain-containing protein [Ajellomyces capsulatus G186AR]
MVKTCKGFINVVHMSRIIPDEFESWPALVLGSLALCVRELLPMGDSSRNPFLPLIEELTTNTSLPLPPFNRPCDNDSPLAESLAQLFAELALSLLKLALFMVKHPTGIALRLGLQTVVLLSHSSSNAQQKHVFRLTTLVSLHGLPGIGKTQLAMRYCKSQAAHYNIILWTEADTSMKIQEALSKHAINLKLPGAEARGESALNCGILLDWLEVTNNTWLLVYDNLDDVQILRQYWPEGGKGHIIVTSRNPYIASFRACSSISVLPLNLEESVNLFYDEVGRSQHPQRNPRIEKLLGDWKGVPLAINQMSSFITGVRMDLDQFVKLYYTSAPRLLQKANLYEEYPHSVTTAFATEQLQQDPRAIIQAMCFFDPDRIPCEVIQSSFDLEETQGFNSIMCEMDYLDSLETLMRMSLLTKFENDMSIHRLVQDVVYLFMSKDDRQRAFDAVLTLLSTNFPKGTGGQMWKDWKKCERYLPHAIFLCRRFGEDFRGQKSIQLASLVSSVTWYLFERGLFTEIDSLVNLGLAASPDEENLVVGSLVWPLAGILFENNRIVEALPLLLKSLKIRETLLPPNDPVLGNTYYSIGIFYMEDNQLEKSLEYNLKALEVRQNCGDPDEGPLAFTYGNLGLIYRRMGELKKASECMENGEKLWRRSYGTDSDRYAICMYYLGNLRLDQGRIAEARHCHQMSFDIYCKILPHNFKTGLCWHKMATFFRHDGDFHNAESYARKAISIFQKCFDPVPRLARSTYLLSEVFRDSGCIDEADEVREEAEKLRSGITTLPYEENSTSEAFERLVPYFLR

SEQ ID NO: 11135 - DNA, 1308 bp, Muscodor strobelii
  misc_feature: SGI cDNA ID NO. 563565
  misc_feature: Encodes the peptide sequence at SEQ ID NO 11136
atggataaactcctagttctactggctgcaacgcttgccgcaagctcgccagtctcaatagcatcccgcgccgtcacagaattagaccaagcagcttttgacgaggctcagcaagtcgatgcgacggccacaagagccttcagcggaacatccatcaagaccggggatgggcgttgtttattcgtcgatgagctctcgggagactttcgagcaaacttgacgcctattcaagttgccgactgcgggtcaaccgatgggcaagggtgggatgtgatagccagcgggaaacacaacgatcaagccaattccatgctcgttgtcagcacgttgacgaatgcatgcttcaacttcgacccaaggcgtgcggcaggcaaccaggtcctgctcttcagctgcggtggccgcgcagatggcggtggaagcgtgacgaactcacagctgttcccctttaacggcggtgccggcccgctctcattctcacccgagaaccaggcaggctcatgtttcaccgtcacgggagatgtgctcgacgttgctccatgcgcggccggagatcaaaaccaacaattcacatttggtgatgctcctgcaagtggcaatgaaccggcccctgcctctacagcatcggacgacatcacgagcaccgttcatgcaacatcaacaataacagaaattgcgaccgtcactcagtccccaagtgccgtaaccagcagcgcctcagccgcagtaacaacaccatcacccaacgacgcagccggaatcccgaaccccacagtcgccgtccccgtctccggcgcaggcgggacactaatcccaacagcagtcgccgaatcccacgccttcgacaccacagcaacacgcgccttcacatcagtcagcatccaatcccccgacgggcgctgtctcttcatcgaccccacagcgggcgacttccgggagaacctaatccccatcaccctcgtcacctgctctggcacaccaaacgagaaattcgacataatcaccgcaggaaagcacaacaacgccaagaactccgccctaatcgtaagcagcctcatgaacggctgtatgtccttcgacgggcgacgaccagccggaaacacagtcaacatcttttcctgcggtggccgagccgacggagaaggcgagacgaactctggacagctcatccccttcactggcggtactaatctcgtgtttgcccctgaaagcgagggaaatgctacttgtatcgtacctggagattcgaacctcatctccggtccgtgtactggtgctgagagtcaggtgtttactatcctgtcttga

SEQ ID NO: 11136 - protein, 435 aa, Muscodor strobelii
  misc_feature: SGI Peptide ID NO. 563565
  misc_feature (121)..(200): Pfam Id: PF00652 Pfam Desc: Ricin-type beta-trefoil lectin domain
  misc_feature (4)..(435): NCBI GI: 116191623 Blast Desc: CHGG_05529 [Chaetomium globosum CBS 148.51] gi|88181442|gb|EAQ88910.1| CHGG_05529 [Chaetomium globosum CBS 148.51]
  misc_feature (23)..(382): NCBI GI: 145602039 Blast Desc: MGG_12906 [Magnaporthe grisea 70-15] gi|145010491|gb|EDJ95147.1| MGG_12906 [Magnaporthe grisea 70-15]
  misc_feature (6)..(434): NCBI GI: 85109502 Blast Desc: NCU07827 [Neurospora crassa OR74A] gi|28924593|gb|EAA33712.1| [Neurospora crassa OR74A]
  misc_feature (10)..(435): NCBI GI: 156047934 Blast Desc: SS1G_08698 [Sclerotinia sclerotiorum 1980] gi|154693095|gb|EDN92833.1| SS1G_08698 [Sclerotinia sclerotiorum 1980]
  misc_feature (28)..(317): NCBI GI: 238593741 Blast Desc: MPER_07014 [Moniliophthora perniciosa FA553] gi|215460531|gb|EEB94212.1| MPER_07014 [Moniliophthora perniciosa FA553]
  misc_feature (6)..(193): NCBI GI: 171687172 Blast Desc: protein product [Podospora anserina] gi|170943547|emb|CAP69200.1| protein product [Podospora anserina]
  misc_feature (256)..(434): NCBI GI: 171687172 Blast Desc: protein product [Podospora anserina] gi|170943547|emb|CAP69200.1| protein product [Podospora anserina]
  misc_feature (4)..(193): NCBI GI: 261359149 Blast Desc: conserved [Verticillium albo-atrum VaMs.102]
  misc_feature (270)..(433): NCBI GI: 238593741 Blast Desc: MPER_07014 [Moniliophthora perniciosa FA553] gi|215460531|gb|EEB94212.1| MPER_07014 [Moniliophthora perniciosa FA553]
  misc_feature (274)..(433): NCBI GI: 145602039 Blast Desc: MGG_12906 [Magnaporthe grisea 70-15] gi|145010491|gb|EDJ95147.1| MGG_12906 [Magnaporthe grisea 70-15]
MDKLLVLLAATLAASSPVSIASRAVTELDQAAFDEAQQVDATATRAFSGTSIKTGDGRCLFVDELSGDFRANLTPIQVADCGSTDGQGWDVIASGKHNDQANSMLVVSTLTNACFNFDPRRAAGNQVLLFSCGGRADGGGSVTNSQLFPFNGGAGPLSFSPENQAGSCFTVTGDVLDVAPCAAGDQNQQFTFGDAPASGNEPAPASTASDDITSTVHATSTITEIATVTQSPSAVTSSASAAVTTPSPNDAAGIPNPTVAVPVSGAGGTLIPTAVAESHAFDTTATRAFTSVSIQSPDGRCLFIDPTAGDFRENLIPITLVTCSGTPNEKFDIITAGKHNNAKNSALIVSSLMNGCMSFDGRRPAGNTVNIFSCGGRADGEGETNSGQLIPFTGGTNLVFAPESEGNATCIVPGDSNLISGPCTGAESQVFTILS

SEQ ID NO: 11137 - DNA, 1389 bp, Muscodor strobelii
  misc_feature: SGI cDNA ID NO. 563566
  misc_feature: Reduced expression when VOC is produced
  misc_feature: Encodes the peptide sequence at SEQ ID NO 11138
atgatgttctcccgaattgccctgaaggctgcaaagcctgcagccttcggtgccgctgggctgaagccccaggcccgattgttctctgtcacgactattgtggctagcaaggccgcccagggcagcaaggggagacagatgcccgccaagttcacgggttctaccgctcaagcctccggcaatacggaggccatccttaccattcgagatggccccattttccagggaacggccttcggtgccaagtccaacatatcgggtgaagctgtcttcaccacctccctggttggctaccccgagtccatgaccgacccctcgtaccgtggccagattctggtcttcacccagcccctgattgggaactacggtgttccctcttccaagcgtgacgagttcaacctgcttcgacacttcgagtcaccgcacatccagtgtgccggcattgttgtagctgatgttgctgtgaagtacagccattggactgccgtggagagcttgggagagtggtgcgctcgagagggcattcccgccatctcgggcgtcgatacccgtgccattgtcacatacctccgagagcagggctcttcactcgcccgcatctcaataggagaagagtacgacgcagatgaggacgagggcttcgttgaccctggccaaatcaacttggtcaagcgtgtcagcaccaaggcacctttcgttgttgaggcgcccaacgccaagtaccatgttgcattgatcgactgcggtgtcaaggagaatatccttcgaagtcttgtgagccgtggtgctagcgtgaccgtgttcccgtacgacttcaagatccagaaggtcgccgactcgtacgatggtgtcttcatctccaacgggcccggtgatccgactcattgtcagtccaccgtacacaacctcgctgtgttgatggagacatcgcaaatccctatcatgggcatttgcttaggccaccagctgcttgccctggctgctggcgcccgcaccatcaagctcaaatacggaaatcgtgctcacaacatcccctcgatcgatttgacgaccggacaatgccatatcactagtcagaatcatggttatgccgtcgatgccagcactctaccttctgagtggaaagagtacttcgtcaacctcaacgatggcagtaatgaaggtatgcgccacacctctcgaccaattttctccacccaattccatcccgaagctcgcggcggcccaatggatagcgcctacttgttcgacaagtatatcgaggatgtccgtgccttcaagtcctgccagtctgtgtacaaggacaatcgtcccagccagttcatgctcgacattttgagcaaggagcgtgttggtgtccagcctgagccgcttgctacatctggttag

SEQ ID NO: 11138 - protein, 462 aa, Muscodor strobelii
  misc_feature: SGI Peptide ID NO. 563566
  misc_feature (62)..(215): Pfam Id: PF00988 Pfam Desc: Carbamoyl-phosphate synthase small chain, CPSase domain
  misc_feature (244)..(422): Pfam Id: PF00117 Pfam Desc: Glutamine amidotransferase class-I
  misc_feature (1)..(461): NCBI GI: 171690832 Blast Desc: protein product [Podospora anserina] gi|170945364|emb|CAP71476.1| protein product [Podospora anserina]
  misc_feature (2)..(461): NCBI GI: 46136077 Blast Desc: CARA_TRIVE Carbamoyl-phosphate synthase, arginine-specific, small chain, mitochondrial precursor (Arginine-specific carbamoyl-phosphate synthetase, glutamine zeae
  misc_feature (2)..(461): NCBI GI: 85105517 Blast Desc: arginine-specific carbamoyl-phosphate synthetase small subunit, mitochondrial precursor [Neurospora crassa OR74A] gi|67476608|sp|P22572.2|CARA_NEUCR RecName: synthase small chain,
  misc_feature (24)..(461): NCBI GI: 116195832 Blast Desc: carbamoyl-phosphate synthase, mitochondrial precursor [Chaetomium globosum CBS 148.51] gi|121783423|sp|Q2H132.1|CARA_CHAGB RecName: synthase small chain
  misc_feature (34)..(461): NCBI GI: 256727578 Blast Desc: [Nectria haematococca mpVI 77-13-4]
  misc_feature (15)..(461): NCBI GI: 145613299 Blast Desc: carbamoyl-phosphate synthase, mitochondrial precursor [Magnaporthe grisea 70-15] gi|145020407|gb|EDK04536.1| carbamoyl-phosphate synthase, mitochondrial precursor grisea
  misc_feature (2)..(458): NCBI GI: 3121846 Blast Desc: CARA_TRIVE RecName: Full=Carbamoyl-phosphate synthase arginine-specific small chain; Short=CPS-A; AltName: Full=Arginine-specific carbamoyl-phosphate synthetase, glutamine
  misc_feature (2)..(452): NCBI GI: 156056967 Blast Desc: SS1G_04214 [Sclerotinia sclerotiorum 1980] gi|154702000|gb|EDO01739.1| SS1G_04214 [Sclerotinia sclerotiorum 1980]
  misc_feature (2)..(450): NCBI GI: 154323770 Blast Desc: BC1G_00284 [Botryotinia fuckeliana B05.10] gi|150842513|gb|EDN17706.1| BC1G_00284 [Botryotinia fuckeliana B05.10]
  misc_feature (2)..(453): NCBI GI: 238844450 Blast Desc: carbamoyl-phosphate synthase arginine-specific small chain [Microsporum canis CBS 113480]
  misc_feature (24)..(462): SWISSPROT Homolog: EC 6.3.5.5 Carbamoyl-phosphate synthase (glutamine-hydrolyzing)
  misc_feature: Useful for introducing or modulating the production of volatile compounds
MMFSRIALKAAKPAAFGAAGLKPQARLFSVTTIVASKAAQGSKGRQMPAKFTGSTAQASGNTEAILTIRDGPIFQGTAFGAKSNISGEAVFTTSLVGYPESMTDPSYRGQILVFTQPLIGNYGVPSSKRDEFNLLRHFESPHIQCAGIVVADVAVKYSHWTAVESLGEWCAREGIPAISGVDTRAIVTYLREQGSSLARISIGEEYDADEDEGFVDPGQINLVKRVSTKAPFVVEAPNAKYHVALIDCGVKENILRSLVSRGASVTVFPYDFKIQKVADSYDGVFISNGPGDPTHCQSTVHNLAVLMETSQIPIMGICLGHQLLALAAGARTIKLKYGNRAHNIPSIDLTTGQCHITSQNHGYAVDASTLPSEWKEYFVNLNDGSNEGMRHTSRPIFSTQFHPEARGGPMDSAYLFDKYIEDVRAFKSCQSVYKDNRPSQFMLDILSKERVGVQPEPLATSG

SEQ ID NO: 11139 - DNA, 3957 bp, Muscodor strobelii
  misc_feature: SGI EST ID NO. CUFF.26432.0
  misc_feature: Variant of the nucleotide sequence at SEQ ID NO 11137
cacttgtggcgggccctatccgcttaaggaggccattgaataacctcagcagctaccctctcaaccccttctaacctcgttcaacatgatgttctcccgaattgccctgaaggctgcaaagcctgcagccttcggtgccgctgggctgaagccccaggcccgattgttctctgtcacgactattgtggctagcaaggccgcccagggcagcaaggggagacagatgcccgccaagttcacgggttctaccgctcaagcctccggcaatacggaggccatccttaccattcgagatggccccattttccagggaacggccttcggtgccaagtccaacatatcgggtgaagctgtcttcaccacctccctggttggctaccccgagtccatgaccgacccctcgtaccgtggccagattctggtcttcacccagcccctgattgggaactacggtgttccctcttccaagcgtgacgagttcaacctgcttcgacacttcgagtcaccgcacatccagtgtgccggcattgttgtagctgatgttgctgtgaagtacagccattggactgccgtggagagcttgggagagtggtgcgctcgagagggcattcccgccatctcgggcgtcgatacccgtgccattgtcacatacctccgagagcagggctcttcactcgcccgcatctcaataggagaagagtacgacgcagatgaggacgagggcttcgttgaccctggccaaatcaacttggtcaagcgtgtcagcaccaaggcacctttcgttgttgaggcgcccaacgccaagtaccatgttgcattgatcgactgcggtgtcaaggagaatatccttcgaagtcttgtgagccgtggtgctagcgtgaccgtgttcccgtacgacttcaagatccagaaggtcgccgactcgtacgatggtgtcttcatctccaacgggcccggtgatccgactcattgtcagtccaccgtacacaacctcgctgtgttgatggagacatcgcaaatccctatcatgggcatttgcttaggccaccagctgcttgccctggctgctggcgcccgcaccatcaagctcaaatacggaaatcgtgctcacaacatcccctcgatcgatttgacgaccggacaatgccatatcactagtcagaatcatggttatgccgtcgatgccagcactctaccttctgagtggaaagagtacttcgtcaacctcaacgatggcagtaatgaaggtatgcgccacacctctcgaccaattttctccacccaattccatcccgaagctcgcggcggcccaatggatagcgcctacttgttcgacaagtatatcgaggatgtccgtgccttcaagtcctgccagtctgtgtacaaggacaatcgtcccagccagttcatgctcgacattttgagcaaggagcgtgttggtgtccagcctgagccgcttgctacatctggttagattagctaggatatttgttggacgattggtgaatttgtatgcatttaagtaatggagcaaataaggtcgaatatcgggctcaaaagtgtatgcttgttcgggtgtcggaatctcttggatggttgccattcagtactggagatacaatcaatgaagtaaaattttcgtgtaagatttattttcggcggatttgtgatatacaattggcaaagttaactatctcatctctggctcttatggatggtgaaatcgtcactcgtcgctattctcatactcgtcttcaaaagttcacgctaatctatgcgtagtgatacctcgaatgcatgaaacaattcaattcgagacacatgtctcccgtgacagaagtggatgattggtgaatatgatacattgaagataacatattatttacattggcatctcgttcgtcacacgatgcagcacgagttctatcaagacaggatagtaaacacctgactctcagcaccagtacacggaccggagatgaggttcgaatctccaggtacgatacaagtagcatttccctcgctttcaggggcaaacacgagattagtaccgccagtgaaggggatgagctgtccagagttcgtctcgccttctccgtcggctcggccaccgcaggaaaagatgttgactgtgtttccggctggtcgtcgcccgtcgaaggacatacagccgttcatgaggctgcttacgattagggcggagttcttggcgttgttgtgctttcctgcggtgattatgtcgaatttctcgtttggtgtgccagagcaggtgacgagggtgatggggattaggttctcccggaagtcgcccgctgtggggtcgatgaagagacagcgcccgtcgggggattggatgctgactgatgtgaaggcgcgtgttgctgtggtgtcgaaggcgtgggattcggcgactgctgttgggattagtgtcccgcctgcgccggagacggggacggcgactgtggggttcgggattccggctgcgtcgttgggtgatggtgttgttactgcggctgaggcgctgctggttacggcacttggggactgagtgacggtcgcaatttctgttattgttgatgttgcatgaacggtgctcgtgatgtcgtccgatgctgtagaggcaggggccggttcattgccacttgcaggagcatcaccaaatgtgaattgttggttttgatctccggccgcgcatggagcaacgtcgagcacatctcccgtgacggtgaaacatgagcctgcctggttctcgggtgagaatgagagcgggccggcaccgccgttaaaggggaacagctgtgagttcgtcacgcttccaccgccatctgcgcggccaccgcagctgaagagcaggacctggttgcctgccgcacgccttgggtcgaagttgaagcatgcattcgtcaacgtgctgacaacgagcatggaattggcttgatcgttgtgtttcccgctggctatcacatcccacccttgcccatcggttgacccgcagtcggcaacttgaataggcgtcaagtttgctcgaaagtctcccgagagctcatcgacgaataaacaacgcccatccccggtcttgatggatgttccgctgaaggctcttgtggccgtcgcatcgacttgctgagcctcgtcaaaagctgcttggtctaattctgtgacggcgcgggatgctattgagactggcgagcttgcggcaagcgttgcagccagtagaactaggagtttatccatgttgtctataagatgctgagtttgaagaataatctagccaataagtagtgtctcaagacgacgttggttatcaatgagtgaataggtcgaaatgagcaagaagcgaatttccgacctgcggaggcaagagagcgaaacgcagcaagaaagcaacgaaaaagaagggaaacagaggctatgaagatgaggcttcgtctagataccgatcataagatctctctttaacttgacgaagtcgtgcgcagtctcccatatatagaagttatcatctttcaattaacttactcaccccttacactcgacatggcgccgagccacgaaggcgcaacaagggcgcctactgaaatgtctaaatgaggcatcgtgcactcctggaggtaaatgagaggtttctaaaaaggtttcacgccagataggcctgcgatcttagtggagatcgtttggatgcttttcttctcgaagaagcttcatttcatgggtcgtcgatcgatgggcctgggggagttggagggttctgaaacggcttcggttacagtacccggggttcgtcccttgttagcctatcattgtggaacgaccagccatctcaaagatccctgggtgcgagataaggtccgatagatcgcacagctgagtaaaagatccatgtgactgatcattttgtcgtttgtcagctttcggatgatggtctgtatcctggtgttgattcttggtgtttggcgc

SEQ ID NO: 11140 - DNA, 1107 bp, Muscodor strobelii
  misc_feature: SGI cDNA ID NO. 563567
  misc_feature: Encodes the peptide sequence at SEQ ID NO 11141
atggctgacacgagcgccaccgatgatcagcatgccgacgaaccggctgaagagaccatgagtgactactgcgatctcatgttctcagaaactttgccttgggtcattgacccagatggcgatctctatctcaaagtcggcacggccagatgcttgcttgatgaagaaggagatgagctcaatagcaagaagagcgcagtatccgcatgcgatcccggtagcgaagaggagaagacattacaggctgaggatatatcgagtaatgagaacagcgatcaatctgagagccataatcctctacccagtgatgaacccgcatcacatactgaggatgacgccgacgaggagattgaggacgaagtcgcattcgtgcaaatagattacgaaaactacgcaccaggggatgatgacgacttctcatctgaatatggtgtcaatgaaacacctgacgatgatgccttggaattctcagaaggtgacgatggtgattgtgagcctgatgaatatggtctcgatcatagacacacaggcactatcacttacttggttgactccagggcacttgccagggcctcacctgtctggaagaaaatgcttttcggcggatatgcggagtcaagaccacccaatgctttgaccgcatctgactgggtggtcgagctgcccgaagataaccaaatggcaatagcacgccttttgaatatcgttcatggcgcattcactgggatgccgcccccacactgcgacatcgacgagttagatcttttcaattacgcagtcctgagtaacaaatattttctcacttggagtctaaggccgtgggccactatatggataaccttcatcagtgagaccttcagcaaacagtcaaaggatcctgatcccgattttcagtttgataatctgctctggattgcatgggaattgggtgctccgaaccttttcaaagaagtgtcaaccttgctgatgcgtcgctgtgcaattgacgacaatggtgacttacatcttcatattaatgataagactattgcgctctttaccggaattcatgagccaccaggaatacaaggtaacaatcagagtcccacaggagctggcctctactaa

SEQ ID NO: 11141 - protein, 368 aa, Muscodor strobelii
  misc_feature: SGI Peptide ID NO. 563567
  misc_feature (181)..(319): NCBI GI: 154296228 Blast Desc: BC1G_12941 [Botryotinia fuckeliana B05.10] gi|150843505|gb|EDN18698.1| BC1G_12941 [Botryotinia fuckeliana B05.10]
  misc_feature (181)..(334): NCBI GI: 261353831 Blast Desc: conserved [Verticillium albo-atrum VaMs.102]
  misc_feature (183)..(315): NCBI GI: 85085459 Blast Desc: NCU04437 [Neurospora crassa OR74A] gi|28918606|gb|EAA28278.1| [Neurospora crassa OR74A] gi|40882183|emb|CAF06009.1| related to nuclear pore protein
  misc_feature (174)..(340): NCBI GI: 116182756 Blast Desc: CHGG_02006 [Chaetomium globosum CBS 148.51] gi|88186303|gb|EAQ93771.1| CHGG_02006 [Chaetomium globosum CBS 148.51]
  misc_feature (181)..(353): NCBI GI: 85085455 Blast Desc: NCU04436 [Neurospora crassa OR74A] gi|28918605|gb|EAA28277.1| [Neurospora crassa OR74A] gi|40882185|emb|CAF06011.1| [Neurospora crassa]
  misc_feature (185)..(323): NCBI GI: 256724501 Blast Desc: NECHADRAFT_88143 [Nectria haematococca mpVI 77-13-4]
  misc_feature (181)..(340): NCBI GI: 39942070 Blast Desc: MGG_03115 [Magnaporthe grisea 70-15] gi|145015914|gb|EDK00404.1| MGG_03115 [Magnaporthe grisea 70-15]
  misc_feature (181)..(339): NCBI GI: 39942748 Blast Desc: MGG_03454 [Magnaporthe grisea 70-15] gi|145009998|gb|EDJ94654.1| MGG_03454 [Magnaporthe grisea 70-15]
  misc_feature (182)..(334): NCBI GI: 46108528 Blast Desc: FG01146.1 [Gibberella zeae PH-1]
  misc_feature (172)..(315): NCBI GI: 40882184 Blast Desc: [Neurospora crassa]
MADTSATDDQHADEPAEETMSDYCDLMFSETLPWVIDPDGDLYLKVGTARCLLDEEGDELNSKKSAVSACDPGSEEEKTLQAEDISSNENSDQSESHNPLPSDEPASHTEDDADEEIEDEVAFVQIDYENYAPGDDDDFSSEYGVNETPDDDALEFSEGDDGDCEPDEYGLDHRHTGTITYLVDSRALARASPVWKKMLFGGYAESRPPNALTASDWVVELPEDNQMAIARLLNIVHGAFTGMPPPHCDIDELDLFNYAVLSNKYFLTWSLRPWATIWITFISETFSKQSKDPDPDFQFDNLLWIAWELGAPNLFKEVSTLLMRRCAIDDNGDLHLHINDKTIALFTGIHEPPGIQGNNQSPTGAGLY

SEQ ID NO: 11142 - DNA, 2364 bp, Muscodor strobelii
  misc_feature: SGI EST ID NO. CUFF.26459.0
  misc_feature: Variant of the nucleotide sequence at SEQ ID NO 11140
gggtgatcctgttgacgtgttgtggcgttgtgccttaaattgcaatttcaataagtacggcgttggtcggtttccgaacctgacccttgcatggggcggagcacgatttggacctttttcgtttacccatttctttcgcaatcttggcagccaatttgtcgacaacattcttttacgactgcttcgtttgcattctcttggtgtcacattaacttgtgctgatactgctatattcgcgtcgtgaccttgtttcatccgccgcctagcagcaaacgagatgaactaacgaaaggactcaagaccgagactgcgtagcaactcttatatacgctgagatatacatcgtatagctgctattaagattctactattctcaaacttattttacccttgctttctcgcacaggtcgtggagtttggtctcctacattggattattcgttgagcgcagagtataaggaatatggctgacacgagcgccaccgatgatcagcatgccgacgaaccggctgaagagaccatgagtgactactgcgatctcatgttctcagaaactttgccttgggtcattgacccagatggcgatctctatctcaaagtcggcacggccagatgcttgcttgatgaagaaggagatgagctcaatagcaagaagagcgcagtatccgcatgcgatcccggtagcgaagaggagaagacattacaggctgaggatatatcgagtaatgagaacagcgatcaatctgagagccataatcctctacccagtgatgaacccgcatcacatactgaggatgacgccgacgaggagattgaggacgaagtcgcattcgtgcaaatagattacgaaaactacgcaccaggggatgatgacgacttctcatctgaatatggtgtcaatgaaacacctgacgatgatgccttggaattctcagaaggtgacgatggtgattgtgagcctgatgaatatggtctcgatcatagacacacaggcactatcacttacttggttgactccagggcacttgccagggcctcacctgtctggaagaaaatgcttttcggcggatatgcggagtcaagaccacccaatgctttgaccgcatctgactgggtggtcgagctgcccgaagataaccaaatggcaatagcacgccttttgaatatcgttcatggcgcattcactgggatgccgcccccacactgcgacatcgacgagttagatcttttcaattacgcagtcctgagtaacaaatattttctcacttggagtctaaggccgtgggccactatatggataaccttcatcagtgagaccttcagcaaacagtcaaaggatcctgatcccgattttcagtttgataatctgctctggattgcatgggaattgggtgctccgaaccttttcaaagaagtgtcaaccttgctgatgcgtcgctgtgcaattgacgacaatggtgacttacatcttcatattaatgataagactattgcgctctttaccggaattcatgagccaccaggaatacaagacaatatcaaagcagtgcgaaaagacctcatcgggcaacttctcaatccctatgttaccctcgtcgatagacttctggacgtttcatcagataagcaacactgtaaaggagccgaggccgagcgtgctacatgtcagtccttgatcttgggccgagttattagatcgcttgttcaaatcgacctttgaccaattccaaagcccgataatgtctacatgtcgctctttgaactggttgaagccctaaagaaggtcgatacaaaatgtggcttaatctatcatcagaattgcatgggtcttgagggaaatggccaccgcaaaaacaaggcaatacttgatcaagtatatcaaccgttgacacaccacacaaatcatatggacgaacaatcaatccagtccggattgaatcaaggtgaattttgataggtctggagagaaatcaatggttgagtcatattccgttcagatgccggaaaagaaacagggttgagtagataacatacatgagagctgcacgtctcttagtcttattaagtgcaagaagaacgatttcccgctcggatgtctaagggtcaaaattgtgtttgcaagctcaaaattatatgactgtgagtcttggccgaaattgtcaccgggtatcttggtatgtctcggtgtaagagaagcttatagtgcctcgctctacaagcgctggcgaacacgcaagattcgagcagtaggtgttggttgaatctgctcttatgtataatttccttttgtaatacatacaaatatggatcgcgtctattggggactagtgtgagtgcaagtgtaggaagctatattgaattgag

SEQ ID NO: 11143 - DNA, 1455 bp, Muscodor strobelii
  misc_feature: SGI cDNA ID NO. 563568
  misc_feature: Encodes the peptide sequence at SEQ ID NO 11144
atgagcctcctcgttgatcaccctgccgatgagtcggccgagaacaagatgagcgaccattgtgatctcatgatcacagaaccgcctcctatcattatcgatcctcgcggtgatctcctcctcaaggtgggcagggtgtgcacgacggaatgcttgcacgacgaggaaggagtgcaatctgcagctgatggagaaggagaaactcaatttgaagatgacaacagactacaacttaaggaagaggtcaactttatgcttatggactatgagagctatgactccggagacgattccgacttccagcctacagatagcgacgcaaacccatctgacgatgatgttggagacctacctgataatgatcacggctcgcaacctgttaaaaaagatcataagcattgccccgctgctgccacctacgtggtagattctaggactctgattagggcttcacctgtatgggagggaatgctttgtggtccattcgccgaagcaaaaccacccaatgctgtgaaggcatctgactgggcgattccgctacctgatgataacccaacagctatgttgacagtcctgaacatcttgcatggcaactttgagctacgtctcctcaagatcgaagtagacgagctgttcctgcttacagttctaaccgacaaacatttccttactcgtacgctacgaccttgggctcgtacttgggtggattgcattagggaaacagtcagagcgcaatcaaaggatcgccagtctcatttcctgaacggcactcaaccttacctccaattcgatctgatcctctggattgcttgggaattgggtgccaaagaacttttcgcggaggtctcggcccttctgacgcgccgcagtgcaatcgacgattgcggtaacttacagcttgaaattaacaagaagaattttcaacttttcatcgatgctcatcagccgccgaagttgcaaggtaagtatcagtatatcaggcatgatatgccgtcgctgacctgtcaagaaaatatcaaacgagtgcgagaagcactgatcgaaaaactcttggaatcctataccagccttgtccatgatcttatggacaactcacacgacgcagcacgctgcaagattacgggatattttagtgcgaaggctgcacgttccaatgaaatgtgccaatccctgatcacgggccgagttgttaggcagctggccaagatcgactgctggccaattcgctaccctgacgaaattcgtatgtcaccacttagactagctgctgctctggaagaagtcatctcgatgggtcatttcgacaaacacaatgaatgccttgcaatcgtgaagaacaccatggacgcaaatcagaccatacttaaccagccgtatcttgtggagcaacatcactcaagccatatggacaaacaagccattgaatcgggactgcgcgaatgtcccgataaatga

SEQ ID NO: 11144 - protein, 484 aa, Muscodor strobelii
  misc_feature: SGI Peptide ID NO. 563568
  misc_feature (140)..(478): NCBI GI: 39942070 Blast Desc: MGG_03115 [Magnaporthe grisea 70-15] gi|145015914|gb|EDK00404.1| MGG_03115 [Magnaporthe grisea 70-15]
  misc_feature (135)..(283): NCBI GI: 154296228 Blast Desc: BC1G_12941 [Botryotinia fuckeliana B05.10] gi|150843505|gb|EDN18698.1| BC1G_12941 [Botryotinia fuckeliana B05.10]
  misc_feature (98)..(430): NCBI GI: 261353831 Blast Desc: conserved [Verticillium albo-atrum VaMs.102]
  misc_feature (140)..(379): NCBI GI: 39942748 Blast Desc: MGG_03454 [Magnaporthe grisea 70-15] gi|145009998|gb|EDJ94654.1| MGG_03454 [Magnaporthe grisea 70-15]
  misc_feature (142)..(280): NCBI GI: 85085459 Blast Desc: NCU04437 [Neurospora crassa OR74A] gi|28918606|gb|EAA28278.1| [Neurospora crassa OR74A] gi|40882183|emb|CAF06009.1| related to nuclear pore protein
  misc_feature (144)..(414): NCBI GI: 256724501 Blast Desc: NECHADRAFT_88143 [Nectria haematococca mpVI 77-13-4]
  misc_feature (133)..(425): NCBI GI: 256721128 Blast Desc: [Nectria haematococca mpVI 77-13-4]
  misc_feature (140)..(398): NCBI GI: 170940283 Blast Desc: protein product [Podospora anserina]
  misc_feature (139)..(478): NCBI GI: 116201353 Blast Desc: CHGG_08561 [Chaetomium globosum CBS 148.51] gi|88177079|gb|EAQ84547.1| CHGG_08561 [Chaetomium globosum CBS 148.51]
  misc_feature (139)..(396): NCBI GI: 145612037 Blast Desc: MGG_08044 [Magnaporthe grisea 70-15] gi|145019280|gb|EDK03508.1| MGG_08044 [Magnaporthe grisea 70-15]
MSLLVDHPADESAENKMSDHCDLMITEPPPIIIDPRGDLLLKVGRVCTTECLHDEEGVQSAADGEGETQFEDDNRLQLKEEVNFMLMDYESYDSGDDSDFQPTDSDANPSDDDVGDLPDNDHGSQPVKKDHKHCPAAATYVVDSRTLIRASPVWEGMLCGPFAEAKPPNAVKASDWAIPLPDDNPTAMLTVLNILHGNFELRLLKIEVDELFLLTVLTDKHFLTRTLRPWARTWVDCIRETVRAQSKDRQSHFLNGTQPYLQFDLILWIAWELGAKELFAEVSALLTRRSAIDDCGNLQLEINKKNFQLFIDAHQPPKLQGKYQYIRHDMPSLTCQENIKRVREALIEKLLESYTSLVHDLMDNSHDAARCKITGYFSAKAARSNEMCQSLITGRVVRQLAKIDCWPIRYPDEIRMSPLRLAAALEEVISMGHFDKHNECLAIVKNTMDANQTILNQPYLVEQHHSSHMDKQAIESGLRECPDK

SEQ ID NO: 11145 - DNA, 330 bp, Muscodor strobelii
  misc_feature: SGI EST ID NO. CUFF.26452.0
  misc_feature: Variant of the nucleotide sequence at SEQ ID NO 11143
acggaatgcttgcacgacgaggaaggagtgcaatctgcagctgatggagaaggagaaactcaatttgaagatgacaacagactacaacttaaggaagaggtcaactttatgcttatggactatgagagctatgactccggagacgattccgacttccagcctacagatagcgacgcaaacccatctgacgatgatgttggagacctacctgataatgatcacggctcgcaacctgttaaaaaagatcataagcattgccccgctgctgccacctacgtggtagattctaggactctgattagggcttcacctgtatgggagggaatgctt

SEQ ID NO: 11146 - DNA, 783 bp, Muscodor strobelii
  misc_feature: SGI cDNA ID NO. 563569
  misc_feature: Reduced expression when VOC is produced
  misc_feature: Encodes the peptide sequence at SEQ ID NO 11147
atgtctgcacttcggattctcgtccctgtgaagcgggttattgactatgctgtcaaacctcgggtaaacaaggcccagacggccgtcgagaccgcaggcgtcaagcactccatgaaccccttcgatgagctctcgatagaggaatctgtccgtattcgcgagaagaagcgcgcgccaggcggtgtagaagacatctgtgctatctccgcaggcccggcgaaatccgtcgacatcttgcgcacagctatggccatgggtgccgaccgcgcgatccacgtcgagcttaaggacggtgccgaaggcgaaatggagcccctttccgtagccaagatgctgaaagccgtcgtcgagaaggagaggagcaatctcgtaattttgggaaagcagagcatcgacgacgatgcagcacagacgggacagatgcttgctgggctgctgggctggccacaggctacgcaggcgagtaaggtcgagtttggagagggcgacaaagtcagtgtcacgaaggaagtcgatggcggtgtggagacggtaagggcgagtctgccaatggtcatcacgacggatttgagactcaatgagccccggtatgcgagcttgccgaatattatgaaggcgaagaagaagccgctggtcaagatgagcttgagtgatctgggagttgcgaatgagaggaggttgaaggttgttaaggttactgagcccgccccgagacaaggcggtggtaaggtcgaggatgttgatggtctgatctctaagctgaaagagctcggagcgttataa

SEQ ID NO: 11147 - protein, 260 aa, Muscodor strobelii
  misc_feature: SGI Peptide ID NO. 563569
  misc_feature (26)..(223): Pfam Id: PF01012 Pfam Desc: Electron transfer flavoprotein domain
  misc_feature (1)..(260): NCBI GI: 171690830 Blast Desc: protein product [Podospora anserina] gi|170945363|emb|CAP71475.1| protein product [Podospora anserina]
  misc_feature (1)..(260): NCBI GI: 116195834 Blast Desc: conserved [Chaetomium globosum CBS 148.51] gi|88180428|gb|EAQ87896.1| conserved [Chaetomium globosum CBS 148.51]
  misc_feature (1)..(260): NCBI GI: 46136079 Blast Desc: FG09555.1 [Gibberella zeae PH-1]
  misc_feature (1)..(260): NCBI GI: 256727579 Blast Desc: [Nectria haematococca mpVI 77-13-4]
  misc_feature (1)..(260): NCBI GI: 39952203 Blast Desc: conserved [Magnaporthe grisea 70-15] gi|145020406|gb|EDK04535.1| conserved [Magnaporthe grisea 70-15]
  misc_feature (1)..(260): NCBI GI: 85105520 Blast Desc: electron transfer flavoprotein beta-subunit [Neurospora crassa OR74A] gi|28923572|gb|EAA32747.1| electron transfer flavoprotein beta-subunit [Neurospora crassa OR74A]
  misc_feature (1)..(260): NCBI GI: 156056973 Blast Desc: SS1G_04217 [Sclerotinia sclerotiorum 1980] gi|154702003|gb|EDO01742.1| SS1G_04217 [Sclerotinia sclerotiorum 1980]
  misc_feature (1)..(260): NCBI GI: 154323764 Blast Desc: BC1G_00281 [Botryotinia fuckeliana B05.10] gi|150842510|gb|EDN17703.1| BC1G_00281 [Botryotinia fuckeliana B05.10]
  misc_feature (2)..(260): NCBI GI: 67523567 Blast Desc: AN2239.2 [Aspergillus nidulans FGSC A4] gi|40744768|gb|EAA63924.1| AN2239.2 [Aspergillus nidulans FGSC A4]
  misc_feature (2)..(260): NCBI GI: 259487626 Blast Desc: TPA: electron transfer flavoprotein, beta subunit, (AFU_orthologue; AFUA_5G07300) [Aspergillus nidulans FGSC A4]
  misc_feature: Useful for introducing or modulating the production of volatile compounds
MSALRILVPVKRVIDYAVKPRVNKAQTAVETAGVKHSMNPFDELSIEESVRIREKKRAPGGVEDICAISAGPAKSVDILRTAMAMGADRAIHVELKDGAEGEMEPLSVAKMLKAVVEKERSNLVILGKQSIDDDAAQTGQMLAGLLGWPQATQASKVEFGEGDKVSVTKEVDGGVETVRASLPMVITTDLRLNEPRYASLPNIMKAKKKPLVKMSLSDLGVANERRLKVVKVTEPAPRQGGGKVEDVDGLISKLKELGAL

SEQ ID NO: 11148 - DNA, 1320 bp, Muscodor strobelii
  misc_feature: SGI EST ID NO. CUFF.26462.0
  misc_feature: Variant of the nucleotide sequence at SEQ ID NO 11146
gcgtcatggagagcgagaccgcatgcccatgcatatcgattccaacgagctgtccacgaccgatctcaccatccaattcctacgaacgagacgagctgcagggcgaaggaataaagcgatcgacgaagatgtctgcacttcggattctcgtccctgtgaagcgggttattgactatgctgtcaaacctcgggtaaacaaggcccagacggccgtcgagaccgcaggcgtcaagcactccatgaaccccttcgatgagctctcgatagaggaatctgtccgtattcgcgagaagaagcgcgcgccaggcggtgtagaagacatctgtgctatctccgcaggcccggcgaaatccgtcgacatcttgcgcacagctatggccatgggtgccgaccgcgcgatccacgtcgagcttaaggacggtgccgaaggcgaaatggagcccctttccgtagccaagatgctgaaagccgtcgtcgagaaggagaggagcaatctcgtaattttgggaaagcagagcatcgacgacgatgcagcacagacgggacagatgcttgctgggctgctgggctggccacaggctacgcaggcgagtaaggtcgagtttggagagggcgacaaagtcagtgtcacgaaggaagtcgatggcggtgtggagacggtaagggcgagtctgccaatggtcatcacgacggatttgagactcaatgagccccggtatgcgagcttgccgaatattatgaaggcgaagaagaagccgctggtcaagatgagcttgagtgatctgggagttgcgaatgagaggaggttgaaggttgttaaggttactgagcccgccccgagacaaggcggtggtaaggtcgaggatgttgatggtctgatctctaagctgaaagagctcggagcgttataagatgaacgcacatacatatctggacatagtataggaaagactgagggattatacgatcataagatacacccataagcatgaaatggagcagatagaagacagctctagacttgtcattgcgtttaaggctcttcgttgagtccgatacaaaagaatcaaatgtcactatgcaagaagcataatttggaaacgatttggaaatttccggctgaaactattggaactcagataccatgtgtgccagtgaagcatatgtgccgtcatggtccttagaaggcagttgcgatgatacttggctacaatagcagtggtagggacctcaaccgagagaacagtttctgggctttctgcaatgccctaaatgcaaaccccggagcagaaattgagaactattattccgtttcctgca

SEQ ID NO: 11149 - DNA, 1164 bp, Muscodor strobelii
  misc_feature: SGI cDNA ID NO. 563570
  misc_feature: Reduced expression when VOC is produced
  misc_feature: Encodes the peptide sequence at SEQ ID NO 11150
atgtgggaggtcgatcccgaaacgaggtctaagctcctcgcgatccaaaagacgaacaacaataacaattgctgcgactgcaacgcgccgagcccacaatgggcatccccgaagttcggcgtcttcatctgcctgtcatgcgcgggcgtgcaccgcggactgggcgtacacatctcgttcgtgcgatcagtgacgatggacgcgttcaaagccgcggagatcgagcgcatgcggctgggcggcaataaagggtggagggagttcttcgaggagcacgaggacacgaagatgaggggtctcagctgggacgatgccacgatcgctgagagatatagtggggaggcgggtgaggagtggaaagagaggcttagtgcgaaggttgaggggagggagtatgtacccggtgagaggaggagtagtagtacgccgaaacctgcacaggcggtcgccgccaaacctccgcctgctatggggggccagaaacagatcagtaggtccgggacgccgttgagtgggagtaaacggaatgagagtcctggggctgccgccgccgcgatgggtggctcgaaggccaaggttgatgataagtattttgctcgcctgggcgaggagaatgcgtcgagacctgatgggttgccgccgagtcagggtgggaagtatggagggtttgggaatacgccgggcccgtcttcgggtggtgccggtggtggcagcgtgccggatttcgcggagctgcagaaggatcctgttgcggcgcttacgaaggggtttgggtggttcactacgacggtcacgaagacggcgaaggggtttaatgatgattttattcagcctactgctaagcagctctcggaatccgactttgcggctcaagcccgatttgcagctggaaacgtaggcagagcggcgcaagcaggggctatgacggcacaagagcgattcaacaaattcgtcgagggagacgaggttggtgctggtggtgctagacagcgacaggcaccgcttgacgagacgaagaaagacttctgggacgatttctcgtcacttgctgatcagagacacggtaccggtcagaagtacagttctatcggtacttcggccatgggaaaggcaccgaataaaggacctgcgaagaaagaggatgatcaatgggacgactggtag

SEQ ID NO: 11150 - protein, 387 aa, Muscodor strobelii
  misc_feature: SGI Peptide ID NO. 563570
  misc_feature (9)..(132): Pfam Id: PF01412 Pfam Desc: GTPase activating protein for Arf
  misc_feature (9)..(94): Pfam Id: PF01412 Pfam Desc: GTPase activating protein for Arf
  misc_feature (1)..(387): NCBI GI: 256727580 Blast Desc: NECHADRAFT_34347 [Nectria haematococca mpVI 77-13-4]
  misc_feature (1)..(387): NCBI GI: 85105523 Blast Desc: NCU07734 [Neurospora crassa OR74A] gi|28923573|gb|EAA32748.1| [Neurospora crassa OR74A]
  misc_feature (1)..(387): NCBI GI: 145613297 Blast Desc: MGG_01745 [Magnaporthe grisea 70-15] gi|145020405|gb|EDK04534.1| MGG_01745 [Magnaporthe grisea 70-15]
  misc_feature (1)..(387): NCBI GI: 156060901 Blast Desc: SS1G_02593 [Sclerotinia sclerotiorum 1980] gi|154699997|gb|EDN99735.1| SS1G_02593 [Sclerotinia sclerotiorum 1980]
  misc_feature (1)..(387): NCBI GI: 154322084 Blast Desc: BC1G_01189 [Botryotinia fuckeliana B05.10] gi|150850436|gb|EDN25629.1| BC1G_01189 [Botryotinia fuckeliana B05.10]
  misc_feature (1)..(322): NCBI GI: 116195836 Blast Desc: CHGG_04516 [Chaetomium globosum CBS 148.51] gi|88180429|gb|EAQ87897.1| CHGG_04516 [Chaetomium globosum CBS 148.51]
  misc_feature (1)..(387): NCBI GI: 171690828 Blast Desc: protein product [Podospora anserina] gi|170945362|emb|CAP71474.1| protein product [Podospora anserina]
  misc_feature (1)..(377): NCBI GI: 212530602 Blast Desc: zinc finger protein gcs1 [Penicillium marneffei ATCC 18224] gi|210074856|gb|EEA28943.1| zinc finger protein gcs1 [Penicillium marneffei ATCC 18224]
  misc_feature (1)..(386): NCBI GI: 261352198 Blast Desc: ADP-ribosylation factor GTPase-activating protein GCS1 [Verticillium albo-atrum VaMs.102]
  misc_feature (1)..(387): NCBI GI: 169777331 Blast Desc: [Aspergillus oryzae RIB40] gi|238494462|ref|XP_002378467.1| zinc finger protein gcs1 [Aspergillus flavus NRRL3357] gi|83771868|dbj|BAE61998.1| protein
  misc_feature: Useful for introducing or modulating the production of volatile compounds
MWEVDPETRSKLLAIQKTNNNNNCCDCNAPSPQWASPKFGVFICLSCAGVHRGLGVHISFVRSVTMDAFKAAEIERMRLGGNKGWREFFEEHEDTKMRGLSWDDATIAERYSGEAGEEWKERLSAKVEGREYVPGERRSSSTPKPAQAVAAKPPPAMGGQKQISRSGTPLSGSKRNESPGAAAAAMGGSKAKVDDKYFARLGEENASRPDGLPPSQGGKYGGFGNTPGPSSGGAGGGSVPDFAELQKDPVAALTKGFGWFTTTVTKTAKGFNDDFIQPTAKQLSESDFAAQARFAAGNVGRAAQAGAMTAQERFNKFVEGDEVGAGGARQRQAPLDETKKDFWDDFSSLADQRHGTGQKYSSIGTSAMGKAPNKGPAKKEDDQWDDW

SEQ ID NO: 11151 - DNA, 1674 bp, Muscodor strobelii
  misc_feature: SGI EST ID NO. CUFF.26675.2
  misc_feature: Variant of the nucleotide sequence at SEQ ID NO 11149
tggtccagtttatctcctacttaatcttggcatccccaaagacaagtcttcccaacttcgatattcgaagcgatagaagcaaacgacgtcacctaattcgacccagcccaatctgtttcttgcatctcacataaacagagttgatacataccaagcaagaaaatgtgggaggtcgatcccgaaacgaggtctaagctcctcgcgatccaaaagacgaacaacaataacaattgctgcgactgcaacgcgccgagcccacaatgggcatccccgaagttcggcgtcttcatctgcctgtcatgcgcgggcgtgcaccgcggactgggcgtacacatctcgttcgtgcgatcagtgacgatggacgcgttcaaagccgcggagatcgagcgcatgcggctgggcggcaataaagggtggagggagttcttcgaggagcacgaggacacgaagatgaggggtctcagctgggacgatgccacgatcgctgagagatatagtggggaggcgggtgaggagtggaaagagaggcttagtgcgaaggttgaggggagggagtatgtacccggtgagaggaggagtagtagtacgccgaaacctgcacaggcggtcgccgccaaacctccgcctgctatggggggccagaaacagatcagtaggtccgggacgccgttgagtgggagtaaacggaatgagagtcctggggctgccgccgccgcgatgggtggctcgaaggccaaggttgatgataagtattttgctcgcctgggcgaggagaatgcgtcgagacctgatgggttgccgccgagtcagggtgggaagtatggagggtttgggaatacgccgggcccgtcttcgggtggtgccggtggtggcagcgtgccggatttcgcggagctgcagaaggatcctgttgcggcgcttacgaaggggtttgggtggttcactacgacggtcacgaagacggcgaaggggtttaatgatgattttattcagcctactgctaagcagctctcggaatccgactttgcggctcaagcccgatttgcagctggaaacgtaggcagagcggcgcaagcaggggctatgacggcacaagagcgattcaacaaattcgtcgagggagacgaggttggtgctggtggtgctagacagcgacaggcaccgcttgacgagacgaagaaagacttctgggacgatttctcgtcacttgctgatcagagacacggtaccggtcagaagtacagttctatcggtacttcggccatgggaaaggcaccgaataaaggacctgcgaagaaagaggatgatcaatgggacgactggtagaatatagatgcagaaaatatgtcctatatgtgcggtacggtgcctggtggaaggtgggagtagacgatatatctgcatgatttgggatacaggcctcgttatacatggtgtagtctgcctgataatatatactgtagctgctctttgattacatggagtttaggtagcgttgtggtggtgggatcaaatatagatcttcagcaagtacatgataaacatcgaggctccgagaaaatgtattttgtcgtgtgatctctcggttttggcggatatgttgaagatttgaattcgctcgttataattcctccctatgatgtcccgacgcaagcaacgacaagcgaattgctg

SEQ ID NO: 11152 - DNA, 1035 bp, Muscodor strobelii
  misc_feature: SGI cDNA ID NO. 563571
  misc_feature: Reduced expression when VOC is produced
  misc_feature: Encodes the peptide sequence at SEQ ID NO 11153
atggccagcgctgtcgagaaagttacccaggttgccgaacaggctgtcaccgacgttaccaacgctctgaacaacacgtcgcttactgacaacaaggacgagaacaaggatgccgtccatgccagtgctgccgagggccgccgcctgtacatcggcaacctcgcctacgcgacgaccgagggggagttgaaagaattcttcaagggctatcttgtcgagtccgtctctatccccaagaacccccgcaccgaccgccctgtcggctacgcctttgtcgacctatccacccccaccgaggctgagcgagccatccaggagctttctggcaaggagatcatcgagcgtaaggtctcggtccaacttgcccgaactccccagcctgctggcgagaaggccgagggtcactctggtggcgagggcaacgagacttctcgtcgccgagccagtggtcgtggccgcggacgaggccgtggacgtggtggccgcaccggacgtggtggacgctctgatgccggcgccgacgagaccgctgagaagaccgacgctgtgcctgaaaccactgaggttctacctttgactgacattaccaacaaggtcgatactgacgcgtctgagaagagcaagaagggtcctgctcgtgagcgccgtgagcgtggacctcccgctgatggcattccctccaagaacaaggtcatggtcgccaacctcccctatgacctgactgaggagactctcaaggagctcttcgctgcttacgagccatcttctgccaagatcgctctccgacccatcccccgcttcatgatcaagaagctccaggctcgtggtgaggctcgcaagggccgtggcttcggcttcgtcacccttgcctccgaggagctgcaacagaaggctgtccaggaaatgaacggcaaggagattgagggccgtgagatcgctgtcaaggtcgccattgacagccccgacaagaccgacgaggaggctaacatccccgcggaggccgaggccaacggtcaggaggctgttgccgcctag

SEQ ID NO: 11153 - protein, 344 aa, Muscodor strobelii
  misc_feature: SGI Peptide ID NO. 563571
  misc_feature (49)..(119): Pfam Id: PF00076 Pfam Desc: RNA recognition motif. (a.k.a. RRM, RBD, or RNP domain)
  misc_feature (231)..(314): Pfam Id: PF00076 Pfam Desc: RNA recognition motif. (a.k.a. RRM, RBD, or RNP domain)
  misc_feature (280)..(314): Pfam Id: PF00076 Pfam Desc: RNA recognition motif. (a.k.a. RRM, RBD, or RNP domain)
  misc_feature (231)..(254): Pfam Id: PF00076 Pfam Desc: RNA recognition motif. (a.k.a. RRM, RBD, or RNP domain)
  misc_feature (1)..(338): NCBI GI: 85105528 Blast Desc: NCU07735 [Neurospora crassa OR74A] gi|28923574|gb|EAA32749.1| conserved [Neurospora crassa OR74A]
  misc_feature (15)..(327): NCBI GI: 46136081 Blast Desc: FG09556.1 [Gibberella zeae PH-1]
  misc_feature (15)..(340): NCBI GI: 256727581 Blast Desc: NECHADRAFT_58293 [Nectria haematococca mpVI 77-13-4]
  misc_feature (1)..(327): NCBI GI: 156060903 Blast Desc: SS1G_02594 [Sclerotinia sclerotiorum 1980] gi|154699998|gb|EDN99736.1| SS1G_02594 [Sclerotinia sclerotiorum 1980]
  misc_feature (20)..(334): NCBI GI: 171690824 Blast Desc: protein product [Podospora anserina] gi|170945360|emb|CAP71472.1| protein product [Podospora anserina]
  misc_feature (1)..(329): NCBI GI: 154322082 Blast Desc: BC1G_01188 [Botryotinia fuckeliana B05.10] gi|150850435|gb|EDN25628.1| BC1G_01188 [Botryotinia fuckeliana B05.10]
  misc_feature (1)..(340): NCBI GI: 145613295 Blast Desc: MGG_01746 [Magnaporthe grisea 70-15] gi|145020404|gb|EDK04533.1| MGG_01746 [Magnaporthe grisea 70-15]
  misc_feature (45)..(332): NCBI GI: 238494464 Blast Desc: RNP domain protein [Aspergillus flavus NRRL3357] gi|220695118|gb|EED51461.1| RNP domain protein [Aspergillus flavus NRRL3357]
  misc_feature (1)..(326): NCBI GI: 189206544 Blast Desc: RNP domain containing protein [Pyrenophora tritici-repentis Pt-1C-BFP] gi|187975699|gb|EDU42325.1| RNP domain containing protein [Pyrenophora tritici-repentis
  misc_feature (45)..(326): NCBI GI: 145253507 Blast Desc: An17g00370 [Aspergillus niger] gi|134083833|emb|CAK97397.1| protein product [Aspergillus niger]
  misc_feature: Useful for introducing or modulating the production of volatile compounds
MASAVEKVTQVAEQAVTDVTNALNNTSLTDNKDENKDAVHASAAEGRRLYIGNLAYATTEGELKEFFKGYLVESVSIPKNPRTDRPVGYAFVDLSTPTEAERAIQELSGKEIIERKVSVQLARTPQPAGEKAEGHSGGEGNETSRRRASGRGRGRGRGRGGRTGRGGRSDAGADETAEKTDAVPETTEVLPLTDITNKVDTDASEKSKKGPARERRERGPPADGIPSKNKVMVANLPYDLTEETLKELFAAYEPSSAKIALRPIPRFMIKKLQARGEARKGRGFGFVTLASEELQQKAVQEMNGKEIEGREIAVKVAIDSPDKTDEEANIPAEAEANGQEAVAA

SEQ ID NO: 11154 - DNA, 1851 bp, Muscodor strobelii
  misc_feature: SGI EST ID NO. CUFF.27271.1
  misc_feature: Variant of the nucleotide sequence at SEQ ID NO 11152
ttctccccttcacacctctcaatccacatcaacctcaagctcgacttgtgtcaaacccaccagccaagacctttcccccagatctctagggcacgtagccaccctattcctcccccgacctcaacgcaactgttcgcgcgttcaatatctctgaaccgttccaacgtctcaacgtccgcacgcactcacctcaaccacctgacatcacacctagtcccagtacttctctcactcaccagtcaacagtcaaccgtcatcatggccagcgctgtcgagaaagttacccaggttgccgaacaggctgtcaccgacgttaccaacgctctgaacaacacgtcgcttactgacaacaaggacgagaacaaggatgccgtccatgccagtgctgccgagggccgccgcctgtacatcggcaacctcgcctacgcgacgaccgagggggagttgaaagaattcttcaagggctatcttgtcgagtccgtctctatccccaagaacccccgcaccgaccgccctgtcggctacgcctttgtcgacctatccacccccaccgaggctgagcgagccatccaggagctttctggcaaggagatcatcgagcgtaaggtctcggtccaacttgcccgaactccccagcctgctggcgagaaggccgagggtcactctggtggcgagggcaacgagacttctcgtcgccgagccagtggtcgtggccgcggacgaggccgtggacgtggtggccgcaccggacgtggtggacgctctgatgccggcgccgacgagaccgctgagaagaccgacgctgtgcctgaaaccactgaggttctacctttgactgacattaccaacaaggtcgatactgacgcgtctgagaagagcaagaagggtcctgctcgtgagcgccgtgagcgtggacctcccgctgatggcattccctccaagaacaaggtcatggtcgccaacctcccctatgacctgactgaggagactctcaaggagctcttcgctgcttacgagccatcttctgccaagatcgctctccgacccatcccccgcttcatgatcaagaagctccaggctcgtggtgaggctcgcaagggccgtggcttcggcttcgtcacccttgcctccgaggagctgcaacagaaggctgtccaggaaatgaacggcaaggagattgagggccgtgagatcgctgtcaaggtcgccattgacagccccgacaagaccgacgaggaggctaacatccccgcggaggccgaggccaacggtcaggaggctgttgccgcctagactggccaactggaaatctctcgactgcacatatcgccgctcgcccgtcaagaagtacagctagattagcattttcacccacctacggccagtagtcttgtggaatctgccatgtgcgcccgtcgagaagcagtaacgaaggaacggacctgtcttttttgattttatgatagatacgagacccacaaagcagtagttgatagggtttccgatattgggaccagagcgaagggggttacgaacgagttatgctgcggcatctatcagaaacaggtctgggccatgatgctttagcttctagcattcatataatcctctccatgagtgaatttctcagtctctttgcgcattcttgtcgggttgtacactactactagatggacgcttgatggcgttacaccgggactgggaaaagcacttaaggggcaatagagaaataagcaattgacttttggcacgtatggggccttgcgttcaaggcgtgatcatcctgttatcgcgaagtgtagtgtgatgctttgtatctttcatctcaatacccttgtggtctgatatcag

SEQ ID NO: 11155 - DNA, 2199 bp, Muscodor strobelii
  misc_feature: SGI cDNA ID NO. 563572
  misc_feature: Encodes the peptide sequence at SEQ ID NO 11156
atggcccttgagcaggataaatcagatacctccccaggtccctcgcgcaatgagaaaggcgtagatctaggtgaccgacggatgctcatcctctatggctccgagtctgggaatagcgaggaagcggctcaagacattgaagatcttgcgaggaggctgcattttgacactcgcctcgaggagatgaatgacgttgaactgaacgatctgctgcagtattctctagttgtcttcgtcatttccaccaccgggcaaggtgagctgccgaaaaacgctcgcgttttctgggcaggtcagaagggacggaaaggacaaaaacgacggaaagggctgctttccagcagtctccctcccaattgcctcaaccaagtcaggttcaccagcttcgggctcggcgacagttcttacacccaattcaactgggcagccagaaaacttcacaaacgtctagagacacttggcgcagtcgagtttcttacccgtggggaggcagacgagcggcacgaagacggcattgacggcacattcattccttggtgcaactctctacgcacctacttggaaaacacatttccattacccccaagtgtgccacccatcgccagagacacactacttgcaccgaaattcaccttagaactcatgtctttggtttcgtccacggtccgcaaggactacaatgttgacaacaatggacatccgcttgaccgagaagctgctcgattttgccatgttgacaatcctgaaaagacttccgctttattgaaatatcagcatcaagtagagcgccaatcggttttcggaaatcgcattgcagctcgagcttcagagggtactgctttagagattaccggtagtatcgatcgtctcgacagactcaatgttctgaaagactcaccagacaaatattccctcgacgactcgactgcagatccagatgtcgagcaaaccccaaaacccgctgtgcttccgattcccagcatttggcgcgctactgtgttcaagaaccagcgtctcactcccgcgactcactggcaagatgtacgccacttaaccctggaggttcgcaatcaacgacgaccagaggtggatgaagtacaatgcctcaattacctcccaggagacactatttttctattcccgaagaacttcgcccaagacgtggacgctctcattacgctcatgggttggggcgacattgctgacaagccgtttgtgcatttgtgcaaagagaatcgagactccgagcctctgtataaagtacccaacagatgtaatcctctccccaacagtacgttgagacagcttctcacacacaactatgacattacgagcattcctcgtcgatcattattccagcagatccagcacttcaccgataacgaagaccacaaagctcggctcagagagttcggcgaccctggcttttccgatgaattctgggattacacatctcgccctcgacgatccattctcgaagtgcttcaagacttcccgtctgttcggatcccttaccagcaagttcccggtgtctttccgcccattcggggccgggaattcagcatcgcgtcttgttctgcgatgaattcagataacaccttcacgcaggttgagctcgttgtggcgctcgtgaaatacaaaacagtcttgcgcaagacgcgacaaggcttgtgctctagatacattgcatctctacccattggcaccaagattggaatcctacactcgatgcaacacatgcccaggcacttctttcagaatgatgggccccttctactaatcgctacgggtacgggcatcgcacccattaaatctctcatcgaggaacgtgcgatgagtttcgaccataacgagagggccccaaacatcgtcttgttctatggtggacggaacaaaaacgccgatttctattttgatgaagtgtgggaacaggctagaatcaaagtcatcacagccttctcgcgcgatcaacccaagaagatctatgtacaggatcggattcttgaacatcacgagttggtctacgaatacctcgccaatggtgcatcgatttgcatctgtggtagcgcaggagaaatgcccaaagccgtgaagactgctctttacaaaatagcagtcagggaagagctttgtgagcctgatcccgcttctgtagaagcctgggtacgaagcagacagatttgggaggagtgctggtga

SEQ ID NO: 11156 - protein, 732 aa, Muscodor strobelii
  misc_feature: SGI Peptide ID NO. 563572
  misc_feature (325)..(561): Pfam Id: PF00667 Pfam Desc: FAD binding domain
  misc_feature (30)..(179): Pfam Id: PF00258 Pfam Desc: Flavodoxin
  misc_feature (592)..(699): Pfam Id: PF00175 Pfam Desc: Oxidoreductase NAD-binding domain
  misc_feature (330)..(561): Pfam Id: PF00667 Pfam Desc: FAD binding domain
  misc_feature (28)..(732): NCBI GI: 171690822 Blast Desc: protein product [Podospora anserina] gi|170945359|emb|CAP71471.1| protein product [Podospora anserina]
  misc_feature (25)..(732): NCBI GI: 156060907 Blast Desc: SS1G_02596 [Sclerotinia sclerotiorum 1980] gi|154700000|gb|EDN99738.1| SS1G_02596 [Sclerotinia sclerotiorum 1980]
  misc_feature (26)..(701): NCBI GI: 239607594 Blast Desc: NADPH-dependent FMN/FAD containing oxidoreductase [Ajellomyces dermatitidis ER-3]
  misc_feature (26)..(701): NCBI GI: 261197628 Blast Desc: NADPH-dependent FMN/FAD containing oxidoreductase [Ajellomyces dermatitidis SLH14081] gi|239595179|gb|EEQ77760.1| NADPH-dependent FMN/FAD containing oxidoreductase [Ajellomyces
  misc_feature (26)..(732): NCBI GI: 116195840 Blast Desc: CHGG_04518 [Chaetomium globosum CBS 148.51] gi|88180431|gb|EAQ87899.1| CHGG_04518 [Chaetomium globosum CBS 148.51]
  misc_feature (26)..(701): NCBI GI: 258571960 Blast Desc: conserved [Uncinocarpus reesii 1704] gi|237905053|gb|EEP79454.1| conserved [Uncinocarpus reesii 1704]
  misc_feature (49)..(732): NCBI GI: 85112907 Blast Desc: NCU09727 [Neurospora crassa OR74A] gi|28926211|gb|EAA35193.1| [Neurospora crassa OR74A]
  misc_feature (319)..(701): NCBI GI: 212530550 Blast Desc: NADPH-dependent FMN/FAD containing oxidoreductase, [Penicillium marneffei ATCC 18224] gi|210074830|gb|EEA28917.1| NADPH-dependent FMN/FAD containing oxidoreductase, [Penicillium
  misc_feature (300)..(702): NCBI GI: 256727002 Blast Desc: [Nectria haematococca mpVI 77-13-4]
  misc_feature (324)..(701): NCBI GI: 169777261 Blast Desc: [Aspergillus oryzae RIB40] gi|83771833|dbj|BAE61963.1| protein product [Aspergillus oryzae]
  misc_feature (331)..(704): SWISSPROT Homolog: EC 1.6.2.4 NADPH--hemoprotein reductase
MALEQDKSDTSPGPSRNEKGVDLGDRRMLILYGSESGNSEEAAQDIEDLARRLHFDTRLEEMNDVELNDLLQYSLVVFVISTTGQGELPKNARVFWAGQKGRKGQKRRKGLLSSSLPPNCLNQVRFTSFGLGDSSYTQFNWAARKLHKRLETLGAVEFLTRGEADERHEDGIDGTFIPWCNSLRTYLENTFPLPPSVPPIARDTLLAPKFTLELMSLVSSTVRKDYNVDNNGHPLDREAARFCHVDNPEKTSALLKYQHQVERQSVFGNRIAARASEGTALEITGSIDRLDRLNVLKDSPDKYSLDDSTADPDVEQTPKPAVLPIPSIWRATVFKNQRLTPATHWQDVRHLTLEVRNQRRPEVDEVQCLNYLPGDTIFLFPKNFAQDVDALITLMGWGDIADKPFVHLCKENRDSEPLYKVPNRCNPLPNSTLRQLLTHNYDITSIPRRSLFQQIQHFTDNEDHKARLREFGDPGFSDEFWDYTSRPRRSILEVLQDFPSVRIPYQQVPGVFPPIRGREFSIASCSAMNSDNTFTQVELVVALVKYKTVLRKTRQGLCSRYIASLPIGTKIGILHSMQHMPRHFFQNDGPLLLIATGTGIAPIKSLIEERAMSFDHNERAPNIVLFYGGRNKNADFYFDEVWEQARIKVITAFSRDQPKKIYVQDRILEHHELVYEYLANGASICICGSAGEMPKAVKTALYKIAVREELCEPDPASVEAWVRSRQIWEECW

SEQ ID NO: 11157 - DNA, 1057 bp, Muscodor strobelii
  misc_feature: SGI EST ID NO. CUFF.26473.0
  misc_feature: Variant of the nucleotide sequence at SEQ ID NO 11155
cccaacctaagtcagatgtactaattaagcaccgatggacgggcgctagtatactcagacaccatgacgtgaacttttttagagccaggccagttttaaggtataatgtcctagaaaggcaaagaagagatccagaacatggtgaaatatgtaatgctctgctactgtttcaaattacagaaacaagagggaaatcctgtcattcactgggccgattcaaggcttgtagccccgcctcgccgaagactttgatgtggtggccgaacatggcccttgagcaggataaatcagatacctccccaggtccctcgcgcaatgagaaaggcgtagatctaggtgaccgacggatgctcatcctctatggctccgagtctgggaatagcgaggaagcggctcaagacattgaagatcttgcgaggaggctgcattttgacactcgcctcgaggagatgaatgacgttgaactgaacgatctgctgcagtattctctagttgtcttcgtcatttccaccaccgggcaaggtgagctgccgaaaaacgctcgcgttttctgggcaggtcagaagggacggaaaggacaaaaacgacggaaagggctgctttccagcagtctccctcccaattgcctcaaccaagtcaggttcaccagcttcgggctcggcgacagttcttacacccaattcaactgggcagccagaaaacttcacaaacgtctagagacacttggcgcagtcgagtttcttacccgtggggaggcagacgagcggcacgaagacggcattgacggcacattcattccttggtgcaactctctacgcacctacttggaaaacacatttccattacccccaagtgtgccacccatcgccagagacacactacttgcaccgaaattcaccttagaactcatgtctttggtttcgtccacggtccgcaaggactacaatgttgacaacaatggacatccgcttgaccgagaagctgctcgattttgccatgttgacaatcctgaaaagacttccgctttattgaaatatcagcatcaagtagagcgcca

SEQ ID NO: 11158 - DNA, 846 bp, Muscodor strobelii
  misc_feature: SGI cDNA ID NO. 563573
  misc_feature: Encodes the peptide sequence at SEQ ID NO 11159
atggcgcggttcttcgcaagtaaaatgcgaccagcccctcaacctcaacaatctcggaacaatcaattgtctgattccaatggagcaaaatcgcggacgtgcgttggctgtcaactacgccagcccaccagcaattttaatgcttaccagtatggtttatccatgaaatgcaaagattgcctagcaaatcaacaggctcttcgagaaaagaagaaacgagagacaagagaagcgaaagcgaagagaaaatcttacgatttccaatactatcacgccaatccctccccgcagccgtcggtcgcatctagctccaagactctgatgatatcagattcgcacccgcaagaacatcgtacttacgagcccaacattacgaaggccgtagaagctctcgcttcgcacctacttacaggcactccatgctccagctttacgttgaccgccgactcggctccagatgcgacgacaaacaatacgctcgtagatttgccgatcgactggaactcaatcctagacgtgacgccctgctggaccacaattccagacgattctgaggtgacgaaaggacctcgggagatgatagtctacctcaaaaaccaagacttctgcatcaacgagggagaatccgagtggccgcttctcatcaaattcttcaccgagacagaaaaggaggccgagaaggtgaaatcagccggatatataatgggagtgatcatggcgcttcgaaatgtcccagattatgctgacagaagtattgatgttgtggatacggaaagcttgttataccctctcactctcaaggtcggagagaaaggtactcatattgagtttgattttggtcattag

SEQ ID NO: 11159 - protein, 281 aa, Muscodor strobelii
  misc_feature: SGI Peptide ID NO. 563573
MARFFASKMRPAPQPQQSRNNQLSDSNGAKSRTCVGCQLRQPTSNFNAYQYGLSMKCKDCLANQQALREKKKRETREAKAKRKSYDFQYYHANPSPQPSVASSSKTLMISDSHPQEHRTYEPNITKAVEALASHLLTGTPCSSFTLTADSAPDATTNNTLVDLPIDWNSILDVTPCWTTIPDDSEVTKGPREMIVYLKNQDFCINEGESEWPLLIKFFTETEKEAEKVKSAGYIMGVIMALRNVPDYADRSIDVVDTESLLYPLTLKVGEKGTHIEFDFGH

SEQ ID NO: 11160 - DNA, 525 bp, Muscodor strobelii
  misc_feature: SGI cDNA ID NO. 563574
  misc_feature: Encodes the peptide sequence at SEQ ID NO 11161
atgatatcagattcgcacccgcaagaacatcgtacttacgagcccaacattacgaaggccgtagaagctctcgcttcgcacctacttacaggcactccatgctccagctttacgttgaccgccgactcggctccagatgcgacgacaaacaatacgctcgtagatttgccgatcgactggaactcaatcctagacgtgacgccctgctggaccacaattccagacgattctgaggtgacgaaaggacctcgggagatgatagtctacctcaaaaaccaagacttctgcatcaacgagggagaatccgagtggccgcttctcatcaaattcttcaccgagacagaaaaggaggccgagaaggtgaaatcagccggatatataatgggagtgatcatggcgcttcgaaatgtcccagattatgctgacagaagtattgatgttgtggatacggaaagcttgttataccctctcactctcaaggtcggagagaaaggtactcatattgagtttgattttggtcattag

SEQ ID NO: 11161 - protein, 174 aa, Muscodor strobelii
  misc_feature: SGI Peptide ID NO. 563574
MISDSHPQEHRTYEPNITKAVEALASHLLTGTPCSSFTLTADSAPDATTNNTLVDLPIDWNSILDVTPCWTTIPDDSEVTKGPREMIVYLKNQDFCINEGESEWPLLIKFFTETEKEAEKVKSAGYIMGVIMALRNVPDYADRSIDVVDTESLLYPLTLKVGEKGTHIEFDFGH

SEQ ID NO: 11162 - DNA, 2514 bp, Muscodor strobelii
  misc_feature: SGI cDNA ID NO. 563575
  misc_feature: Encodes the peptide sequence at SEQ ID NO 11163
atgacaaggcatcgccgctacctcgccgccttcctcgggactcttcttgctccccgttacgtccaagcagctaatgctaccgctttatggctggagccgtccttatcatggtacggaattgatggtaactggtcttcgacaactctattcgtcggcgaaccggctcaagaagttgatgtcctcgtgagcacgagtctctcggaggtatgggttgtgggaaatggaggatgtggcagtgctctctgccaggaagctcgaggaggtgtctataatacaagtgcctcgagtagctggtactcgatgggtctatggcaactaggactgaagtactgtggtattaacgccaatggcgactatggaatggaaacggtcgtggtatacaacagcgtgaagagatggcagacctcattaaacaagttggttgtcgccgctctcaacgacacatccatttatgatggcttctttggactgggcatcatggccggaaacttcaatggtacggttgcccagggaccaattaccaatctggtagaaaaatcaggagtagtgccgagccacagttacgggtacactgctggggcttattatgctggtgaaagaggcgtgcccatgtctctgactttaggtggttatgatgcgaatcgcttcgagccgcacgatgtaactttcagcctgaacagcactgccctgcagcctcagacgctcgtcagagctatcaccgcgtctgtatcagatgccacgaaggccccaactgcgtggtcctcatcatcgaagctcctgtctggattcaacgagtcgataattgctcaaatcgacagctcaacgccatatttatggtttccgcatactgtttgcgatcgtttcgctgaggccctcaacttgacctggaatgaaacgctagagttgtatctattttcgggcactgataatctggaaacatatcgagcggccaatctctcattcgcgtttactctctccagttttgacaacaaggacaactttggctcgcctacaaatatgtcaggtgtaatcaacatcactatctccgcgaacgcgttcattcagagtgtacgatatccgttcaagaacttgatcgaatacggagaaccggcgataccgtatttccccttaaaaagaactaattccagccacgcaatcctagggcgctcgttcttacaagaggcatatatcgtgactaattacgaaacaaatactttctccgtgcaccaagctttattccctgataatcccctgagggacacgtccatccaaacgatcgcgccatctcccgaaagcccttatccaggcaatcctgcgcctcctaagaagcaagctggcatcagtcaggaccaaattgcgggtgttgtggttggaatatgcttgggaagcattgcgcttgtgacgacagcggtcttaattcgtcgaaagagacaccaattcaaaacagtcgaccacgaaacagtggaatacaaagacaaggatccaggatctacgagcgaaccgaattccccaaccagtccaatccttgtggcattcggccgcatgaaaacgatgaaggcaaaagcaaagccgagtcagtgtaagacagggaaaaaggaggcagagcctgtagctcacgaggttggggcggactggagtcatgcccgttatgagatgccggctacaatgcctgtcgaactcgatgcgacggatgcaacaacaggagagcgagcttactttgcaatcccagctggggatgatgagcaggaccaagactgttatgaacgacccaaacaatgggcgcgacttccccaaccagtctcgcctgcctacctccctaaatcacctgatgcaactctccaagtcggccctcttcctcccatagataccagataccggccactcgaaagtagtgacaatccttcgcctacctccggccccacgttggacgggcggcacagcgacaggctaccgtctccaatgactcccaatagtgacgcatcgacttttccgacagactttccatcgcctgttgctggtttcttccctacgagaacgctgtcacgatcttcgtcatccgttcacagcatcatgtatgcgcaaccatcacccggctcgacgagtttaatgcgatctgcctcagccggtacctcgtctagctcacacacgctatctaccgttccgctgccgccgtcaatccagagaacaccaatcgattccacaaatgttgtttgcctcgggccactgccagacaacgtgcgcctaccacaccagctgatgatgcaacggcagactggacctcaaaatcagaattttgggctccctacaattccgtccgcgaatccttccaggcggcattcggcagctgatacgctgggaagcaactatactctagaagaagaggcacgagacggagacagtggagcgacccacgtcgaatcgaatgataacgcgggtagaatgaacggcttcgaaatcgttcacgttccacagatggcgtataagcgtttcagctgggaagaaggaacaacataa

SEQ ID NO: 11163 - protein, 837 aa, Muscodor strobelii
  misc_feature: SGI Peptide ID NO. 563575
  misc_feature (47)..(411): Pfam Id: PF00026 Pfam Desc: Eukaryotic aspartyl protease
  misc_feature (29)..(834): NCBI GI: 116195842 Blast Desc: CHGG_04519 [Chaetomium globosum CBS 148.51] gi|88180432|gb|EAQ87900.1| CHGG_04519 [Chaetomium globosum CBS 148.51]
  misc_feature (39)..(834): NCBI GI: 256727582 Blast Desc: NECHADRAFT_91117 [Nectria haematococca mpVI 77-13-4]
  misc_feature (38)..(836): NCBI GI: 171690834 Blast Desc: protein product [Podospora anserina] gi|170945365|emb|CAP71477.1| protein product [Podospora anserina]
  misc_feature (15)..(834): NCBI GI: 145613291 Blast Desc: MGG_01748 [Magnaporthe grisea 70-15] gi|145020402|gb|EDK04531.1| MGG_01748 [Magnaporthe grisea 70-15]
  misc_feature (31)..(833): NCBI GI: 46136085 Blast Desc: FG09558.1 [Gibberella zeae PH-1]
  misc_feature (29)..(836): NCBI GI: 85112910 Blast Desc: NCU09728 [Neurospora crassa OR74A] gi|28926212|gb|EAA35194.1| [Neurospora crassa OR74A]
  misc_feature (29)..(479): NCBI GI: 238840396 Blast Desc: conserved [Microsporum canis CBS 113480]
  misc_feature (51)..(725): NCBI GI: 258572680 Blast Desc: [Uncinocarpus reesii 1704] gi|237905372|gb|EEP79773.1| [Uncinocarpus reesii 1704]
  misc_feature (145)..(562): NCBI GI: 154309057 Blast Desc: BC1G_07423 [Botryotinia fuckeliana B05.10] gi|150852466|gb|EDN27658.1| BC1G_07423 [Botryotinia fuckeliana B05.10]
  misc_feature (39)..(656): NCBI GI: 169605479 Blast Desc: SNOG_05763 [Phaeosphaeria nodorum SN15] gi|111065707|gb|EAT86827.1| SNOG_05763 [Phaeosphaeria nodorum SN15]
MTRHRRYLAAFLGTLLAPRYVQAANATALWLEPSLSWYGIDGNWSSTTLFVGEPAQEVDVLVSTSLSEVWVVGNGGCGSALCQEARGGVYNTSASSSWYSMGLWQLGLKYCGINANGDYGMETVVVYNSVKRWQTSLNKLVVAALNDTSIYDGFFGLGIMAGNFNGTVAQGPITNLVEKSGVVPSHSYGYTAGAYYAGERGVPMSLTLGGYDANRFEPHDVTFSLNSTALQPQTLVRAITASVSDATKAPTAWSSSSKLLSGFNESIIAQIDSSTPYLWFPHTVCDRFAEALNLTWNETLELYLFSGTDNLETYRAANLSFAFTLSSFDNKDNFGSPTNMSGVINITISANAFIQSVRYPFKNLIEYGEPAIPYFPLKRTNSSHAILGRSFLQEAYIVTNYETNTFSVHQALFPDNPLRDTSIQTIAPSPESPYPGNPAPPKKQAGISQDQIAGVVVGICLGSIALVTTAVLIRRKRHQFKTVDHETVEYKDKDPGSTSEPNSPTSPILVAFGRMKTMKAKAKPSQCKTGKKEAEPVAHEVGADWSHARYEMPATMPVELDATDATTGERAYFAIPAGDDEQDQDCYERPKQWARLPQPVSPAYLPKSPDATLQVGPLPPIDTRYRPLESSDNPSPTSGPTLDGRHSDRLPSPMTPNSDASTFPTDFPSPVAGFFPTRTLSRSSSSVHSIMYAQPSPGSTSLMRSASAGTSSSSHTLSTVPLPPSIQRTPIDSTNVVCLGPLPDNVRLPHQLMMQRQTGPQNQNFGLPTIPSANPSRRHSAADTLGSNYTLEEEARDGDSGATHVESNDNAGRMNGFEIVHVPQMAYKRFSWEEGTT

SEQ ID NO: 11164 - DNA, 4245 bp, Muscodor strobelii
  misc_feature: SGI EST ID NO. CUFF.26627.0
  misc_feature: Variant of the nucleotide sequence at SEQ ID NO 11162
gcgaggcgtccaggtcaagactggactcaagaggtcaaaggaacgagtactccgtactctgcaaggtacatgcaagaccacgcgcactacattcagagtccagaccctagcttctcatctgctacactacacgcgcaagcaattgaggagacagaacacgacgccaacccgtttcgagcctcttctctgacctcattcagagctcattgtcgagcgtctctacttgtcttttatgcgctaaccagcccagccctcccaccacctaccttgttggtatgccatgaaattcttgaatctgcacctgtatcaagtagcattaagcgaatgtacacctcttcgacaggccacaagtgtcgtctgcaatgtcgtcgggccttaacgtttccgagtcttcatctaagctgggtggccattcagcttgagatatccgtgaaatgtcagtcctacaggaatgggagacctcatcagcttcattaaactcaatttgacttcttgcaacgcgtagtcagaatttagtcgacgggcttcgcatggtattcaaatcactgaaggctagtacctgtcaagtctgtaaaatgcgaagcagggattggtaggggcccggagatctcatgcccgctactgaagcgtggggcggcctgccacaatgccaagttgcctatccctgttccttgtaccgacctaaacggaacagccgacttacagatacatgggagcccctcgagagaagactgacccccaggagatcctcttggagagccgtaatgtgtctttggggttgttgaatttgttgaattcacactatctctcaccttgatcttcctccccgatctcataaagcatcaaatacacacaacgagcagaaaacgccattgcctggagcagagtactggagatattggaaacacgtaatcgcagtattcaacagagaatcgcgggcgactatagtacgaccggaccgcgttgattaattttggggagtagatggatattgttttgatgacaggaaaccgaagaaccccatgaagaatcagaagagccagtggtagcctcgggttcgtgtacggccgttaggtggtgcaacaaccgcgagacaatgacaaggcatcgccgctacctcgccgccttcctcgggactcttcttgctccccgttacgtccaagcagctaatgctaccgctttatggctggagccgtccttatcatggtacggaattgatggtaactggtcttcgacaactctattcgtcggcgaaccggctcaagaagttgatgtcctcgtgagcacgagtctctcggaggtatgggttgtgggaaatggaggatgtggcagtgctctctgccaggaagctcgaggaggtgtctataatacaagtgcctcgagtagctggtactcgatgggtctatggcaactaggactgaagtactgtggtattaacgccaatggcgactatggaatggaaacggtcgtggtatacaacagcgtgaagagatggcagacctcattaaacaagttggttgtcgccgctctcaacgacacatccatttatgatggcttctttggactgggcatcatggccggaaacttcaatggtacggttgcccagggaccaattaccaatctggtagaaaaatcaggagtagtgccgagccacagttacgggtacactgctggggcttattatgctggtgaaagaggcgtgcccatgtctctgactttaggtggttatgatgcgaatcgcttcgagccgcacgatgtaactttcagcctgaacagcactgccctgcagcctcagacgctcgtcagagctatcaccgcgtctgtatcagatgccacgaaggccccaactgcgtggtcctcatcatcgaagctcctgtctggattcaacgagtcgataattgctcaaatcgacagctcaacgccatatttatggtttccgcatactgtttgcgatcgtttcgctgaggccctcaacttgacctggaatgaaacgctagagttgtatctattttcgggcactgataatctggaaacatatcgagcggccaatctctcattcgcgtttactctctccagttttgacaacaaggacaactttggctcgcctacaaatatgtcaggtgtaatcaacatcactatctccgcgaacgcgttcattcagagtgtacgatatccgttcaagaacttgatcgaatacggagaaccggcgataccgtatttccccttaaaaagaactaattccagccacgcaatcctagggcgctcgttcttacaagaggcatatatcgtgactaattacgaaacaaatactttctccgtgcaccaagctttattccctgataatcccctgagggacacgtccatccaaacgatcgcgccatctcccgaaagcccttatccaggcaatcctgcgcctcctaagaagcaagctggcatcagtcaggaccaaattgcgggtgttgtggttggaatatgcttgggaagcattgcgcttgtgacgacagcggtcttaattcgtcgaaagagacaccaattcaaaacagtcgaccacgaaacagtggaatacaaagacaaggatccaggatctacgagcgaaccgaattccccaaccagtccaatccttgtggcattcggccgcatgaaaacgatgaaggcaaaagcaaagccgagtcagtgtaagacagggaaaaaggaggcagagcctgtagctcacgaggttggggcggactggagtcatgcccgttatgagatgccggctacaatgcctgtcgaactcgatgcgacggatgcaacaacaggagagcgagcttactttgcaatcccagctggggatgatgagcaggaccaagactgttatgaacgacccaaacaatgggcgcgacttccccaaccagtctcgcctgcctacctccctaaatcacctgatgcaactctccaagtcggccctcttcctcccatagataccagataccggccactcgaaagtagtgacaatccttcgcctacctccggccccacgttggacgggcggcacagcgacaggctaccgtctccaatgactcccaatagtgacgcatcgacttttccgacagactttccatcgcctgttgctggtttcttccctacgagaacgctgtcacgatcttcgtcatccgttcacagcatcatgtatgcgcaaccatcacccggctcgacgagtttaatgcgatctgcctcagccggtacctcgtctagctcacacacgctatctaccgttccgctgccgccgtcaatccagagaacaccaatcgattccacaaatgttgtttgcctcgggccactgccagacaacgtgcgcctaccacaccagctgatgatgcaacggcagactggacctcaaaatcagaattttgggctccctacaattccgtccgcgaatccttccaggcggcattcggcagctgatacgctgggaagcaactatactctagaagaagaggcacgagacggagacagtggagcgacccacgtcgaatcgaatgataacgcgggtagaatgaacggcttcgaaatcgttcacgttccacagatggcgtataagcgtttcagctgggaagaaggaacaacataaggagacgcattactccatgataacgtccggataatctctgcacgccagacggcccttttacttcgcaatctctaatcacaaccgccagacgcatctcatcactttatttgaattttccgaatttactttgtcatctttccatacccacgtatatataccttagggcacctatatatctttatacctacaccagcgacggagttcagggaaatggggctatatcatttattttaatcagtttaacatgagggaactcacacggtggtccagaggggcgggctggacagtgagggcagcgcatgatctggggcgcaacagcatagagacggatcaggatcatctcatggcgatatgctggatgagaaattgatggatgacaagatcttctaggatctttaggcctgtgggatatggtcaggtaatcccaaggcaaagggaatcatatggacaacacattgggagtcaaatcagatatgatgccatgacgaagacggttggctagcccaggcgagggcacgcatgtcgtagcaccctcagcgtaacgactgtggttgtgtcagccagccattcgtggcccctactgttgtatataggatatactgcaaatacaaataaatacgtacagttaactggtt

SEQ ID NO: 11165 - DNA, 3363 bp, Muscodor strobelii
  misc_feature: SGI cDNA ID NO. 563576
  misc_feature: Encodes the peptide sequence at SEQ ID NO 11166
atgtcgcccatgtcgcccctgtctgcccgcgagctcgacgcgtccagcccgcccagtccccgaaccgacgctgttgacccggaattcctcgacgaacgcctgcgcagactgaatatccgcgataactctcctactggttgtgcccaacctgcgggctatcggatatctgagtatgaaaatgcattgacgccctcagctcctcgacaggctcttggcttccaggtcatcaaacgccccgacggccaagccactcgtgtgaacctcgatgactttcccaatgaaattctaactcatgtactgtcccatctgcaccccgactcccacgcttccgtggccctggtgtccaagagattctatgctttgatcacgactcctcatgcctggcgcatggccttccagcgcttctttcctgcccaggacgctctcgccaccgcggcaaaggcaccaggagggtccgcatgggacgccgatgacgatgacactgtccgctccgaagtgcgggtcttcaataggctgactccacacgcctcttggcgcagcgaatacctgctgcgaacccgtctgctccgcagtctttctagaggaaagccaggtgcgagctcgggaggggtcggcacctcgtcgcgcgctaacgcctcgggcaagaaggccaccgctgtcttgacctacaacaccaagctgccctcgcgcgtgacccacctccatgccaccttcaagcccaatggcaagcgcccgccccgcgtcctccacggcgccgctgattttggagtcggcagcgcgagtgatcccaccggaggcaaggtagagaaatggggtcttgacgaccctttcgcttttctccagctcgatgaggtctcgcccctcctgatcccctatgggcttggagacgggcctgcggcggggcccaatgtcatggatgtaagccagccctatggtctcatcggaggtgaaggattccccggaggccgtgtcttcttccgagccaccggggaatacagaggcaaatacttgggtcaagaggtcagccttgtggaggcgcatccagatattcccaagatcccggagctccttgaaggtgtgagttcactatggatagccaagtcttcatccgtccccactgcaacccagtctctagttggaattatgactggttcaacgcttggtgtagtcacggcgtatgcacttggttatgatcccaatggaccacgatatcatcctggcgatatcagtgcccgctggattctaagtcccggtgtgcctatcattgccctcaaggtcgacgataactacagccaaaagcggaaagccttgaatcgagtatgggcggtcgccctgaacgccttgggtgaagtgttttatctgacgcagcctcccaaccctcctgccagcaagaccaaagcagatgatagtgcgaagctcgcttggcatgttgggcgcactacctactggcaccttgtggaagcgactcgtcgccaagcacgtccagacgagcttgacaggaatgccattcgaggtgcatattctcccaggtctccttctaatgccatgaacttgacgaaggaacaaatgattgcggaagctcgagagattgagaaattcctccgatacaagcctcagcacttccgtaaggtgtgttatggctgggacatgcgtcggaagttggaggtcgattttgctggcgatgacgaggccggtgccggagaaagcttcttcgtcattgactgtgctcttgaagacgaccaaacatgggcattgaagcggttcactcgagccactgttggccagtcactgccgggtatcagtcctttgccagttcctgaaacaaggacggaacccgaactacctcaatccatattcggaggcagtagtgccagatcaacctctccgaactcgtccagctctcccttgctgaagcaggtgttgtcaccattggctaagcaaagtgcgtcgactaccaatgctatccatctgggactcgatgagtggatggagaccaaattctcctccaaggaaatcggcaatacgatgattactgcaagtgctgtagatacctcgctcatggctttagttgcatgcttcgaggaccctttgaaagaatcgtctagtctccctgctgatgggcccgcaacgccatcagggcaggaacctacggatgttcctggacgtagagcacggatgattggacttggaactagcagcgggaagatcgttctatggaatatgcgagctggccacacggctgggcaaactggggatggaatttctcctattcgcgtcattgaaacagaatctcccgaggtatcatgtctcgcattgtcagctctatatcttgttcatggaggtagtgatggacttgtgcaggcttgggaccccttggcttctacactggatccagtccgtaccttgaattctcggcctggaagagtgcctcgccatgtacttgctttgaatcctactcttgttgatgctgatttctccactgttggagcgatctatctggatccggacccgactgtccttcatggagtagttgcgtttggcacaaatgttcgctactgggcgtacagctcctcaaatcaggctacagggcgcaagagaagactacgacattccgatattcatggtcgcctcagtggtcggcgccatggtggtggagtcaaaggttatatcgctgccgaagcagaagagcttcgtgctgagcaacgtcacaaagcaagagagcaagctcgcctaaaagctcgctttgggctgggtcttagcaatatgaccgaagaagaagctcttcagtatgcagagttaatgtcacaggagtccttcttggccgaggagcagcgccgtgccagtgctagcgacaccggctcagcctgggatttcgatacaacctctaccaccggcagcatggacactattacccccgatcctagtgtcaccgatatgagtccccagacggggaatactagtgctgttcatgagacaatggatgagagcgaatatgaactccaaatccagacagccattcgattatccctcttagagggtgtcaacgatctgggtcggtcgcccaaaggcaacagttcaggagagtttgatgggcctatcctggtgaaggagagaaagggcaagcgatcatcgtcaagctcgccatcttcaagtcacactcctatgatcaagcgaactgaatcatccatgtctaatgtcgggagctctgccgtcgctgatgatgatcttgaacttgctctgcagctgagtcttgccgaagaggagagcagaaaggccgccatgcagatcaacaccagtgaggatgagttccctccgcttcatagtgatgggtggggcaagggaaagggaaaagctagacattga

SEQ ID NO: 11166 - protein, 1120 aa, Muscodor strobelii
  misc_feature: SGI Peptide ID NO. 563576
  misc_feature (86)..(133): Pfam Id: PF00646 Pfam Desc: F-box domain
  misc_feature (23)..(1115): NCBI GI: 261352192 Blast Desc: F-box and WD domain-containing protein [Verticillium albo-atrum VaMs.102]
  misc_feature (15)..(1119): NCBI GI: 256727583 Blast Desc: NECHADRAFT_99272 [Nectria haematococca mpVI 77-13-4]
  misc_feature (13)..(1115): NCBI GI: 46136087 Blast Desc: FG09559.1 [Gibberella zeae PH-1]
  misc_feature (5)..(1012): NCBI GI: 171690848 Blast Desc: protein product [Podospora anserina] gi|170945372|emb|CAP71484.1| protein product [Podospora anserina]
  misc_feature (26)..(1115): NCBI GI: 85108935 Blast Desc: NCU07996 [Neurospora crassa OR74A] gi|28924277|gb|EAA33430.1| [Neurospora crassa OR74A]
  misc_feature (49)..(1093): NCBI GI: 154309051 Blast Desc: BC1G_07420 [Botryotinia fuckeliana B05.10] gi|150852463|gb|EDN27655.1| BC1G_07420 [Botryotinia fuckeliana B05.10]
  misc_feature (72)..(1118): NCBI GI: 156049757 Blast Desc: SS1G_08585 [Sclerotinia sclerotiorum 1980] gi|154692984|gb|EDN92722.1| SS1G_08585 [Sclerotinia sclerotiorum 1980]
  misc_feature (205)..(1115): NCBI GI: 116195848 Blast Desc: CHGG_04522 [Chaetomium globosum CBS 148.51] gi|88180435|gb|EAQ87903.1| CHGG_04522 [Chaetomium globosum CBS 148.51]
  misc_feature (50)..(1117): NCBI GI: 169611616 Blast Desc: SNOG_08923 [Phaeosphaeria nodorum SN15] gi|160702330|gb|EAT84091.2| SNOG_08923 [Phaeosphaeria nodorum SN15]
  misc_feature (31)..(1118): NCBI GI: 119472003 Blast Desc: F-box and WD domain protein [Neosartorya fischeri NRRL 181] gi|119406409|gb|EAW16360.1| F-box and WD domain protein [Neosartorya fischeri NRRL 181]
MSPMSPLSARELDASSPPSPRTDAVDPEFLDERLRRLNIRDNSPTGCAQPAGYRISEYENALTPSAPRQALGFQVIKRPDGQATRVNLDDFPNEILTHVLSHLHPDSHASVALVSKRFYALITTPHAWRMAFQRFFPAQDALATAAKAPGGSAWDADDDDTVRSEVRVFNRLTPHASWRSEYLLRTRLLRSLSRGKPGASSGGVGTSSRANASGKKATAVLTYNTKLPSRVTHLHATFKPNGKRPPRVLHGAADFGVGSASDPTGGKVEKWGLDDPFAFLQLDEVSPLLIPYGLGDGPAAGPNVMDVSQPYGLIGGEGFPGGRVFFRATGEYRGKYLGQEVSLVEAHPDIPKIPELLEGVSSLWIAKSSSVPTATQSLVGIMTGSTLGVVTAYALGYDPNGPRYHPGDISARWILSPGVPIIALKVDDNYSQKRKALNRVWAVALNALGEVFYLTQPPNPPASKTKADDSAKLAWHVGRTTYWHLVEATRRQARPDELDRNAIRGAYSPRSPSNAMNLTKEQMIAEAREIEKFLRYKPQHFRKVCYGWDMRRKLEVDFAGDDEAGAGESFFVIDCALEDDQTWALKRFTRATVGQSLPGISPLPVPETRTEPELPQSIFGGSSARSTSPNSSSSPLLKQVLSPLAKQSASTTNAIHLGLDEWMETKFSSKEIGNTMITASAVDTSLMALVACFEDPLKESSSLPADGPATPSGQEPTDVPGRRARMIGLGTSSGKIVLWNMRAGHTAGQTGDGISPIRVIETESPEVSCLALSALYLVHGGSDGLVQAWDPLASTLDPVRTLNSRPGRVPRHVLALNPTLVDADFSTVGAIYLDPDPTVLHGVVAFGTNVRYWAYSSSNQATGRKRRLRHSDIHGRLSGRRHGGGVKGYIAAEAEELRAEQRHKAREQARLKARFGLGLSNMTEEEALQYAELMSQESFLAEEQRRASASDTGSAWDFDTTSTTGSMDTITPDPSVTDMSPQTGNTSAVHETMDESEYELQIQTAIRLSLLEGVNDLGRSPKGNSSGEFDGPILVKERKGKRSSSSSPSSSHTPMIKRTESSMSNVGSSAVADDDLELALQLSLAEEESRKAAMQINTSEDEFPPLHSDGWGKGKGKARH

SEQ ID NO: 11167 - DNA, 4489 bp, Muscodor strobelii
  misc_feature: SGI EST ID NO. CUFF.26612.0
  misc_feature: Variant of the nucleotide sequence at SEQ ID NO 11165
tgccgaacgagagcagagaggccatctgtatatctctatacttacatgcgaggctcatagttcacatcactagaaactgaatcattctccatatctgagcgaggcaaggaatacgacagtagtgagctgtacagcagactgagcaggacgatagtccagttcaagggtaagggctgtcaccactttgacacgaaagctgcgagataacagcaagcccgataactccggtagatgcaggcgcggtattcctcctcatcatagctgcccattgaaattagctggctagaaaatccatgactcaatttcccaccctcacttcaactccctcagttctaagctctctcaactttgaatgaagtccgccttcacctccctcgcgatctgcacacaaacattgtcacgctcacctcattccctcaatcaatattatcatagcccggactgtgccaacatctatcgcacagtcactacaacccatcttccccgttttctcgtcactactttatgcagctagagtttcccgagacttcccaacgctctcagactcgaaccgcctcccaatccccccaaccctattctcaacatggccttcagcgtaacgatgcgagtgcctcaccccgtggccctcaccaacagcgagaccgcagcatgtcgcccatgtcgcccctgtctgcccgcgagctcgacgcgtccagcccgcccagtccccgaaccgacgctgttgacccggaattcctcgacgaacgcctgcgcagactgaatatccgcgataactctcctactggttgtgcccaacctgcgggctatcggatatctgagtatgaaaatgcattgacgccctcagctcctcgacaggctcttggcttccaggtcatcaaacgccccgacggccaagccactcgtgtgaacctcgatgactttcccaatgaaattctaactcatgtactgtcccatctgcaccccgactcccacgcttccgtggccctggtgtccaagagattctatgctttgatcacgactcctcatgcctggcgcatggccttccagcgcttctttcctgcccaggacgctctcgccaccgcggcaaaggcaccaggagggtccgcatgggacgccgatgacgatgacactgtccgctccgaagtgcgggtcttcaataggctgactccacacgcctcttggcgcagcgaatacctgctgcgaacccgtctgctccgcagtctttctagaggaaagccaggtgcgagctcgggaggggtcggcacctcgtcgcgcgctaacgcctcgggcaagaaggccaccgctgtcttgacctacaacaccaagctgccctcgcgcgtgacccacctccatgccaccttcaagcccaatggcaagcgcccgccccgcgtcctccacggcgccgctgattttggagtcggcagcgcgagtgatcccaccggaggcaaggtagagaaatggggtcttgacgaccctttcgcttttctccagctcgatgaggtctcgcccctcctgatcccctatgggcttggagacgggcctgcggcggggcccaatgtcatggatgtaagccagccctatggtctcatcggaggtgaaggattccccggaggccgtgtcttcttccgagccaccggggaatacagaggcaaatacttgggtcaagaggtcagccttgtggaggcgcatccagatattcccaagatcccggagctccttgaaggtgtgagttcactatggatagccaagtcttcatccgtccccactgcaacccagtctctagttggaattatgactggttcaacgcttggtgtagtcacggcgtatgcacttggttatgatcccaatggaccacgatatcatcctggcgatatcagtgcccgctggattctaagtcccggtgtgcctatcattgccctcaaggtcgacgataactacagccaaaagcggaaagccttgaatcgagtatgggcggtcgccctgaacgccttgggtgaagtgttttatctgacgcagcctcccaaccctcctgccagcaagaccaaagcagatgatagtgcgaagctcgcttggcatgttgggcgcactacctactggcaccttgtggaagcgactcgtcgccaagcacgtccagacgagcttgacaggaatgccattcgaggtgcatattctcccaggtctccttctaatgccatgaacttgacgaaggaacaaatgattgcggaagctcgagagattgagaaattcctccgatacaagcctcagcacttccgtaaggtgtgttatggctgggacatgcgtcggaagttggaggtcgattttgctggcgatgacgaggccggtgccggagaaagcttcttcgtcattgactgtgctcttgaagacgaccaaacatgggcattgaagcggttcactcgagccactgttggccagtcactgccgggtatcagtcctttgccagttcctgaaacaaggacggaacccgaactacctcaatccatattcggaggcagtagtgccagatcaacctctccgaactcgtccagctctcccttgctgaagcaggtgttgtcaccattggctaagcaaagtgcgtcgactaccaatgctatccatctgggactcgatgagtggatggagaccaaattctcctccaaggaaatcggcaatacgatgattactgcaagtgctgtagatacctcgctcatggctttagttgcatgcttcgaggaccctttgaaagaatcgtctagtctccctgctgatgggcccgcaacgccatcagggcaggaacctacggatgttcctggacgtagagcacggatgattggacttggaactagcagcgggaagatcgttctatggaatatgcgagctggccacacggctgggcaaactggggatggaatttctcctattcgcgtcattgaaacagaatctcccgaggtatcatgtctcgcattgtcagctctatatcttgttcatggaggtagtgatggacttgtgcaggcttgggaccccttggcttctacactggatccagtccgtaccttgaattctcggcctggaagagtgcctcgccatgtacttgctttgaatcctactcttgttgatgctgatttctccactgttggagcgatctatctggatccggacccgactgtccttcatggagtagttgcgtttggcacaaatgttcgctactgggcgtacagctcctcaaatcaggctacagggcgcaagagaagactacgacattccgatattcatggtcgcctcagtggtcggcgccatggtggtggagtcaaaggttatatcgctgccgaagcagaagagcttcgtgctgagcaacgtcacaaagcaagagagcaagctcgcctaaaagctcgctttgggctgggtcttagcaatatgaccgaagaagaagctcttcagtatgcagagttaatgtcacaggagtccttcttggccgaggagcagcgccgtgccagtgctagcgacaccggctcagcctgggatttcgatacaacctctaccaccggcagcatggacactattacccccgatcctagtgtcaccgatatgagtccccagacggggaatactagtgctgttcatgagacaatggatgagagcgaatatgaactccaaatccagacagccattcgattatccctcttagagggtgtcaacgatctgggtcggtcgcccaaaggcaacagttcaggagagtttgatgggcctatcctggtgaaggagagaaagggcaagcgatcatcgtcaagctcgccatcttcaagtcacactcctatgatcaagcgaactgaatcatccatgtctaatgtcgggagctctgccgtcgctgatgatgatcttgaacttgctctgcagctgagtcttgccgaagaggagagcagaaaggccgccatgcagatcaacaccagtgaggatgagttccctccgcttcatagtgatgggtggggcaagggaaagggaaaagctagacattgagtgcaagtgagagcgagatgagtttgagagtggtaattggtcctgactttacttcgttgacaacctgtttattcgattcgattcggccgcaaggtattgcgtgtttttcagcacgggtttaagcactttgattctacagttttatagtgcaaataatatttctcttctttttcttcattgcatctacatattgaccgatcgtgtttcgaactgggagttctttgcatcgtgatgttatagcgctgtggcatgtgaagtccggtttgagggggaagatgattatcgaaggcgcgatcctgacttgccgggcaggcagattgtagagctaaactgcaatctgatggatcttagttgctttcagaatcgttgacaaatctgtgtggtccaaaacatgcgtgtgtggtacacttcaataccaatttggtgtttttaatatcgatgccgttggtgacagcatattgtaaatctagaacgtaca

SEQ ID NO: 11168 - DNA, 585 bp, Muscodor strobelii
  misc_feature: SGI cDNA ID NO. 563577
  misc_feature: Encodes the peptide sequence at SEQ ID NO 11169
atggacagcatccctgacccaaacaacccatggtgcaaacctaaggcatcatcagtcagacctcaagccgacgaagcgcggtccgttgaccttctttcgtctacctaccggcccatccatcgattcggatctagagatggggctggcgaagatgttgacaaaagagctagtcttcgattggaacgagaggcgatgctcgtgctcccaacgtcattagtcttattcaagcccaccgcctctgtaatcatgttctggaacgacgaccagctgatgctaaacgtggcatactttgacagcacaaactctcgccgcttacacgtctctaaaaccgacgccgcaacttttgtcctctacattggtgacgacagtagcgcccaagacgatgactataatgatgacaatagtgacatcttgaaccgcttccgcggcttttcctactacgttcctatcaccctcggcgatctgcaggtgatgcatacgaagttgatgcgccagctgttgactccgagcgtaacaacggcggcgatgacatcgactctgacagtcggatccaacttgggataccaaattggagaaaattcgtga

SEQ ID NO: 11169 - protein, 194 aa, Muscodor strobelii
  misc_feature: SGI Peptide ID NO. 563577
MDSIPDPNNPWCKPKASSVRPQADEARSVDLLSSTYRPIHRFGSRDGAGEDVDKRASLRLEREAMLVLPTSLVLFKPTASVIMFWNDDQLMLNVAYFDSTNSRRLHVSKTDAATFVLYIGDDSSAQDDDYNDDNSDILNRFRGFSYYVPITLGDLQVMHTKLMRQLLTPSVTTAAMTSTLTVGSNLGYQIGENS

SEQ ID NO: 11170 - DNA, 915 bp, Muscodor strobelii
  misc_feature: SGI cDNA ID NO. 563578
  misc_feature: Encodes the peptide sequence at SEQ ID NO 11171
atgaagcagtggggcgagtacatcgccaaccaaaaagacaactctggccaagaaggaaacgacttgcatcctcgaataatgggcttctggacaaagggcgaaggagagatcttagcgtttcacatgattctatgtaatggctgccagccagcaaaatcgtctggttgcaacacagccaatctcctgcttcgcagatacccaatgcgctcgagtatcttgaagagctacacgctcgctctatccatgcgtcatcgaagcttgcgatcgataccccgatggagaccgagaagatctgagatggcgattgttgacgaggtcgtcgatcttcccatgacgccgttcttacattcaccactcaaggcaagctatgggaagaaggggtttcacaacatctctatggaaaccatgttcgatggttgtgacatctttagtgatgattttgatcccaccgaccctaaatggtctttagatcaaatcactattgtaaggaccacgaagcttacgaacgtgggccaggggaaatacagcgatgcgcaattgcctctcatccgcgggatatttcattgcgttccgttttataggccagaggcttcgtccattgatgagtttggtacgaaggtctggatgatctctgacaccatacaacaggacattgatggatcgaaaaagcgataccccgcggaggccattgtcgaaaatctccaccccgaggttgacgacatgatgaataacatgatcgccgacaacctccagtgcggtgtcaaagacatgttgaggatcatgagagacctgttagagatggccgaacagatagagtgcgatgccgctcctttggcccaggacttcaaaagtgccgtcagattccatactctatttcccgcaggcgcagagttggtcgaaattcaacccgagtaa

SEQ ID NO: 11171 - protein, 304 aa, Muscodor strobelii
  misc_feature: SGI Peptide ID NO. 563578
MKQWGEYIANQKDNSGQEGNDLHPRIMGFWTKGEGEILAFHMILCNGCQPAKSSGCNTANLLLRRYPMRSSILKSYTLALSMRHRSLRSIPRWRPRRSEMAIVDEVVDLPMTPFLHSPLKASYGKKGFHNISMETMFDGCDIFSDDFDPTDPKWSLDQITIVRTTKLTNVGQGKYSDAQLPLIRGIFHCVPFYRPEASSIDEFGTKVWMISDTIQQDIDGSKKRYPAEAIVENLHPEVDDMMNNMIADNLQCGVKDMLRIMRDLLEMAEQIECDAAPLAQDFKSAVRFHTLFPAGAELVEIQPE

SEQ ID NO: 11172 - DNA, 924 bp, Muscodor strobelii
  misc_feature: SGI cDNA ID NO. 563579
  misc_feature: Encodes the peptide sequence at SEQ ID NO 11173
atgagaaaacatggtcgcaataataccgtgatattcaccatgttcagtggtgcatctgaagacggcctcgatccggccgacaagaaatacaatgttgatgatagtgcgattgagaggacgacatggctcacgaaccagaggtcaaagcaagggttgttgactccgacaacacgcaaccgaacacatcatgatcgtcacataccggttcatcaagaagcgctcaaggccgagtctgtcactgaagacgcttcggagtacctggaaggcacggatctcgacgtcatcctccaggcgcacgaggacgagacgcacctctccaaccactcgacgggttgtcaagcacaacgcgaccccccggcgagtcattttaaagacgtcgtcgatgccatcttttccgctaccaaacgtgtgggatacgacgctcccgggtggaaaaggttatcgttcaatagccagcaacaaaaatccagcagctcatctggagctggcggtaccactacggcggcgagctggattcgagggactcccaaagaagaactggaccagcccaaagaaaacagcacgttcacatcacagcaaacggcagagccagaaaagcaacatgagtacttctctatggtttcccatacggttccgactactagcgcgctgagagccatcaaggaaacggctgagaaacaagaccgcgagttcgaaaaactcgagcacgcgcgacagattatcgacgaagaaagttggcagctgttccacccatttgctgtcccaggtgatggttactgcggactacacgcagtcattgccagcttcagagctcggtaccccgagatcacactccctacgaaagaggatttcttcgacatcatcaacggcgaatccgaagaaactcaagagcttcgtgatgtatcacaagccactacggattag

SEQ ID NO: 11173 - protein, 307 aa, Muscodor strobelii
  misc_feature: SGI Peptide ID NO. 563579
MRKHGRNNTVIFTMFSGASEDGLDPADKKYNVDDSAIERTTWLTNQRSKQGLLTPTTRNRTHHDRHIPVHQEALKAESVTEDASEYLEGTDLDVILQAHEDETHLSNHSTGCQAQRDPPASHFKDVVDAIFSATKRVGYDAPGWKRLSFNSQQQKSSSSSGAGGTTTAASWIRGTPKEELDQPKENSTFTSQQTAEPEKQHEYFSMVSHTVPTTSALRAIKETAEKQDREFEKLEHARQIIDEESWQLFHPFAVPGDGYCGLHAVIASFRARYPEITLPTKEDFFDIINGESEETQELRDVSQATTD

SEQ ID NO: 11174 - DNA, 1299 bp, Muscodor strobelii
  misc_feature: SGI cDNA ID NO. 563580
  misc_feature: Encodes the peptide sequence at SEQ ID NO 11175
atgacgatcacggtcattcttggttcccaatggggagatgagggcaaaggcaaacttaccgatatccttgcccctgaggcgcaactttgcgcccgcgccgctgtgagcaacctcacgagtcgcatgtcgctgaaacatacgctgatgggaagaataggggccaatggagtatcatatagcttccacctacttccctccggtctcatcaacccaaattgcatgaacttcatcggctctggagtcgttttccatgtcccaagcttcttcaaggaacttggcgagctcgaagcgaaaggtctcccttcggtacacgatcgaattctcgtttccgaccgagtgcacatcgatttgcagatgcacattgccgccgatggattagaagagaaggaactcggagataagaagatcggcacaacgaacagaggcatcggacccacgtaccaatataaagccgcgcgaagtggtattagactggctgaggtcttcgaccccgagatgtttgagaccaagcttcgccggctagctgatgggtacaaaaagcgctttggcgatctgttcgagtacgatgtcgaagaagagctgagccgcttcaacgagtaccgacctaagttagccaagtatgtcgtagatggtgtatctttcatcaagtcggcccaggagagcaataagaacatcctggtagaaggagcgaacgcgctcatgttggatattgactacggttcctacccgtttgtgacatcatccaacacgacgctcgctggaatcattggaggactcgccctgaatcccaagaacatcacggaaatagtcggggtagtgaaggcttacaccactcgagttggtgcgggcgctttcaaaacggaagacactggggaagtcggtaccaaacttcaggaaattggtcgagaatggggcacctctaccggccggaggcgccggtgtggatggctcgatcttgttgtggtcaagtatagcacttcaatcaactactacaccgctttaaatcttacaaagctcgatgtcttggacacctttgaaacagtcaagattgctatcgcctacaaggtcgacggcgaggagctcgactcgtaccctgcgaaccttggaatcctggacagcgccgaggttatctacaaagagctccctggttggaagaagccaacaactgacgcgaagaatttcgaggagcttccgaaagaagcccgagactacgtcgagtttattgagaagttcgtcggggttaagatcaaatggattggtaccggtcccgaccgtgaagccatgatcaagcgattgtag

SEQ ID NO: 11175 - protein, 432 aa, Muscodor strobelii
  misc_feature: SGI Peptide ID NO. 563580
  misc_feature (3)..(430): Pfam Id: PF00709 Pfam Desc: Adenylosuccinate synthetase
  misc_feature (54)..(430): Pfam Id: PF00709 Pfam Desc: Adenylosuccinate synthetase
  misc_feature (3)..(32): Pfam Id: PF00709 Pfam Desc: Adenylosuccinate synthetase
  misc_feature (1)..(431): NCBI GI: 46121617 Blast Desc: FG05187.1 [Gibberella zeae PH-1]
  misc_feature (1)..(431): NCBI GI: 256728968 Blast Desc: NECHADRAFT_40313 [Nectria haematococca mpVI 77-13-4]
  misc_feature (16)..(431): NCBI GI: 256731301 Blast Desc: NECHADRAFT_49575 [Nectria haematococca mpVI 77-13-4]
  misc_feature (4)..(431): NCBI GI: 85096032 Blast Desc: adenylosuccinate synthetase [Neurospora crassa OR74A] gi|28921668|gb|EAA30951.1| adenylosuccinate synthetase [Neurospora crassa OR74A]
  misc_feature (1)..(431): NCBI GI: 261356201 Blast Desc: adenylosuccinate synthetase [Verticillium albo-atrum VaMs.102]
  misc_feature (4)..(431): NCBI GI: 145604162 Blast Desc: MGG_10691 [Magnaporthe grisea 70-15] gi|145012215|gb|EDJ96871.1| MGG_10691 [Magnaporthe grisea 70-15]
  misc_feature (4)..(429): NCBI GI: 116207726 Blast Desc: CHGG_03156 [Chaetomium globosum CBS 148.51] gi|88183753|gb|EAQ91221.1| CHGG_03156 [Chaetomium globosum CBS 148.51]
  misc_feature (1)..(429): NCBI GI: 171686220 Blast Desc: protein product [Podospora anserina] gi|170943071|emb|CAP68724.1| protein product [Podospora anserina]
  misc_feature (1)..(431): NCBI GI: 189194735 Blast Desc: adenylosuccinate synthetase [Pyrenophora tritici-repentis Pt-1C-BFP] gi|187979270|gb|EDU45896.1| adenylosuccinate synthetase [Pyrenophora tritici-repentis
  misc_feature (1)..(431): NCBI GI: 169624907 Blast Desc: SNOG_15719 [Phaeosphaeria nodorum SN15] gi|111055694|gb|EAT76814.1| SNOG_15719 [Phaeosphaeria nodorum SN15]
  misc_feature (3)..(429): SWISSPROT Homolog: EC 6.3.4.4 Adenylosuccinate synthase
MTITVILGSQWGDEGKGKLTDILAPEAQLCARAAVSNLTSRMSLKHTLMGRIGANGVSYSFHLLPSGLINPNCMNFIGSGVVFHVPSFFKELGELEAKGLPSVHDRILVSDRVHIDLQMHIAADGLEEKELGDKKIGTTNRGIGPTYQYKAARSGIRLAEVFDPEMFETKLRRLADGYKKRFGDLFEYDVEEELSRFNEYRPKLAKYVVDGVSFIKSAQESNKNILVEGANALMLDIDYGSYPFVTSSNTTLAGIIGGLALNPKNITEIVGVVKAYTTRVGAGAFKTEDTGEVGTKLQEIGREWGTSTGRRRRCGWLDLVVVKYSTSINYYTALNLTKLDVLDTFETVKIAIAYKVDGEELDSYPANLGILDSAEVIYKELPGWKKPTTDAKNFEELPKEARDYVEFIEKFVGVKIKWIGTGPDREAMIKRL

SEQ ID NO: 11176 - DNA, 1438 bp, Muscodor strobelii
  misc_feature: SGI EST ID NO. CUFF.26581.0
  misc_feature: Variant of the nucleotide sequence at SEQ ID NO 11174
attctatcgtggccaatggagtatcatatagcttccacctacttccctccggtctcatcaacccaaattgcatgaacttcatcggctctggagtcgttttccatgtcccaagcttcttcaaggaacttggcgagctcgaagcgaaaggtctcccttcggtacacgatcgaattctcgtttccgaccgagtgcacatcgatttgcagatgcacattgccgccgatggattagaagagaaggaactcggagataagaagatcggcacaacgaacagaggcatcggacccacgtaccaatataaagccgcgcgaagtggtattagactggctgaggtcttcgaccccgagatgtttgagaccaagcttcgccggctagctgatgggtacaaaaagcgctttggcgatctgttcgagtacgatgtcgaagaagagctgagccgcttcaacgagtaccgacctaagttagccaagtatgtcgtagatggtgtatctttcatcaagtcggcccaggagagcaataagaacatcctggtagaaggagcgaacgcgctcatgttggatattgactacggttcctacccgtttgtgacatcatccaacacgacgctcgctggaatcattggaggactcgccctgaatcccaagaacatcacggaaatagtcggggtagtgaaggcttacaccactcgagttggtgcgggcgctttcaaaacggaagacactggggaagtcggtaccaaacttcaggaaattggtcgagaatggggcacctctaccggccggaggcgccggtgtggatggctcgatcttgttgtggtcaagtatagcacttcaatcaactactacaccgctttaaatcttacaaagctcgatgtcttggacacctttgaaacagtcaagattgctatcgcctacaaggtcgacggcgaggagctcgactcgtaccctgcgaaccttggaatcctggacagcgccgaggttatctacaaagagctccctggttggaagaagccaacaactgacgcgaagaatttcgaggagcttccgaaagaagcccgagactacgtcgagtttattgagaagttcgtcggggttaagatcaaatggattggtaccggtcccgaccgtgaagccatgatcaagcgattgtaggcgcagatgacgaccgttttcgggaagtgggacgataaaatggcttcttatgaatgttagacagccaggaacacgaaatcgggcacagcatgcctacgtagaagcaggggactggtggacagaactatggcttgttctgcctcaagctcatccaaggagcttgagaatgtgtctgaagctagatgaatatcatacagacccaaacatcgcatgatttcaccaaaaaggtctaggtaataaaaagagtgtactctaccaaaaatagacgctagacatttggagttcag

SEQ ID NO: 11177 - DNA, 504 bp, Muscodor strobelii
  misc_feature: SGI cDNA ID NO. 563581
  misc_feature: Elevated expression when VOC is produced
  misc_feature: Encodes the peptide sequence at SEQ ID NO 11178
atgcgcctcttgtacgctgtcttcgctctaggaacaactcggtcctacaccagtgctgcgctcttgcctgcacgcggtggtggatttcaagatagctgctctgacatccacctctttaccgtcgctaataatacctgggtcactgctaaatgcactgatgggcacaacacaacgactaacgccttgaatctcaatcattgcattggcaattccaacggcgttttggtagccgaggccgagggcaaattcggtggcacctgcgaaaacacaaaaattactggcgcgtacttccaagcaacatgcagtgccgagcctggatccaagtctcagacaacttatcttgatatagccgactttgtttataacgaagatggctatttaaaatgccacgacataccaggttgtgcattgataccttggaatggagctccaggtggcccaacagccaaggcacataaagggaactgcgatgatgtaccggaacactttctcgaaggtgaataa

SEQ ID NO: 11178 - protein, 167 aa, Muscodor strobelii
  misc_feature: SGI Peptide ID NO. 563581
  misc_feature (28)..(129): Pfam Id: PF08881 Pfam Desc: CVNH domain
  misc_feature (28)..(101): Pfam Id: PF08881 Pfam Desc: CVNH domain
  misc_feature (29)..(129): NCBI GI: 255953119 Blast Desc: Pc21g02480 [Penicillium chrysogenum Wisconsin 54-1255] gi|211589023|emb|CAP95145.1| Pc21g02480 [Penicillium chrysogenum Wisconsin 54-1255]
  misc_feature (62)..(130): NCBI GI: 261357524 Blast Desc: [Verticillium albo-atrum VaMs.102]
  misc_feature: Useful for introducing or modulating the production of volatile compounds
MRLLYAVFALGTTRSYTSAALLPARGGGFQDSCSDIHLFTVANNTWVTAKCTDGHNTTTNALNLNHCIGNSNGVLVAEAEGKFGGTCENTKITGAYFQATCSAEPGSKSQTTYLDIADFVYNEDGYLKCHDIPGCALIPWNGAPGGPTAKAHKGNCDDVPEHFLEGE

SEQ ID NO: 11179 - DNA, 879 bp, Muscodor strobelii
  misc_feature: SGI EST ID NO. CUFF.26588.0
  misc_feature: Variant of the nucleotide sequence at SEQ ID NO 11177
gcaactttgattacttctgaaccttgaaaataagtcaaaatgcgcctcttgtacgctgtcttcgctctaggaacaactcggtcctacaccagtgctgcgctcttgcctgcacgcggtggtggatttcaagatagctgctctgacatccacctctttaccgtcgctaataatacctgggtcactgctaaatgcactgatgggcacaacacaacgactaacgccttgaatctcaatcattgcattggcaattccaacggcgttttggtagccgaggccgagggcaaattcggtggcacctgcgaaaacacaaaaattactggcgcgtacttccaagcaacatgcagtgccgagcctggatccaagtctcagacaacttatcttgatatagccgactttgtttataacgaagatggctatttaaaatgccacgacataccaggttgtgcattgataccttggaatggagctccaggtggcccaacagccaaggcacataaagggaactgcgatgatgtaccggaacactttctcgaaggtgaataatatttgatagttgatacagtggttctatcatttatttattctctagacattatgtcaaatctggtaatatagctttaaatggcttgtggcttgcttagtacctaagtagggcttatgcaggtaatggcacccgacggattagtcaagcacctcctgctgcccaccacccgcgctggtccgtggcttgaatcggcgtatcgaaatagggaaaatacatgtgggatagattgcatactagcctaagggtattacaattttcttcagcatgactttcaccagttatttattggttcctagcttcgtaaattcgaaagaacaatgcaagctacaaaaatt

SEQ ID NO: 11180 - DNA, 1083 bp, Muscodor strobelii
  misc_feature: SGI cDNA ID NO. 563582
  misc_feature: Elevated expression when VOC is produced
  misc_feature: Encodes the peptide sequence at SEQ ID NO 11181
atgcgtgacttcaactccaaaaatcgctctcgcgacaacaccgagtggcatagttatggaacaccaacatccgagaaaggtctggcttggcgctgggtaaaaccgttgccgcacaataaagacgacgctctgtgggtttgtcacgtatttagggcgattatcttagcgttgggtgacgctgtgtcatccaactccacgccagagttgactcgtatcgaagtcctcttacatcaggcctgtctaccagatagcgctttgatgctccctggcacgtcgctaaacgatgttttggctgtaagcaaactcaaaaccatttacctggatgggctgggtggttctgggctccgtcacaatagtccattacatcccacgcgattcctctcgtcgttcttatatggagcctcgaaccttgagaatttacgactgaattttcaaaggcatgaagccaagcacgtcgataagttcctaggctggttggctgctcctccggatgcagttcagcccccaccacctgctatggcctggacctcaccgacgggtcagacatatcatttcgacgatttagagccacctttcccagatttcccaaaactaagatctttagaactcggtatgacgagcgtatcaacgaaaatgttactcgatctatgtcagaagttcaagtcaactctccgtgttctaagcctacacaagttcacgctcgaatcgtccccaagagctaaagcgaatcactggccccggcttcttaccaagatggctaatatccccttggatctggagatgattacattgtctcatattcaggatcggtcattccaccgtggtgatagggatagcgataaccttgccgagattaggttctcgagcagtggaaattctagaagcaatagaatcaagacgtggcgaggcactacgttttctcaatcaatcgcagatttgacaaatgacatggcggtaacgtggatccgcaatagcgacgatggcgctggctctgtagatagcagtcatacagatgaagacagtgaagatggcgaagacgacgagattgatgatgacgacgaagacgaagaaatggacggatga

SEQ ID NO: 11181 - protein, 360 aa, Muscodor strobelii
  misc_feature: SGI Peptide ID NO. 563582
  misc_feature (1)..(321): NCBI GI: 169598890 Blast Desc: SNOG_02254 [Phaeosphaeria nodorum SN15] gi|111069346|gb|EAT90466.1| SNOG_02254 [Phaeosphaeria nodorum SN15]
  misc_feature (1)..(280): NCBI GI: 189209143 Blast Desc: conserved [Pyrenophora tritici-repentis Pt-1C-BFP] gi|187976997|gb|EDU43623.1| conserved [Pyrenophora tritici-repentis Pt-1C-BFP]
  misc_feature (1)..(358): NCBI GI: 261357962 Blast Desc: conserved [Verticillium albo-atrum VaMs.102]
  misc_feature (1)..(321): NCBI GI: 171693403 Blast Desc: protein product [Podospora anserina] gi|170946650|emb|CAP73453.1| protein product [Podospora anserina]
  misc_feature (1)..(276): NCBI GI: 116198663 Blast Desc: CHGG_07487 [Chaetomium globosum CBS 148.51] gi|88178766|gb|EAQ86234.1| CHGG_07487 [Chaetomium globosum CBS 148.51]
  misc_feature (1)..(284): NCBI GI: 46123091 Blast Desc: FG05923.1 [Gibberella zeae PH-1]
  misc_feature (1)..(282): NCBI GI: 256731552 Blast Desc: NECHADRAFT_49371 [Nectria haematococca mpVI 77-13-4]
  misc_feature (1)..(237): NCBI GI: 85104200 Blast Desc: NCU01081 [Neurospora crassa OR74A] gi|18376194|emb|CAD21310.1| [Neurospora crassa] gi|28923241|gb|EAA32457.1| [Neurospora crassa OR74A]
  misc_feature: Useful for introducing or modulating the production of volatile compounds
MRDFNSKNRSRDNTEWHSYGTPTSEKGLAWRWVKPLPHNKDDALWVCHVFRAIILALGDAVSSNSTPELTRIEVLLHQACLPDSALMLPGTSLNDVLAVSKLKTIYLDGLGGSGLRHNSPLHPTRFLSSFLYGASNLENLRLNFQRHEAKHVDKFLGWLAAPPDAVQPPPPAMAWTSPTGQTYHFDDLEPPFPDFPKLRSLELGMTSVSTKMLLDLCQKFKSTLRVLSLHKFTLESSPRAKANHWPRLLTKMANIPLDLEMITLSHIQDRSFHRGDRDSDNLAEIRFSSSGNSRSNRIKTWRGTTFSQSIADLTNDMAVTWIRNSDDGAGSVDSSHTDEDSEDGEDDEIDDDDEDEEMDG

SEQ ID NO: 11182 - DNA, 1777 bp, Muscodor strobelii
  misc_feature: SGI EST ID NO. CUFF.26619.1
  misc_feature: Variant of the nucleotide sequence at SEQ ID NO 11180
tcttccagggaagactcgactccatcacgcgaatcactgacctatcaaaggccgggccatcgagcaacgtttgcatggcgcttttacacaagaatttttcgcgaagaaacagttctctcttactgactttagtctgggggctcttcttgctatctccaaatcacgacttggtccatgtctcaaacacgttattatccatctagagcgtccactctcacattttgattttgtccctcaagggcatcttccgggatctcctgaatgcttattggctcgagagcaagagtgcatcgatcattatgctttctctacgtctgggtgtgatattgaaatgctcacggaggctttacagaatttgcccaaccttgagacgatcggtatgcgtgacttcaactccaaaaatcgctctcgcgacaacaccgagtggcatagttatggaacaccaacatccgagaaaggtctggcttggcgctgggtaaaaccgttgccgcacaataaagacgacgctctgtgggtttgtcacgtatttagggcgattatcttagcgttgggtgacgctgtgtcatccaactccacgccagagttgactcgtatcgaagtcctcttacatcaggcctgtctaccagatagcgctttgatgctccctggcacgtcgctaaacgatgttttggctgtaagcaaactcaaaaccatttacctggatgggctgggtggttctgggctccgtcacaatagtccattacatcccacgcgattcctctcgtcgttcttatatggagcctcgaaccttgagaatttacgactgaattttcaaaggcatgaagccaagcacgtcgataagttcctaggctggttggctgctcctccggatgcagttcagcccccaccacctgctatggcctggacctcaccgacgggtcagacatatcatttcgacgatttagagccacctttcccagatttcccaaaactaagatctttagaactcggtatgacgagcgtatcaacgaaaatgttactcgatctatgtcagaagttcaagtcaactctccgtgttctaagcctacacaagttcacgctcgaatcgtccccaagagctaaagcgaatcactggccccggcttcttaccaagatggctaatatccccttggatctggagatgattacattgtctcatattcaggatcggtcattccaccgtggtgatagggatagcgataaccttgccgagattaggttctcgagcagtggaaattctagaagcaatagaatcaagacgtggcgaggcactacgttttctcaatcaatcgcagatttgacaaatgacatggcggtaacgtggatccgcaatagcgacgatggcgctggctctgtagatagcagtcatacagatgaagacagtgaagatggcgaagacgacgagattgatgatgacgacgaagacgaagaaatggacggatgatatcttcgtcaagccagcctctgcaaagctgcctcaattcagcggccaaagcatagttgcgggaagattatagctggggtcctgctatcttagggtacgtggcaaacttattaggtgttcccaagtgatttgtcacgcgacccttgtgacaaaataattcgcgagctggttcttgtagctttgcttaagacaggattatcgtactgtgttgcgatcatctgtgtaagaaattcgagagtgatgaattatgatgatagacgaggcgaacaatgcactccgtaagaatatcacaaatttaattaaattaggccggtt

SEQ ID NO: 11183 - DNA, 1164 bp, Muscodor strobelii
  misc_feature: SGI cDNA ID NO. 563583
  misc_feature: Encodes the peptide sequence at SEQ ID NO 11184
atgagcagaatcattgtgttcacggctttagctagcttgatttatcacgcaatgtcgattccaacccttaaatttatggacgatatgggccgccgctgtcgtaagctcattgtgccagttgaaatctccgcagagctcgaactcttcgactttagtccgcctcgaggcaatatagaggcaaccgaattctctctgaatgtgactcgagttagacttgatttcacagtgggtgtatacacaagttccgttatcaaaagtagcacttacaatattgctgctacgtactgcgagccctcttctggtcccggaaaagctctccagatccttacacatggaatcggctttggaaagtcatattgggattttccaatataccaccataactacagctatgtaaatgaagccttacgccgaaattatagcacattctcctacgatcgtctaggcgttggcgattcttcgcacggagatccggtaaatgagattcaagcggcgctacaaatctctgctctgcaagccctgaccgtaatggcacgaaacacgtcgctcccaggcatcaatattaaatacgaaagagtgttgcatgtcgggcatagcttcgggagcatattgacgtacgctatgactgcaacatttccatcaatctctgacggtattgcactcacgggatggagtcttactgttccgtatgggaaagagtttaacttggctggtggcgtagccgctgcaaatacgttttgttcttggaggcactatccggatggctacttggtgtccggaaacgagcgtggaacacagtctatcttcttcgctcccggagcattcgatcccaaagttctgaaagcagcacatgaggcaagagagccttcgactgtcggcgaaacaatagctactaacgctatctcggcagaaagccagtttgagggccctgtgcttgttgtgactggagagcgagatgggccaaattgcgctggaaactgttattcgtcgcggccctcaatcccggcttctgcgaagtcgtctttcaaacatgcctcttcgttcaaggctatcattgttcctggggctggccacgggctcaatttggtgcgacttgatgacaacccgactttcttcgaggtcaaatatactaacctactgaataggaatatagctggccaataa

SEQ ID NO: 11184 - protein, 387 aa, Muscodor strobelii
  misc_feature: SGI Peptide ID NO. 563583
  misc_feature (31)..(362): NCBI GI: 256726441 Blast Desc: NECHADRAFT_79651 [Nectria haematococca mpVI 77-13-4]
  misc_feature (16)..(362): NCBI GI: 261356743 Blast Desc: conserved [Verticillium albo-atrum VaMs.102]
  misc_feature (31)..(362): NCBI GI: 46124239 Blast Desc: FG06497.1 [Gibberella zeae PH-1]
  misc_feature (31)..(362): NCBI GI: 255930811 Blast Desc: Pc12g00590 [Penicillium chrysogenum Wisconsin 54-1255] gi|211581581|emb|CAP79686.1| Pc12g00590 [Penicillium chrysogenum Wisconsin 54-1255]
  misc_feature (30)..(362): NCBI GI: 154320985 Blast Desc: BC1G_01367 [Botryotinia fuckeliana B05.10] gi|150851905|gb|EDN27097.1| BC1G_01367 [Botryotinia fuckeliana B05.10]
  misc_feature (89)..(362): NCBI GI: 115401136 Blast Desc: [Aspergillus terreus NIH2624] gi|114190097|gb|EAU31797.1| [Aspergillus terreus NIH2624]
  misc_feature (17)..(362): NCBI GI: 154302613 Blast Desc: BC1G_09883 [Botryotinia fuckeliana B05.10] gi|150855372|gb|EDN30564.1| BC1G_09883 [Botryotinia fuckeliana B05.10]
  misc_feature (32)..(362): NCBI GI: 121712070 Blast Desc: conserved [Aspergillus clavatus NRRL 1] gi|119401802|gb|EAW12224.1| conserved [Aspergillus clavatus NRRL 1]
  misc_feature (31)..(230): NCBI GI: 169596606 Blast Desc: SNOG_01068 [Phaeosphaeria nodorum SN15] gi|111071443|gb|EAT92563.1| SNOG_01068 [Phaeosphaeria nodorum SN15]
  misc_feature (32)..(362): NCBI GI: 145228501 Blast Desc: An01g01170 [Aspergillus niger] gi|134054648|emb|CAK43493.1| protein product [Aspergillus niger]
MSRIIVFTALASLIYHAMSIPTLKFMDDMGRRCRKLIVPVEISAELELFDFSPPRGNIEATEFSLNVTRVRLDFTVGVYTSSVIKSSTYNIAATYCEPSSGPGKALQILTHGIGFGKSYWDFPIYHHNYSYVNEALRRNYSTFSYDRLGVGDSSHGDPVNEIQAALQISALQALTVMARNTSLPGINIKYERVLHVGHSFGSILTYAMTATFPSISDGIALTGWSLTVPYGKEFNLAGGVAAANTFCSWRHYPDGYLVSGNERGTQSIFFAPGAFDPKVLKAAHEAREPSTVGETIATNAISAESQFEGPVLVVTGERDGPNCAGNCYSSRPSIPASAKSSFKHASSFKAIIVPGAGHGLNLVRLDDNPTFFEVKYTNLLNRNIAGQ

SEQ ID NO: 11185 - DNA, 2124 bp, Muscodor strobelii
  misc_feature: SGI cDNA ID NO. 563584
  misc_feature: Elevated expression when VOC is produced
  misc_feature: Encodes the peptide sequence at SEQ ID NO 11186
atgccgtccacgaggaaaaaaccgtccgcaggcaatgcagccaatgcagccaatgcaacccctggagcctctggagcctctggagctggagcacctggagcacctggagcagcaagaccaagcaccctcccgttcagcgggatgaccattgcaatcagcggaaccatacctggccgcacgcaagcctccattgagagagattacatcactcctttaggtggcaacctatctaagacaatttctgcatctaccactcatctcgttgcaactcgggcagactttgataagccatcgaccaaagttgcaagtgctcaagcctcttcgattccaattgtctcctttgaatggctggagcagtgccttgcacaaaaccaatacttgagtgacgcaggctttactttctccgctccccagccacagaaacgtaagcgtgatgcacctcaggtctctctagacgatgaaaccggatcccagccaaagaaggcaaacaatgcagacaatggcaaaccccaggagaaagccaaggagcgggaggcaaaggtagcagaaggccagattgccaagtctttcgacatcaaaatccccgttgacgagggatcagagcgtgagctcacaaactatgaagtatacattgatgacgatggtgtcatctacgacgcttctttgaataagacgaatgcaagcaataacaacaacaagttttatcgcattcagatccttcggtctgtttctggggattatcgaacgtggactcgctggggtcgtgtcggtgaatatggtacctcaaagaccatcggtgatggaagcttggcaaatgctttgaaacagtttgatgccaagtttaaggacaagtcgggcctatcttgggcaaaccgcaatgatccaccaaaacccaagcgatatgcattcgtcgagaaatcatatgagcctgattcagacgacgacaacgacaacgacgctaatggacagcaagctacaggtgagatcaagaaggaagaagagcccgagtcgaagcttcccaaagccacacaagatctcatccggcttatcttcaaccaacagtatttcaatgctgcaatgtcggacctcaactacgattcagccaagctccccttgggcaagctgagcaagaacacgatttcacggggctttcaggcactgaaggatctctcagctttgatcgacgaccccagtctcgcccaatcgcagtattctatcttccggtatcagatgtcatggaccgaagccaccgaggaactctcgaacttatacttcaccgtaatcccgcatgcctttggtcgagttcgaccaccaatcatacggtcgaatgacttgctcaaaaaggaaatagaacttcttgagagcttgagcgacatgaaagacgctgccctattgatgaagtccgataaacagaaggaagaattaaacgaactcgatcgtcaattccggggactgggaatgaatgagatgacaccactggaccagaaaagtgacgagtttgcgcaactcaaggattacctcatggacacccggggagccacccacaacgcaaactatcaaatacaacagatcttccgcattgaacgtgacggggagtatgggcgattcgaggaagctcacaagaagcccaaaaataggcgtcttctttggcacggttctcgctgcaccaatttcggtggaattcttagtcaaggacttcggatcgctccacctgaggctcccgtttcgggatacatgttcggcaaaggaatctatttggcagatatgtcgtcaaagtctgctaactactgctgcccctacatctcgaatgggcatgctcttctgctgctttgtgaagctgaattaggaagcatgcaggagttgacaggcgccgactatgatgcaggcgaaaaagccaaagcgaaaggactactctctacatggggcaaagggttggtaggacctagcagatggaaagacgcttcatgcattcatccctccctcaagggcgttcaggtgcccaacacaagtgctgcaaagcccggccagacgaatgtcagcggcgcttacctgcagtacaatgaatatatttgctatgacatctcccaggtgcgcctgcgatatcttctgcgagtcagaatgtag

SEQ ID NO: 11186 - protein, 707 aa, Muscodor strobelii
  misc_feature: SGI Peptide ID NO. 563584
  misc_feature (40)..(121): Pfam Id: PF00533 Pfam Desc: BRCA1 C Terminus (BRCT) domain
  misc_feature (485)..(707): Pfam Id: PF00644 Pfam Desc: Poly(ADP-ribose) polymerase catalytic domain
  misc_feature (336)..(483): Pfam Id: PF02877 Pfam Desc: Poly(ADP-ribose) polymerase, regulatory domain
  misc_feature (213)..(296): Pfam Id: PF05406 Pfam Desc: WGR domain
  misc_feature (49)..(707): NCBI GI: 39947634 Blast Desc: MGG_08613 [Magnaporthe grisea 70-15] gi|145010234|gb|EDJ94890.1| MGG_08613 [Magnaporthe grisea 70-15]
  misc_feature (44)..(707): NCBI GI: 171676372 Blast Desc: protein product [Podospora anserina] gi|170936252|emb|CAP60911.1| protein product [Podospora anserina]
  misc_feature (45)..(707): NCBI GI: 256731153 Blast Desc: NECHADRAFT_49036 [Nectria haematococca mpVI 77-13-4]
  misc_feature (44)..(707): NCBI GI: 169598892 Blast Desc: SNOG_02255 [Phaeosphaeria nodorum SN15] gi|160704493|gb|EAT90467.2| SNOG_02255 [Phaeosphaeria nodorum SN15]
  misc_feature (45)..(707): NCBI GI: 189209141 Blast Desc: poly polymerase 2 ADP-ribosyltransferase 2 [Pyrenophora tritici-repentis Pt-1C-BFP] gi|187976996|gb|EDU43622.1| poly polymerase 2 2 [Pyrenophora
  misc_feature (45)..(706): NCBI GI: 116200486 Blast Desc: CHGG_10788 [Chaetomium globosum CBS 148.51] gi|88175502|gb|EAQ82970.1| CHGG_10788 [Chaetomium globosum CBS 148.51]
  misc_feature (176)..(707): NCBI GI: 46123093 Blast Desc: FG05924.1 [Gibberella zeae PH-1]
  misc_feature (45)..(707): NCBI GI: 121712892 Blast Desc: poly(ADP)-ribose polymerase PARP, [Aspergillus clavatus NRRL 1] gi|119402210|gb|EAW12631.1| poly(ADP)-ribose polymerase PARP, [Aspergillus clavatus NRRL 1]
  misc_feature (45)..(707): NCBI GI: 70998360 Blast Desc: poly(ADP)-ribose polymerase PARP [Aspergillus fumigatus Af293] gi|66851538|gb|EAL91864.1| poly(ADP)-ribose polymerase PARP, [Aspergillus fumigatus Af293] poly(ADP)-ribose
  misc_feature (45)..(707): NCBI GI: 119479843 Blast Desc: poly(ADP)-ribose polymerase PARP, [Neosartorya fischeri NRRL 181] gi|119408104|gb|EAW18053.1| poly(ADP)-ribose polymerase PARP, [Neosartorya fischeri NRRL 181]
  misc_feature (40)..(707): SWISSPROT Homolog: EC 2.4.2.30 NAD(+) ADP-ribosyltransferase
  misc_feature: Useful for introducing or modulating the production of volatile compounds
MPSTRKKPSAGNAANAANATPGASGASGAGAPGAPGAARPSTLPFSGMTIAISGTIPGRTQASIERDYITPLGGNLSKTISASTTHLVATRADFDKPSTKVASAQASSIPIVSFEWLEQCLAQNQYLSDAGFTFSAPQPQKRKRDAPQVSLDDETGSQPKKANNADNGKPQEKAKEREAKVAEGQIAKSFDIKIPVDEGSERELTNYEVYIDDDGVIYDASLNKTNASNNNNKFYRIQILRSVSGDYRTWTRWGRVGEYGTSKTIGDGSLANALKQFDAKFKDKSGLSWANRNDPPKPKRYAFVEKSYEPDSDDDNDNDANGQQATGEIKKEEEPESKLPKATQDLIRLIFNQQYFNAAMSDLNYDSAKLPLGKLSKNTISRGFQALKDLSALIDDPSLAQSQYSIFRYQMSWTEATEELSNLYFTVIPHAFGRVRPPIIRSNDLLKKEIELLESLSDMKDAALLMKSDKQKEELNELDRQFRGLGMNEMTPLDQKSDEFAQLKDYLMDTRGATHNANYQIQQIFRIERDGEYGRFEEAHKKPKNRRLLWHGSRCTNFGGILSQGLRIAPPEAPVSGYMFGKGIYLADMSSKSANYCCPYISNGHALLLLCEAELGSMQELTGADYDAGEKAKAKGLLSTWGKGLVGPSRWKDASCIHPSLKGVQVPNTSAAKPGQTNVSGAYLQYNEYICYDISQVRLRYLLRVRM

SEQ ID NO: 11187 - DNA, 2661 bp, Muscodor strobelii
  misc_feature: SGI EST ID NO. CUFF.26642.4
  misc_feature: Variant of the nucleotide sequence at SEQ ID NO 11185
ggacgaccgaataatctcaaaacaaaaggatcaaataaccaaacacactgacatgttttcaacactaggtatcagatgtcatggaccgaagccaccgaggaactctcgaacttatacttcaccgtaatcccgcatgcctttggtcgagttcgaccaccaatcatacggtcgaatgacttgctcaaaaaggaaatagaacttcttgagagcttgagcgacatgaaagacgctgccctattgatgaagtccgataaacagaaggaagaattaaacgaactcgatcgtcaattccggggactgggaatgaatgagatgacaccactggaccagaaaagtgacgagtttgcgcaactcaaggattacctcatggacacccggggagccacccacaacgcaaactatcaaatacaacagatcttccgcattgaacgtgacggggagtatgggcgattcgaggaagctcacaagaagcccaaaaataggcgtcttctttggcacggttctcgctgcaccaatttcggtggaattcttagtcaaggacttcggatcgctccacctgaggctcccgtttcgggatacatgttcggcaaaggaatctatttggcagatatgtcgtcaaagtctgctaactactgctgcccctacatctcgaatgggcatgctcttctgctgctttgtgaagctgaattaggaagcatgcaggagttgacaggcgccgactatgatgcaggcgaaaaagccaaagcgaaaggactactctctacatggggcaaagggttggtaggacctagcagatggaaagacgcttcatgcattcatccctccctcaagggcgttcaggtgcccaacacaagtgctgcaaagcccggccagacgaatgtcagcggcgcttacctgcagtacaatgaatatatttgctatgacatctcccaggtgcgcctgcgatatcttctgcgagtcagaatgtaggatgttctctcctgatgagctttcgctcgcctcgatagacattctgatagccagctgaaccgttattcgacgtcagtatcactattcagacgcgttccggcattgaagtcgcgtgataaaagaactttctgcagtctcagtctatgtgtcaattgtcttgaccgactgtctgcctctatattgacgtatctttctctcaaagaggatattcattctatgtgcttatcgagctgtcaaaaaacagaatccgtaatgctaagaacttatcactattgaacatccctagcattctctgaatggaacatacgcctccactgagcctgagaaagttcaagacggggacactttgcttctggcaggagactttccaactgatttaggtgactatctccttacatagagtacagtgatgattccattcaagagatcttctagttttccagacaggaagtgaaagacactgctactcaattacataagcacgcttcgaaaatttatgataatcagccaatgtaagctactgatgggttttatcctttagtggcatgtaggaagatagagctcacaggtagctcttccaagattatcgtgaatgttggaatcaagacggcagacagaacacaagcagcccgttggaatctgagagtcgtcgcattgcacgaagcactgggggctccgaaacgtgctttggggaattaatttcgcctaatccagtcctcatcaaatagaagaatttgaacgcgagaagcaaagacagaatcaacccttacaccaaggtccaaatactaggaagtcattcgatattcttccctgcgaatagctgaaataacggggctcatgaaagttggatatacaggcgaccgggatgttgctattttgtgagcgcgagtgttctcgcttgaataatattgctttggtaaatcaattaatgaagttgaagtgtaaactcccaggtgtcacggtatacgtagacaagacattaacaattggatacatatttctcgtcattcaaaacgaaggattgaggaaggcactgttcgacaacgtcattcttgttgtccgataacggacggcacctcacaagactcttctcatccttttcgcccacgacgttcaaaacagcttccgttatggacacacgttaagacatagaggacgaaatatttctacgcgtatttttccaagatagttgaacaatccgtctcatgtcatcaagtgtcttttcagaagctctcgtcgcgctgttcatcgcggggctccacctagactcatggaaccccagaaccatcccagccccccggtcaacacatgtggtaacctacatgtacatagtaaatgcctaccaaagctctcattatcacctgcccacctttggcgggacgattcgatattgtacagtaggcacatcagatttcgatgcaacaagatctgacccgctcacgtgccagatcagtacgactgtattgctcttcattttgtaacatgagtcggaaccgtgaacccgatggctgcagcattttaaaatcttttgcacagctggtgaatgacgatacgccgtctttgcaattgctcaatcgtgtacggtttgcagcaaatacagtggtgcttcctgagcaatagaatgatctattgcaaattagctcgcctaacaatgaaacgattgaggtttttacaagcttgcgtggctcagga

SEQ ID NO: 11188 - DNA, 1674 bp, Muscodor strobelii
  misc_feature: SGI cDNA ID NO. 563585
  misc_feature: Elevated expression when VOC is produced
  misc_feature: Encodes the peptide sequence at SEQ ID NO 11189
atgcggcgattacaaacttcgaggctcaagacatgggcggacaaacttgctgttgatcatgaagagggtctttccacccgccaactgatgttgacgaaccatgatctaaaaccagtcgaacccgctcggcgccagtggggaccttggaatttcgttggcttctggatcgctgactcgtttaacatcaacacatggatgatttgctcctctagcgtcgtggctggtttatcatggtggcagacgtggatagcgatctggattggatatttcatctcaggtacctttatctgtatgacgggtcgaatcggtgctacttatcatatcggatttcccgtggtaaatcgtgcgacgttcggtatttggggagcattatggcccgttttcaaccgtgctgtcttggcggcgatttggtacggtgttcagtcttacatcggtggacagtgtgtctatctcatgatcaagtcaatttggaaatcttggggtaccgataagattcacaacacgtttccggcggatgcgggcacgaatacctcctactacgtctcgtttttcatcttttggctggtatcattaccggctatctggtttcccgtgcacaagatccgacatttattcacggtcaaggcatatttcgtacctgttgctggcctctcctttttcatctgggctttggtgagagcgggcggaattggacctattatccaccagccctcttcacttacgggaagcgatctggcatgggaattcgtgctcactgtcttgagttccatcgccaacttcgcaacgctcattgtgaacgatccagacttctcacgtttcgctgctaagcctcgtgatgcattatggtcccagttcttcactatcccaatcggattcgccgttacctcgtttgtgggcatctttgtctcatccagttccgtcattatctatcccggcagtgagccgatttggaaccctctagatctgcttgataacttcattgaggatggtggttctgcccagcgattcggagtctttgtgattgccttcgctttcgctctagcccagctcggcaccaacattgccgccaactccatctcagccggtacagacttgactgctctgctgccaaagtatatcaacattcgtcgtggtggatatatcgctgcagtaattggatttgcgctgtgcccgtatcaattcctgacgagctcaagcaacttcacgacgtatctgtcagcatacgcggtcttcctatgctccattgctggacctatgatctgtgactattacatcgtgcgcaaggggtatctcgacgtgaaggagctgtacgatgcgcgccgtggtggaccttactacttcacttacggcttcaattggcgcgcttacgccggctacatctctggcatcgtcatcaacgttgttggatttgctggcgcactcggtgctgatgtgcctatcggcgccacttacatctacaacgtcaattttttcagtggttttattgtttccgcaggtgtttactggctctgctgcaagctctcgccgattccaaactgcagcgagaagtggctcgaagttggagatcagattgaggacatgcgactagcttacgacgacgatacccccagcgttacgggaagtggcgagcagcacaaatatgatgaggaagcgcccgcagtgaaaaaggaatag

SEQ ID NO: 11189 - protein, 557 aa, Muscodor strobelii
  misc_feature: SGI Peptide ID NO. 563585
  misc_feature (38)..(493): Pfam Id: PF02133 Pfam Desc: Permease for cytosine/purines, uracil, thiamine, allantoin
  misc_feature (13)..(557): NCBI GI: 116194816 Blast Desc: CHGG_04006 [Chaetomium globosum CBS 148.51] gi|88179919|gb|EAQ87387.1| CHGG_04006 [Chaetomium globosum CBS 148.51]
  misc_feature (5)..(534): NCBI GI: 39945764 Blast Desc: MGG_08002 [Magnaporthe grisea 70-15] gi|145019234|gb|EDK03462.1| MGG_08002 [Magnaporthe grisea 70-15]
  misc_feature (5)..(543): NCBI GI: 171683453 Blast Desc: protein product [Podospora anserina] gi|170941686|emb|CAP67340.1| protein product [Podospora anserina]
  misc_feature (5)..(557): NCBI GI: 85108010 Blast Desc: uracil permease [Neurospora crassa OR74A] gi|28924099|gb|EAA33256.1| uracil permease [Neurospora crassa OR74A]
  misc_feature (7)..(557): NCBI GI: 256727388 Blast Desc: NECHADRAFT_76199 [Nectria haematococca mpVI 77-13-4]
  misc_feature (7)..(550): NCBI GI: 46121799 Blast Desc: FG05277.1 [Gibberella zeae PH-1]
  misc_feature (1)..(550): NCBI GI: 189199870 Blast Desc: uracil permease [Pyrenophora tritici-repentis Pt-1C-BFP] gi|187983371|gb|EDU48859.1| uracil permease [Pyrenophora tritici-repentis Pt-1C-BFP]
  misc_feature (1)..(557): NCBI GI: 156065759 Blast Desc: SS1G_00890 [Sclerotinia sclerotiorum 1980] gi|154691749|gb|EDN91487.1| SS1G_00890 [Sclerotinia sclerotiorum 1980]
  misc_feature (7)..(537): NCBI GI: 121701343 Blast Desc: uridine permease Fui1, [Aspergillus clavatus NRRL 1] gi|119397079|gb|EAW07510.1| uridine permease Fui1, [Aspergillus clavatus NRRL 1]
  misc_feature (7)..(556): NCBI GI: 70995872 Blast Desc: uridine permease Fui1 [Aspergillus fumigatus Af293] gi|66850326|gb|EAL90653.1| uridine permease Fui1, [Aspergillus fumigatus Af293] gi|159131446|gb|EDP56559.1| uridine permease
  misc_feature: Useful for introducing or modulating the production of volatile compounds
MRRLQTSRLKTWADKLAVDHEEGLSTRQLMLTNHDLKPVEPARRQWGPWNFVGFWIADSFNINTWMICSSSVVAGLSWWQTWIAIWIGYFISGTFICMTGRIGATYHIGFPVVNRATFGIWGALWPVFNRAVLAAIWYGVQSYIGGQCVYLMIKSIWKSWGTDKIHNTFPADAGTNTSYYVSFFIFWLVSLPAIWFPVHKIRHLFTVKAYFVPVAGLSFFIWALVRAGGIGPIIHQPSSLTGSDLAWEFVLTVLSSIANFATLIVNDPDFSRFAAKPRDALWSQFFTIPIGFAVTSFVGIFVSSSSVIIYPGSEPIWNPLDLLDNFIEDGGSAQRFGVFVIAFAFALAQLGTNIAANSISAGTDLTALLPKYINIRRGGYIAAVIGFALCPYQFLTSSSNFTTYLSAYAVFLCSIAGPMICDYYIVRKGYLDVKELYDARRGGPYYFTYGFNWRAYAGYISGIVINVVGFAGALGADVPIGATYIYNVNFFSGFIVSAGVYWLCCKLSPIPNCSEKWLEVGDQIEDMRLAYDDDTPSVTGSGEQHKYDEEAPAVKKE

SEQ ID NO: 11190 - DNA, 2201 bp, Muscodor strobelii
  misc_feature: SGI EST ID NO. CUFF.26671.0
  misc_feature: Variant of the nucleotide sequence at SEQ ID NO 11188
cctggtaaatagaactagaagcgcaaatctgaatgtaagcgatttcgcctatatagtctgctattccgcctcgtcgcagatcgatgcgttgcaccggagctgtcgttcatcatattcggtagatatctcacatttaagaatatcgatatcttaaaaatatcgaattcgttgcggctactccctcacccccagagaccctctcgtcggcaattagcgtcattgcttagtccggcgccacaaccccggctcctaaggatctcgcagtttctattacacaaacattactcgacagaaacgttgacgagagcctcacacaacgttgtgggccctattttcttacgatgcggcgattacaaacttcgaggctcaagacatgggcggacaaacttgctgttgatcatgaagagggtctttccacccgccaactgatgttgacgaaccatgatctaaaaccagtcgaacccgctcggcgccagtggggaccttggaatttcgttggcttctggatcgctgactcgtttaacatcaacacatggatgatttgctcctctagcgtcgtggctggtttatcatggtggcagacgtggatagcgatctggattggatatttcatctcaggtacctttatctgtatgacgggtcgaatcggtgctacttatcatatcggatttcccgtggtaaatcgtgcgacgttcggtatttggggagcattatggcccgttttcaaccgtgctgtcttggcggcgatttggtacggtgttcagtcttacatcggtggacagtgtgtctatctcatgatcaagtcaatttggaaatcttggggtaccgataagattcacaacacgtttccggcggatgcgggcacgaatacctcctactacgtctcgtttttcatcttttggctggtatcattaccggctatctggtttcccgtgcacaagatccgacatttattcacggtcaaggcatatttcgtacctgttgctggcctctcctttttcatctgggctttggtgagagcgggcggaattggacctattatccaccagccctcttcacttacgggaagcgatctggcatgggaattcgtgctcactgtcttgagttccatcgccaacttcgcaacgctcattgtgaacgatccagacttctcacgtttcgctgctaagcctcgtgatgcattatggtcccagttcttcactatcccaatcggattcgccgttacctcgtttgtgggcatctttgtctcatccagttccgtcattatctatcccggcagtgagccgatttggaaccctctagatctgcttgataacttcattgaggatggtggttctgcccagcgattcggagtctttgtgattgccttcgctttcgctctagcccagctcggcaccaacattgccgccaactccatctcagccggtacagacttgactgctctgctgccaaagtatatcaacattcgtcgtggtggatatatcgctgcagtaattggatttgcgctgtgcccgtatcaattcctgacgagctcaagcaacttcacgacgtatctgtcagcatacgcggtcttcctatgctccattgctggacctatgatctgtgactattacatcgtgcgcaaggggtatctcgacgtgaaggagctgtacgatgcgcgccgtggtggaccttactacttcacttacggcttcaattggcgcgcttacgccggctacatctctggcatcgtcatcaacgttgttggatttgctggcgcactcggtgctgatgtgcctatcggcgccacttacatctacaacgtcaattttttcagtggttttattgtttccgcaggtgtttactggctctgctgcaagctctcgccgattccaaactgcagcgagaagtggctcgaagttggagatcagattgaggacatgcgactagcttacgacgacgatacccccagcgttacgggaagtggcgagcagcacaaatatgatgaggaagcgcccgcagtgaaaaaggaatagtggagctagacaggcattataggaagcaaagtcgagctgcatgctagaaattgcagcagaacttgaaatccaaagaagataaaatctcctcagtagatactgctcgacttttagcatatatgagagacgcccaatgataccacgattgaattttgaggacaactcagaacaagcttttgcgaggct

SEQ ID NO: 11191 - DNA, 249 bp, Muscodor strobelii
  misc_feature: SGI cDNA ID NO. 563586
  misc_feature: Elevated expression when VOC is produced
  misc_feature: Encodes the peptide sequence at SEQ ID NO 11192
atgcccaacaactcagactactcctacaagagctctggcaccaacagccagggcaaccactactgcgcccgtgactacggcagcagcgcctccaactccaactcttatcactactccaacaccgacggctcttactactattccaacccgaatggttccacctaccacagcagtgcctcgggcaactctacctacacctcgccctctggcagcacccacacttcctctggctccagcggcaagaagtaa

SEQ ID NO: 11192 - protein, 82 aa, Muscodor strobelii
  misc_feature: SGI Peptide ID NO. 563586
  misc_feature (1)..(70): NCBI GI: 119483972 Blast Desc: NFIA_096130 [Neosartorya fischeri NRRL 181] gi|119410045|gb|EAW19992.1| conserved [Neosartorya fischeri NRRL 181]
  misc_feature (7)..(82): NCBI GI: 255940382 Blast Desc: Pc16g06240 [Penicillium chrysogenum Wisconsin 54-1255] gi|211585583|emb|CAP93294.1| Pc16g06240 [Penicillium chrysogenum Wisconsin 54-1255]
  misc_feature (1)..(68): NCBI GI: 242812672 Blast Desc: conserved [Talaromyces stipitatus ATCC 10500] gi|218714345|gb|EED13768.1| conserved [Talaromyces stipitatus ATCC 10500]
  misc_feature (1)..(70): NCBI GI: 238845643 Blast Desc: conserved [Microsporum canis CBS 113480]
  misc_feature (1)..(73): NCBI GI: 39940660 Blast Desc: MGG_04910 [Magnaporthe grisea 70-15] gi|145010856|gb|EDJ95512.1| MGG_04910 [Magnaporthe grisea 70-15]
  misc_feature (1)..(68): NCBI GI: 212544532 Blast Desc: conserved [Penicillium marneffei ATCC 18224] gi|210065389|gb|EEA19483.1| conserved [Penicillium marneffei ATCC 18224]
  misc_feature (7)..(77): NCBI GI: 119192188 Blast Desc: [Coccidioides immitis RS]
  misc_feature (7)..(75): NCBI GI: 242206886 Blast Desc: [Postia placenta Mad-698-R] gi|242211579|ref|XP_002471627.1| [Postia placenta Mad-698-R] gi|220729303|gb|EED83180.1| [Postia placenta Mad-698-R] [Postia
  misc_feature (7)..(70): NCBI GI: 225685045 Blast Desc: [Paracoccidioides brasiliensis Pb03]
  misc_feature (7)..(66): NCBI GI: 189203323 Blast Desc: PTRG_07665 [Pyrenophora tritici-repentis Pt-1C-BFP] gi|187985096|gb|EDU50584.1| PTRG_07665 [Pyrenophora tritici-repentis Pt-1C-BFP]
  misc_feature: Useful for introducing or modulating the production of volatile compounds
MPNNSDYSYKSSGTNSQGNHYCARDYGSSASNSNSYHYSNTDGSYYYSNPNGSTYHSSASGNSTYTSPSGSTHTSSGSSGKK

SEQ ID NO: 11193 - DNA, 1229 bp, Muscodor strobelii
  misc_feature: SGI EST ID NO. CUFF.26894.1
  misc_feature: Variant of the nucleotide sequence at SEQ ID NO 11191
ttttactagatacacatccttgcgtataccaggccgcaacagacatcgctccagtgtctcgtggttcctgcatccaatttcatgtttggatcgtgtccgcttcaagaaacaaaacgatatggagatatgaagatatatgcgagtgaggcttggaagtcggcacatagatgggatgtaaaggaatgagacctttcttgtcccatcgcaggcagtacaaacttcgagaattcggatgtaagccaaatttgggtttcgcctgccttagccctgaatctaatagcacagaggagtcgccgttagaagcctcccctccgtcttatctcgtcgttgccagcaacatttaatctcgggtaggcacatctggttcccgtgcaggaggtgagacacatggggtgcgtaccttattgaatctaaggcaaccgggtgcgagccgtgcattgacaaggtaaccctgggtgactgcacaccgccatatataatcctcatgaggcccttcattcaactcactcctcttcccttcacaatcaacaaaataccaaagactttgagtcaacatcaactacttactactcaatcaccgaaccaaagccaagatgcccaacaactcagactactcctacaagagctctggcaccaacagccagggcaaccactactgcgcccgtgactacggcagcagcgcctccaactccaactcttatcactactccaacaccgacggctcttactactattccaacccgaatggttccacctaccacagcagtgcctcgggcaactctacctacacctcgccctctggcagcacccacacttcctctggctccagcggcaagaagtaaaaccgcagcggatgtcgatgctgctatcgtgctctgaagggcgagagtatgagccggaagtatgagcagagcgaacgaattctgagagcgggcatttgattccgatgctttgcagcgcaggcgtctgcggaatggcgacggcttagctcagcagatagtatctagagaataagagtatcttagataccgcgtgcttgtttttctcgtaatcgccagtgtcgcttggtgcttctcgtgagaaagagaattatgtgaatcctgtaaacaccattagcagtacttgtctgtaatactacaccgcgccaacttaccatgttcactttggaatctgctgatcctgttccaaccttcgatatgcttacatcttgtgatgaatacttaaatgag

SEQ ID NO: 11194 - DNA, 489 bp, Muscodor strobelii
  misc_feature: SGI cDNA ID NO. 563587
  misc_feature: Elevated expression when VOC is produced
  misc_feature: Encodes the peptide sequence at SEQ ID NO 11195
atgcattacaatatccttggaacaacgttagctctcggctatgtagccggagctgctatggcacaattcagctactccgagactgaattcacgtttaacaattattgtaaaactactacttggaacaacgagacaacctccaactcccctttcatatccgattgtaagaagatcgtcgacatgttctacgagcataaaaagacgggcgtggagcttaaccaaccctggaaggatggcgacaaggagactccctaccttggcgtcgggtactatgggtcttgcgtctttgggcttagagttgttgatacggagaatgaggagattgcgccgatggctgggaaggatatgggtgatatcgtgtcagatgctattaaaaaatttggacggaacggcaaggtgggagccagtggtgaggttccttgtacggcaaattgggtgacggataaggagcatactattggttggagactatttacttggggacagtga

SEQ ID NO: 11195 - protein, 162 aa, Muscodor strobelii
  misc_feature: SGI Peptide ID NO. 563587
  misc_feature (36)..(158): NCBI GI: 46138093 Blast Desc: FG10561.1 [Gibberella zeae PH-1]
  misc_feature (35)..(144): NCBI GI: 171678545 Blast Desc: protein product [Podospora anserina] gi|170937342|emb|CAP62000.1| protein product [Podospora anserina]
  misc_feature (36)..(158): NCBI GI: 255942056 Blast Desc: Pc16g15030 [Penicillium chrysogenum Wisconsin 54-1255] gi|211586420|emb|CAP94173.1| Pc16g15030 [Penicillium chrysogenum Wisconsin 54-1255]
  misc_feature (32)..(158): NCBI GI: 85083115 Blast Desc: NCU04482 [Neurospora crassa OR74A] gi|28918135|gb|EAA27815.1| [Neurospora crassa OR74A]
  misc_feature (34)..(158): NCBI GI: 256735666 Blast Desc: NECHADRAFT_75748 [Nectria haematococca mpVI 77-13-4]
  misc_feature (34)..(144): NCBI GI: 164424205 Blast Desc: NCU07484 [Neurospora crassa OR74A] gi|157070418|gb|EAA35795.2| [Neurospora crassa OR74A]
  misc_feature (34)..(143): NCBI GI: 46139607 Blast Desc: FG11318.1 [Gibberella zeae PH-1]
  misc_feature (36)..(144): NCBI GI: 238842163 Blast Desc: chitinase [Microsporum canis CBS 113480]
  misc_feature (16)..(157): NCBI GI: 116200939 Blast Desc: [Chaetomium globosum CBS 148.51] gi|88176872|gb|EAQ84340.1| [Chaetomium globosum CBS 148.51]
  misc_feature (53)..(157): NCBI GI: 116200376 Blast Desc: [Chaetomium globosum CBS 148.51] gi|88175447|gb|EAQ82915.1| [Chaetomium globosum CBS 148.51]
  misc_feature: Useful for introducing or modulating the production of volatile compounds
MHYNILGTTLALGYVAGAAMAQFSYSETEFTFNNYCKTTTWNNETTSNSPFISDCKKIVDMFYEHKKTGVELNQPWKDGDKETPYLGVGYYGSCVFGLRVVDTENEEIAPMAGKDMGDIVSDAIKKFGRNGKVGASGEVPCTANWVTDKEHTIGWRLFTWGQ

SEQ ID NO: 11196 - DNA, 1242 bp, Muscodor strobelii
  misc_feature: SGI EST ID NO. CUFF.26625.0
  misc_feature: Variant of the nucleotide sequence at SEQ ID NO 11194
gtcgtattattcttggaatgaaaagcgacccttcctacttcttgatatagtaacaagtctaactaccatactgcaacatttttcgcaagatgcattacaatatccttggaacaacgttagctctcggctatgtagccggagctgctatggcacaattcagctactccgagactgaattcacgtttaacaattattgtaaaactactacttggaacaacgagacaacctccaactcccctttcatatccgattgtaagaagatcgtcgacatgttctacgagcataaaaagacgggcgtggagcttaaccaaccctggaaggatggcgacaaggagactccctaccttggcgtcgggtactatgggtcttgcgtctttgggcttagagttgttgatacggagaatgaggagattgcgccgatggctgggaaggatatgggtgatatcgtgtcagatgctattaaaaaatttggacggaacggcaaggtgggagccagtggtgaggttccttgtacggcaaattgggtgacggataaggagcatactattggttggagactatttacttggggacagtgaggggctgaggtgttgtgttcttattttatagctttctacaacctttgtgtctccctcgtagtgacgtttttccttcttcgagatgcctgcgcatccgaccttcctttgatatatagtcgtaggttatactgttctaatactatacgtgatacaatcgcaatttaaacattttcaatgagcaatgatttcggtgactttctcacaaaaagaaaacatgaaacatggtatcacagacttcctgatggccgagagaaggccaagaagcgagaggcaaagtttgcagaagactacaaaatgagggcatctccgtctactcaacattgagtcttattgtatcctagcatcgtccaatctaaattttgctgttctcatccgatagacgaagatggtacggggtgagttgacgcacactcaatagtattgatgccctgaaaccggatgccaccaatttgtccgcatgcgagttgaaaagactagtgctattatgagaaaggtatgtcaaactcatctagtgatagtgatatttggtctgtagatgatgccaagttagagcgtattgattgttagtgctaagatagcgcaatactacgtttagatatgcatattctaaattcatgttcagataaaggatgtgggtagaagaagaaatacataggtaccacac

SEQ ID NO: 11197 - DNA, 1212 bp, Muscodor strobelii
  misc_feature: SGI cDNA ID NO. 563588
  misc_feature: Reduced expression when VOC is produced
  misc_feature: Encodes the peptide sequence at SEQ ID NO 11198
atgccgattggtgaccttctggccgagatctccggcggccagccatcgcccgcgccctctcccaagccatcttcatcattaggtgtcaagcgcaaggcggcggatgatgattctaatggcgcaacctccaccaaactcacgaagtcccgccaacctgatggctcttactctaccatgaaagctgcactccccagccgttcctcttcctctgcaaacttgtcaagcctcccccatcgcaccagctcgccctcgacgacaaacggtcgctacgagccacctgctccgaatatgcaacgctctgcctcggcttccaatggcaagccgtctgcactaccctctaaagccatgtcatccgctaagccgtcttccgatgcctcttcccgtggccgcgtgcctccacccatcgcatctgccgctagagcgtctccggctaaaccttcaccaacgactcccaccgcatcagcaggtcctcccaaaaagggctctttcaaggagatcatggcccgtgcttcgagagctcaagagacgatggggaaagtgggaacaattcaacatcgggctatagagaagccggtggtgaagaaagagcgtgggatgtccaaagtggacgccaaagctggaccgacttcgagtgcaaaggacagaattggtaagccatatacgggaagcagtcggcctccgatgaaacctggaagggatggtggacggccggcaatcaatggccagagaactggtactgggaaggacgccaaacccaacggcaagtcgagaccgactgcgaatgatcctcccgaaaagaagatcaaaaagtctgcagtggctacgacgggctattctggaacagcacgtcctcgacctggagctacgacgagcaaaggttcatccgccaagggcagtcatcgtcccgcctcagggggtctgcttgcaccaccacgccttggtggtcgcagcagatatgacgacgatgagtttgacgaggacctcgatgactttgttgactatgatgacgaggaggaagatgaggggcctcgctataactatgcttcagatgaatccagcgacatggaagccggcatgtccgatatcgacaatgaagagaggagagccgagtttgccgcacgcgaggaagataaacgcgagcaagcactcgaggagaaactgaagagagaaaaggaggaacgcaaacgacgatgggcacagggaggccgataa

SEQ ID NO: 11198 - protein, 403 aa, Muscodor strobelii
  misc_feature: SGI Peptide ID NO. 563588
  misc_feature (297)..(397): Pfam Id: PF08243 Pfam Desc: SPT2 chromatin protein
  misc_feature (1)..(396): NCBI GI: 85117070 Blast Desc: NCU00980 [Neurospora crassa OR74A] gi|28926977|gb|EAA35937.1| [Neurospora crassa OR74A] gi|38567052|emb|CAE76350.1| [Neurospora crassa]
  misc_feature (1)..(400): NCBI GI: 46122453 Blast Desc: FG05604.1 [Gibberella zeae PH-1]
  misc_feature (1)..(400): NCBI GI: 39941958 Blast Desc: MGG_10828 [Magnaporthe grisea 70-15] gi|145021637|gb|EDK05766.1| MGG_10828 [Magnaporthe grisea 70-15]
  misc_feature (1)..(382): NCBI GI: 116192291 Blast Desc: CHGG_05863 [Chaetomium globosum CBS 148.51] gi|88181776|gb|EAQ89244.1| CHGG_05863 [Chaetomium globosum CBS 148.51]
  misc_feature (1)..(379): NCBI GI: 171684325 Blast Desc: protein product [Podospora anserina] gi|170942123|emb|CAP67775.1| protein product [Podospora anserina]
  misc_feature (1)..(399): NCBI GI: 256729659 Blast Desc: NECHADRAFT_95470 [Nectria haematococca mpVI 77-13-4]
  misc_feature (1)..(399): NCBI GI: 156063168 Blast Desc: SS1G_01700 [Sclerotinia sclerotiorum 1980] gi|154697036|gb|EDN96774.1| SS1G_01700 [Sclerotinia sclerotiorum 1980]
  misc_feature (1)..(399): NCBI GI: 154308978 Blast Desc: BC1G_08017 [Botryotinia fuckeliana B05.10] gi|150852643|gb|EDN27835.1| BC1G_08017 [Botryotinia fuckeliana B05.10]
  misc_feature (133)..(384): NCBI GI: 225561847 Blast Desc: conserved [Ajellomyces capsulatus G186AR]
  misc_feature (137)..(384): NCBI GI: 261198322 Blast Desc: conserved [Ajellomyces dermatitidis SLH14081] gi|239595526|gb|EEQ78107.1| conserved [Ajellomyces dermatitidis SLH14081]
  misc_feature: Useful for introducing or modulating the production of volatile compounds
MPIGDLLAEISGGQPSPAPSPKPSSSLGVKRKAADDDSNGATSTKLTKSRQPDGSYSTMKAALPSRSSSSANLSSLPHRTSSPSTTNGRYEPPAPNMQRSASASNGKPSALPSKAMSSAKPSSDASSRGRVPPPIASAARASPAKPSPTTPTASAGPPKKGSFKEIMARASRAQETMGKVGTIQHRAIEKPVVKKERGMSKVDAKAGPTSSAKDRIGKPYTGSSRPPMKPGRDGGRPAINGQRTGTGKDAKPNGKSRPTANDPPEKKIKKSAVATTGYSGTARPRPGATTSKGSSAKGSHRPASGGLLAPPRLGGRSRYDDDEFDEDLDDFVDYDDEEEDEGPRYNYASDESSDMEAGMSDIDNEERRAEFAAREEDKREQALEEKLKREKEERKRRWAQGGR

SEQ ID NO: 11199 - DNA, 1991 bp, Muscodor strobelii
  misc_feature: SGI EST ID NO. CUFF.26668.1
  misc_feature: Variant of the nucleotide sequence at SEQ ID NO 11197
gtttgtctgggctcgtgctccctcaccccacgccgcttccgatccctttaacatcacgacggctcggaattcgcatgtcttagtcgtcgtactattctcaacactcctttatccgctttcatagcttaatttaagactccggcaagggcacgggggaggatcgggagtatcattgcacccaagacacagcccactcgccctatgactctccaactgctgtaaccgtcatcggcactactcgcaaaaaagggatatttttcaaatatcgtctcatttgcgccgagtctaccaaaatgccgattggtgaccttctggccgagatctccggcggccagccatcgcccgcgccctctcccaagccatcttcatcattaggtgtcaagcgcaaggcggcggatgatgattctaatggcgcaacctccaccaaactcacgaagtcccgccaacctgatggctcttactctaccagtaagataacccgtgatgaccaaggccgagttgttgagcggtcttactcagtctcgcgaccagtgaaagctgcactccccagccgttcctcttcctctgcaaacttgtcaagcctcccccatcgcaccagctcgccctcgacgacaaacggtcgctacgagccacctgctccgaatatgcaacgctctgcctcggcttccaatggcaagccgtctgcactaccctctaaagccatgtcatccgctaagccgtcttccgatgcctcttcccgtggccgcgtgcctccacccatcgcatctgccgctagagcgtctccggctaaaccttcaccaacgactcccaccgcatcagcaggtcctcccaaaaagggctctttcaaggagatcatggcccgtgcttcgagagctcaagagacgatggggaaagtgggaacaattcaacatcgggctatagagaagccggtggtgaagaaagagcgtgggatgtccaaagtggacgccaaagctggaccgacttcgagtgcaaaggacagaattggtaagccatatacgggaagcagtcggcctccgatgaaacctggaagggatggtggacggccggcaatcaatggccagagaactggtactgggaaggacgccaaacccaacggcaagtcgagaccgactgcgaatgatcctcccgaaaagaagatcaaaaagtctgcagtggctacgacgggctattctggaacagcacgtcctcgacctggagctacgacgagcaaaggttcatccgccaagggcagtcatcgtcccgcctcagggggtctgcttgcaccaccacgccttggtggtcgcagcagatatgacgacgatgagtttgacgaggacctcgatgactttgttgactatgatgacgaggaggaagatgaggggcctcgctataactatgcttcagatgaatccagcgacatggaagccggcatgtccgatatcgacaatgaagagaggagagccgagtttgccgcacgcgaggaagataaacgcgagcaagcactcgaggagaaactgaagagagaaaaggaggaacgcaaacgacgatgggcacagggaggccgataaaactaatacttgaccctacacccttcactctgtccaacacacgagcctacgaacttctgctttttcggcgtacagctgcgggagcgcgcagcggagcactttgttacaacaactttagcatctcgctgcattgcgcaaaggggcgcataagaagtttcggcgttcggagactgactccctttgttttactattcgagcattcatcgagaccatctggtacggaacatccagatacacttggctacaggggcgtttcgtggatacacgggtctagtccgtatttgtttgagtactgttgttaggctaagcatgctgctcagttgcagcttttacactgctagaaaataggacttgtgtatacattacatttacccgtttcctcgtcatgatctaagtattgttgactgtaaacataaaatttgc

SEQ ID NO: 11200 - DNA, 333 bp, Muscodor strobelii
  misc_feature: SGI cDNA ID NO. 563589
  misc_feature: Reduced expression when VOC is produced
  misc_feature: Encodes the peptide sequence at SEQ ID NO 11201
atgaagcacctcgcagcttacctcctcctgggtcttggtggcaacacctccccctctgcctccgacatcaagtccgtcctcgactctgtcggtatcgaggctgacgatgaccgcttggagaagctcctctccgagctcgacggcaaggacgtcaacgagctgatctctgagggttccaccaagctcgcctccgttcccagcggtggtgccggtggcgccgctgctggtggtgctgccgccggcggtgctgctgctgccgaggagaaggccgaggagaaggaagaggagaaggaggagtccgacgaggacatgggtttcggtctcttcgactaa

SEQ ID NO: 11201 - protein, 110 aa, Muscodor strobelii
  misc_feature: SGI Peptide ID NO. 563589
  misc_feature (17)..(109): Pfam Id: PF00428 Pfam Desc: 60s Acidic ribosomal protein
  misc_feature (1)..(110): NCBI GI: 85117066 Blast Desc: 60S acidic ribosomal protein P2 [Neurospora crassa OR74A] gi|28926976|gb|EAA35936.1| 60S acidic ribosomal protein P2 [Neurospora crassa OR74A] gi|38567051|emb|CAE76349.1| ribosomal
  misc_feature (1)..(110): NCBI GI: 256729844 Blast Desc: NECHADRAFT_71015 [Nectria haematococca mpVI 77-13-4]
  misc_feature (1)..(110): NCBI GI: 238845220 Blast Desc: 60S acidic ribosomal protein P2/allergen Asp F 8 [Microsporum canis CBS 113480]
  misc_feature (1)..(110): NCBI GI: 225561848 Blast Desc: 60S acidic ribosomal protein P2 [Ajellomyces capsulatus G186AR]
  misc_feature (1)..(110): NCBI GI: 261357588 Blast Desc: 60S acidic ribosomal protein P2 [Verticillium albo-atrum VaMs.102]
  misc_feature (1)..(110): NCBI GI: 44888530 Blast Desc: RLA2_RHOGU RecName: Full=60S acidic ribosomal protein P2; AltName: Full=Acyl carrier protein gi|16904073|gb|AAL30745.1| acyl carrier protein [Rhodotorula glutinis]
  misc_feature (1)..(110): NCBI GI: 171684327 Blast Desc: protein product [Podospora anserina] gi|41688719|sp|Q9C3Z5.1|RLA2_PODAN RecName: Full=60S acidic ribosomal protein P2 gi|12963432|gb|AAK11263.1|AF331715_1 protein
  misc_feature (1)..(110): NCBI GI: 119195695 Blast Desc: CIMG_02222 [Coccidioides immitis RS] gi|240110468|gb|EER28626.1| 60S acidic ribosomal protein P2, [Coccidioides posadasii C735 delta SOWgp]
  misc_feature (1)..(110): NCBI GI: 240275455 Blast Desc: 60S acidic ribosomal protein P2 [Ajellomyces capsulatus H143]
  misc_feature (1)..(110): NCBI GI: 159145748 Blast Desc: ribosomal protein P2 [Barentsia elongata]
  misc_feature: Useful for introducing or modulating the production of volatile compounds
MKHLAAYLLLGLGGNTSPSASDIKSVLDSVGIEADDDRLEKLLSELDGKDVNELISEGSTKLASVPSGGAGGAAAGGAAAGGAAAAEEKAEEKEEEKEESDEDMGFGLFD

SEQ ID NO: 11202 - DNA, 1039 bp, Muscodor strobelii
  misc_feature: SGI EST ID NO. CUFF.26890.0
  misc_feature: Variant of the nucleotide sequence at SEQ ID NO 11200
tggctgagcttgcccccacacagcccgcctaaagctgtccccaccacccacgaattgagagcctgcgcaaaaagaagagccctgtcacgccgaacttttaattgcctggctcgaacatttccaaacccatcccacttcgacctcgtcacaccgaaacaacctcagaactcgaaggctcagtctccgcgcaatctcgcggttaaatcgattgatttctcgtgttctacccacttcccaacaatcaaaacaccatcaaaatgaagcacctcgcagcttacctcctcctgggtcttggtggcaacacctccccctctgcctccgacatcaagtccgtcctcgactctgtcggtatcgaggctgacgatgaccgcttggagaagctcctctccgagctcgacggcaaggacgtcaacgagctgatctctgagggttccaccaagctcgcctccgttcccagcggtggtgccggtggcgccgctgctggtggtgctgccgccggcggtgctgctgctgccgaggagaaggccgaggagaaggaagaggagaaggaggagtccgacgaggacatgggtttcggtctcttcgactaagcgcctttcacgacctcaacaaaaaacgaaaagtcatgacactggagatcgggtacgcaactgggcaacgatggtcttgcatggcatctggcgtggaagggtttgcttttaatcatgttcgggaaatccaggtatattgagctgagatgtctggacggattatggcaaaaatgaacatcgacgatacctctccatttgctgtgcttggtcctcccacaatgtgatgaatcttcaaaatgagcggctctcttcattgcaaactaacaaccttgaccgctcacctcctgatattttgatctgggttgacacgatgaatggcctgtgttccccaaggagtcgtagagatgtgactattctgcggtagttgattgacactaacgatgtcatattctgaatttgagatatgcggctctagcaatactaatgcgccaagatgtgtgttatacgga

SEQ ID NO: 11203 - DNA, 2706 bp, Muscodor strobelii
  misc_feature: SGI cDNA ID NO. 563590
  misc_feature: Encodes the peptide sequence at SEQ ID NO 11204
atgattgctgcggcccctacgcccgtgggcgatgcccctggccagtcctccataatcgcaagaaaaacatcattacggtccggcctccgcagaggcgccgcaagaccaccgctcagtcgcgccgaatcgaatccagtactcccagcgacagccgaatcgcaaacccagcttgcgggccatgagagctccgatgatgagatacctgttcctatgaagctcagcgctctcactaaagctctcctgaacgatggcgagcctggcgcggagaatggacccagccgtgttagaacccgagctcaaagccagcgcccatcatcgccaattcaacccgaacaggagaaacccgtcaaaagaagaagcgtgctcagcagctctatagcttcaattggcgaagagagaagacagactcgcgctagcagcgcccaaccagttgtagatcgcccatcatcgccagtcaggagtcaaccaagcagagagaacagcccggttagaaagcgagttgttcggctgagctccaattctcaagcatcatctgcctctgtcgcttcatcattcaagccttcgaagagaaggtccaatgcttcatcagcaaacatatcgacttcgtcagctgccctaccaaccaggaccagagctcctagtagggaacggtccactgaagagaagggcaatgtttccgaggtcaaagatagagatgtaaacacaccaagtcaacaaggtcgtgtggtgagaatcgccgtaggatcttctggaggcagaggacgatcgactggctctgctctttcttcccaaagaccaggctcggcgcttcagggcgaggacaaagatatgcctgaggagccacgaaccgcagcccggtctcagcccgaagcaaacctaggcagtgtctcacgactcggctcgaatggctctcgaaaccgcaacgaggacaatcaagcattgcaaagctcaatgcgagtaaaacgagtcggcaaaattcccggcagctttcttagcgggcctgctcgccgtggcactcgcagaagacagagtgaagaagacgctgagaacagaggagagcttctaccaacaagtcaagaagatgctgatggccaacacccagaagatctcatcgacttggggccggtagaagacctgctcccttcctattaccaaccagaccgtattgcctcggggagtcctgttagtgccaagcactcctcaagacccggtctgcacagagagttaccatctgcggataagggccgggctttacgatctcgtcaaaactcccctgagcaggaggagatcccaattccacattaccgagtcccacctcctcggccagctgatctcccttcaagacatgatcaagaaaacgaagctcctccaacattcaagagaaacaagcctgagggtgtcttactctcaaaggaagcacccaagccatcaatccgagccataagtagtgacgccggtgccgtgcgacccgttagtcccgagcgcaaagcactaggcgcactaagccgcaacacacctcatagagccgctcccgcaccaccaccaaagatgtccatcctagacgccgccacatcaacagccggcgcagctgccgcgacaggagcaggcagacgaagaaattacatgaaagtcaacggcaaatgctacacacgcatcgactccttgggtcgcggaggtacgagtaaggtgtaccgagtagcagccgacaacggcaagatgtttgctctgaagcgcgtgacgctcgataatctcgacgagggcacgatcaagagttataaaggggagattgacctcctgcggaaactcacgaatgtcgagcgtgttattacgttgtttgattatgaacttaacgaagaacgacatctgctcagtcttctcatggaagtaggagaactagatctaaacaccctcctccggcaacgtttctcccacgaaaacgcaaaattcgacccagtattcatacgtttctactgggcggaaatgctcgaatgtctcgccgcagtgcacgcacaagacatagtccactccgacctgaaacccgcgaatttcgtcctagtccagggccgtctgaaactaatagatttcggcatcgcaaacgcgatagccatcgaagaaacagtaaacgtccacagagaaacccagatcggaacaccgaactatatgtcgccagagagtttgattgattcgaatgccgcgggaagcggtagacgagtttctattggcgtgaagcctaaacttatgaaaatcggaaaaccatcggatatctggagtctgggatgtattttattccagatggtatatggcgttgcgccgttcggtcatataccgaaccaaatggcgcgctgccacgcgattatcaattggaattacgacattgagttccgctccaagggactgggagacgtcactgtgccgccgagtctgatacagacgatgaagaggtgtttacagagggatatcgcactgagaccgacggtacaggagttattaggcgaaaaagatccgtttttgtaccctgttgagacgcctgagggcagtctgccgatcactgaggagttattgggtaggattattcagagtgttgtgagtcggtgtagggagaggatgccgagtgagggggaggtacttggtgcttggcccatggcgtattgggctagtgttgggaaggctgtgggcttggaaagtaaggctgctgagaggaggtag

SEQ ID NO: 11204 - protein, 901 aa, Muscodor strobelii
  misc_feature: SGI Peptide ID NO. 563590
  misc_feature (549)..(837): Pfam Id: PF00069 Pfam Desc: Protein kinase domain
  misc_feature (1)..(892): NCBI GI: 46108510 Blast Desc: FG01137.1 [Gibberella zeae PH-1]
  misc_feature (1)..(892): NCBI GI: 256734400 Blast Desc: [Nectria haematococca mpVI 77-13-4]
  misc_feature (3)..(891): NCBI GI: 171684329 Blast Desc: protein product [Podospora anserina] gi|170942125|emb|CAP67777.1| protein product [Podospora anserina]
  misc_feature (1)..(892): NCBI GI: 39941954 Blast Desc: MGG_10826 [Magnaporthe grisea 70-15] gi|145021635|gb|EDK05764.1| MGG_10826 [Magnaporthe grisea 70-15]
  misc_feature (1)..(891): NCBI GI: 85117064 Blast Desc: NCU00978 [Neurospora crassa OR74A] gi|28926975|gb|EAA35935.1| conserved [Neurospora crassa OR74A] gi|38567050|emb|CAE76348.1| related to protein kinase RPK1
  misc_feature (1)..(890): NCBI GI: 156062634 Blast Desc: SS1G_01433 [Sclerotinia sclerotiorum 1980] gi|154696769|gb|EDN96507.1| SS1G_01433 [Sclerotinia sclerotiorum 1980]
  misc_feature (1)..(890): NCBI GI: 154308854 Blast Desc: BC1G_07955 [Botryotinia fuckeliana B05.10] gi|150852581|gb|EDN27773.1| BC1G_07955 [Botryotinia fuckeliana B05.10]
  misc_feature (422)..(897): NCBI GI: 261357589 Blast Desc: serine/threonine-protein kinase MPS1 [Verticillium albo-atrum VaMs.102]
  misc_feature (51)..(891): NCBI GI: 119177257 Blast Desc: CIMG_07588 [Coccidioides immitis RS]
  misc_feature (2)..(891): NCBI GI: 240107724 Blast Desc: kinase domain containing protein [Coccidioides posadasii C735 delta SOWgp]
MIAAAPTPVGDAPGQSSIIARKTSLRSGLRRGAARPPLSRAESNPVLPATAESQTQLAGHESSDDEIPVPMKLSALTKALLNDGEPGAENGPSRVRTRAQSQRPSSPIQPEQEKPVKRRSVLSSSIASIGEERRQTRASSAQPVVDRPSSPVRSQPSRENSPVRKRVVRLSSNSQASSASVASSFKPSKRRSNASSANISTSSAALPTRTRAPSRERSTEEKGNVSEVKDRDVNTPSQQGRVVRIAVGSSGGRGRSTGSALSSQRPGSALQGEDKDMPEEPRTAARSQPEANLGSVSRLGSNGSRNRNEDNQALQSSMRVKRVGKIPGSFLSGPARRGTRRRQSEEDAENRGELLPTSQEDADGQHPEDLIDLGPVEDLLPSYYQPDRIASGSPVSAKHSSRPGLHRELPSADKGRALRSRQNSPEQEEIPIPHYRVPPPRPADLPSRHDQENEAPPTFKRNKPEGVLLSKEAPKPSIRAISSDAGAVRPVSPERKALGALSRNTPHRAAPAPPPKMSILDAATSTAGAAAATGAGRRRNYMKVNGKCYTRIDSLGRGGTSKVYRVAADNGKMFALKRVTLDNLDEGTIKSYKGEIDLLRKLTNVERVITLFDYELNEERHLLSLLMEVGELDLNTLLRQRFSHENAKFDPVFIRFYWAEMLECLAAVHAQDIVHSDLKPANFVLVQGRLKLIDFGIANAIAIEETVNVHRETQIGTPNYMSPESLIDSNAAGSGRRVSIGVKPKLMKIGKPSDIWSLGCILFQMVYGVAPFGHIPNQMARCHAIINWNYDIEFRSKGLGDVTVPPSLIQTMKRCLQRDIALRPTVQELLGEKDPFLYPVETPEGSLPITEELLGRIIQSVVSRCRERMPSEGEVLGAWPMAYWASVGKAVGLESKAAERR

SEQ ID NO: 11205 - DNA, 2929 bp, Muscodor strobelii
  misc_feature: SGI EST ID NO. CUFF.26639.0
  misc_feature: Variant of the nucleotide sequence at SEQ ID NO 11203
tgatgagatacctgttcctatgaagctcagcgctctcactaaagctctcctgaacgatggcgagcctggcgcggagaatggacccagccgtgttagaacccgagctcaaagccagcgcccatcatcgccaattcaacccgaacaggagaaacccgtcaaaagaagaagcgtgctcagcagctctatagcttcaattggcgaagagagaagacagactcgcgctagcagcgcccaaccagttgtagatcgcccatcatcgccagtcaggagtcaaccaagcagagagaacagcccggttagaaagcgagttgttcggctgagctccaattctcaagcatcatctgcctctgtcgcttcatcattcaagccttcgaagagaaggtccaatgcttcatcagcaaacatatcgacttcgtcagctgccctaccaaccaggaccagagctcctagtagggaacggtccactgaagagaagggcaatgtttccgaggtcaaagatagagatgtaaacacaccaagtcaacaaggtcgtgtggtgagaatcgccgtaggatcttctggaggcagaggacgatcgactggctctgctctttcttcccaaagaccaggctcggcgcttcagggcgaggacaaagatatgcctgaggagccacgaaccgcagcccggtctcagcccgaagcaaacctaggcagtgtctcacgactcggctcgaatggctctcgaaaccgcaacgaggacaatcaagcattgcaaagctcaatgcgagtaaaacgagtcggcaaaattcccggcagctttcttagcgggcctgctcgccgtggcactcgcagaagacagagtgaagaagacgctgagaacagaggagagcttctaccaacaagtcaagaagatgctgatggccaacacccagaagatctcatcgacttggggccggtagaagacctgctcccttcctattaccaaccagaccgtattgcctcggggagtcctgttagtgccaagcactcctcaagacccggtctgcacagagagttaccatctgcggataagggccgggctttacgatctcgtcaaaactcccctgagcaggaggagatcccaattccacattaccgagtcccacctcctcggccagctgatctcccttcaagacatgatcaagaaaacgaagctcctccaacattcaagagaaacaagcctgagggtgtcttactctcaaaggaagcacccaagccatcaatccgagccataagtagtgacgccggtgccgtgcgacccgttagtcccgagcgcaaagcactaggcgcactaagccgcaacacacctcatagagccgctcccgcaccaccaccaaagatgtccatcctagacgccgccacatcaacagccggcgcagctgccgcgacaggagcaggcagacgaagaaattacatgaaagtcaacggcaaatgctacacacgcatcgactccttgggtcgcggaggtacgagtaaggtgtaccgagtagcagccgacaacggcaagatgtttgctctgaagcgcgtgacgctcgataatctcgacgagggcacgatcaagagttataaaggggagattgacctcctgcggaaactcacgaatgtcgagcgtgttattacgttgtttgattatgaacttaacgaagaacgacatctgctcagtcttctcatggaagtaggagaactagatctaaacaccctcctccggcaacgtttctcccacgaaaacgcaaaattcgacccagtattcatacgtttctactgggcggaaatgctcgaatgtctcgccgcagtgcacgcacaagacatagtccactccgacctgaaacccgcgaatttcgtcctagtccagggccgtctgaaactaatagatttcggcatcgcaaacgcgatagccatcgaagaaacagtaaacgtccacagagaaacccagatcggaacaccgaactatatgtcgccagagagtttgattgattcgaatgccgcgggaagcggtagacgagtttctattggcgtgaagcctaaacttatgaaaatcggaaaaccatcggatatctggagtctgggatgtattttattccagatggtatatggcgttgcgccgttcggtcatataccgaaccaaatggcgcgctgccacgcgattatcaattggaattacgacattgagttccgctccaagggactgggagacgtcactgtgccgccgagtctgatacagacgatgaagaggtgtttacagagggatatcgcactgagaccgacggtacaggagttattaggcgaaaaagatccgtttttgtaccctgttgagacgcctgagggcagtctgccgatcactgaggagttattgggtaggattattcagagtgttgtgagtcggtgtagggagaggatgccgagtgagggggaggtacttggtgcttggcccatggcgtattgggctagtgttgggaaggctgtgggcttggaaagtaaggctgctgagaggaggtagtttttgtgtaatggggttgttggatgagagattggggtgcagaggaggtttatgatgttatgactttgtttcgaaaagttggcgattggcggttcctgttttttctactttcggtgtggttgcctatattcccctcatcggttttttcttgtttcaagtcgttcgttgtatagaaacaggtctcctgttgtatattggtagttggttcgctcgttttgttttcgtcgaatggccatggcgtttgggtcccttctgtctctagctctgagattgagagaggtgtcttgcatagcgcattttgaaaccttcgccctttgtggttataatgaaaattagttatttgtttcgttcacttccgcaatggctgttcggtattagatgcttgatagtcgtttgacaagatctggtattgcc

SEQ ID NO: 11206 - DNA, 603 bp, Muscodor strobelii
  misc_feature: SGI cDNA ID NO. 563591
  misc_feature: Reduced expression when VOC is produced
  misc_feature: Encodes the peptide sequence at SEQ ID NO 11207
atgagtcgctcactcctgcgctcagcactgagcctccgggcgccaatctgccgcgccccaaccttcgccttaccaatacaggcacaagcaacacgagctctgagcacaacaccacaacaaatcgacgcaacacctcaacaatacatcacaagatcaaccgtgacgccaaccccactctccgcctctcaaacctccaacccagcaacaccgcagcccgtcacaacctcggagacgctctctctcctaccacttctccgcgctcagccggcacactacataaccatccacatccacgggaagccctacctcgtcacaccgggcgactccatccgtcttcccttcctcatgcatggcgtactaccaggcgatgtcctgcgtctcgataaagcctctgttctcggatctcgcgactacacgctcaagggctcgccgtatatcgattcgggcatcttcgagtgccgcgctattgttctgggtgtagagagtgaaccactgagggtcaagattaagacgaagaggaggaatcgacggagtcagcgcgttacgagtaaacataagtacaccatcttgaggattagcgaactcaagattaatgaggcgtaa

SEQ ID NO: 11207 - protein, 200 aa, Muscodor strobelii
  misc_feature: SGI Peptide ID NO. 563591
  misc_feature (1)..(198): NCBI GI: 261357590 Blast Desc: conserved [Verticillium albo-atrum VaMs.102]
  misc_feature (1)..(199): NCBI GI: 85117060 Blast Desc: NCU00977 [Neurospora crassa OR74A] gi|28926974|gb|EAA35934.1| [Neurospora crassa OR74A] gi|38567049|emb|CAE76347.1| related to ribosomal protein YmL49,
  misc_feature (1)..(198): NCBI GI: 256735116 Blast Desc: [Nectria haematococca mpVI 77-13-4]
  misc_feature (1)..(200): NCBI GI: 46108508 Blast Desc: FG01136.1 [Gibberella zeae PH-1]
  misc_feature (25)..(197): NCBI GI: 39941952 Blast Desc: MGG_10825 [Magnaporthe grisea 70-15] gi|145021634|gb|EDK05763.1| MGG_10825 [Magnaporthe grisea 70-15]
  misc_feature (1)..(198): NCBI GI: 154308800 Blast Desc: BC1G_07928 [Botryotinia fuckeliana B05.10] gi|150852554|gb|EDN27746.1| BC1G_07928 [Botryotinia fuckeliana B05.10]
  misc_feature (1)..(198): NCBI GI: 171684351 Blast Desc: protein product [Podospora anserina] gi|170942136|emb|CAP67788.1| protein product [Podospora anserina]
  misc_feature (55)..(200): NCBI GI: 121705128 Blast Desc: aconitate hydratase, [Aspergillus clavatus NRRL 1] gi|119398973|gb|EAW09401.1| aconitate hydratase, [Aspergillus clavatus NRRL 1]
  misc_feature (39)..(200): NCBI GI: 119492533 Blast Desc: aconitate hydratase, [Neosartorya fischeri NRRL 181] gi|119411792|gb|EAW21735.1| aconitate hydratase, [Neosartorya fischeri NRRL 181]
  misc_feature (34)..(200): NCBI GI: 159127815 Blast Desc: aconitate hydratase, [Aspergillus fumigatus A1163]
  misc_feature (86)..(198): SWISSPROT Homolog: EC 4.2.1.3 Aconitate hydratase
  misc_feature: Useful for introducing or modulating the production of volatile compounds
MSRSLLRSALSLRAPICRAPTFALPIQAQATRALSTTPQQIDATPQQYITRSTVTPTPLSASQTSNPATPQPVTTSETLSLLPLLRAQPAHYITIHIHGKPYLVTPGDSIRLPFLMHGVLPGDVLRLDKASVLGSRDYTLKGSPYIDSGIFECRAIVLGVESEPLRVKIKTKRRNRRSQRVTSKHKYTILRISELKINEA

SEQ ID NO: 11208 - DNA, 1012 bp, Muscodor strobelii
  misc_feature: SGI EST ID NO. CUFF.26655.0
  misc_feature: Variant of the nucleotide sequence at SEQ ID NO 11206
ctcaagtccatgccgacattgataacggcgacaataccacatccccgatcaaacggctcatcaattgacctgcatcgaagcaggtcaacccaacagccatgagtcgctcactcctgcgctcagcactgagcctccgggcgccaatctgccgcgccccaaccttcgccttaccaatacaggcacaagcaacacgagctctgagcacaacaccacaacaaatcgacgcaacacctcaacaatacatcacaagatcaaccgtgacgccaaccccactctccgcctctcaaacctccaacccagcaacaccgcagcccgtcacaacctcggagacgctctctctcctaccacttctccgcgctcagccggcacactacataaccatccacatccacgggaagccctacctcgtcacaccgggcgactccatccgtcttcccttcctcatgcatggcgtactaccaggcgatgtcctgcgtctcgataaagcctctgttctcggatctcgcgactacacgctcaagggctcgccgtatatcgattcgggcatcttcgagtgccgcgctattgttctgggtgtagagagtgaaccactgagggtcaagattaagacgaagaggaggaatcgacggagtcagcgcgttacgagtaaacataagtacaccatcttgaggattagcgaactcaagattaatgaggcgtaaagggtttgtctgaggatggtatgaaagagccgaatcgacgatcgacaagacgggatagacgcggagggtgaagaacgaggagattggccgtggtatgccgtggagccatgttggaaactgtacatctgtacgcaatatctgtataaaaaccagtgtccggcaggacgtctttgagaatgtcagctagaatgactaattgtaccatatgtccaaatacaagaacccaaaagacaattctctatattccgaagtatttgcgccaaagaataattgtttcatcaaagaaatggaagttaaatttctactcggaa

SEQ ID NO: 11209 - DNA, 1005 bp, Muscodor strobelii
  misc_feature: SGI cDNA ID NO. 563592
  misc_feature: Reduced expression when VOC is produced
  misc_feature: Encodes the peptide sequence at SEQ ID NO 11210
atgaatttctatgccgcctcactttcccatcactacctcgactttgctgttgaactatttacacgacgacaacctcccgcacacgaggactccctctacatagcgacgacaacgaacaccgatcccgagtctcaagtccctctcgagggctacgcatattcgacatgcctcaaaatgagtaagaaagccacgcctgatcttttatcccccgccgccttcaagcatgcaatcgttgtcaggtacatggaaaaacacaccaaggagcatggccgccgtctggatcatgaggagcgaactcgcaagcgagaagctcgctcggctcacagcattagcgccaaggcacagaacttgcgtggattcaaagccaagatgtttcaacaggagcgacataagcacaagatacagatgaaaaagcaaattaaagcgatggaagagaagaatgtcgagtctgctggcgacaaagacccatcgcagccattgcccaactatctgctcgaccgtaacaatccacagcaagccaagagcctttcgtctgcgatcaagaacaggcgccaggagaaaagcgccagattcgctgtccctattcccaaagtttctggtattagcgaggaggatatgtttaaggtgttgaaaacgggcacgagaaggcataaatcgtggaaaagaatggtcaccaagcctacctttgttggccccgacttcacccgtcgcccggtcaaatacgaacgcttcattcgtcctatgggtcttcggtacaagaaggctcacgttacccacccagagctaaatgttactgtacagcttcccatcatcagcgtcaagaaaaacccgcaacagcaactctacacacaactaggcgtcttatcaaaaggaactatcctcgaggtcaacgtctccgagcttggtcttacgacggccggtggcaaagttgtatggggtcgctacgcccaggtcacaaacaatccggaaaatgacggatgtgtcaacgctgttctcctaacgtaa

SEQ ID NO: 11210 - protein, 334 aa, Muscodor strobelii
  misc_feature: SGI Peptide ID NO. 563592
  misc_feature (78)..(311): Pfam Id: PF01201 Pfam Desc: Ribosomal protein S8e
  misc_feature (81)..(334): NCBI GI: 46108506 Blast Desc: FG01135.1 [Gibberella zeae PH-1]
  misc_feature (81)..(334): NCBI GI: 256734401 Blast Desc: [Nectria haematococca mpVI 77-13-4]
  misc_feature (81)..(334): NCBI GI: 206558233 Blast Desc: [Nectria haematococca mpVI 77-13-4]
  misc_feature (82)..(334): NCBI GI: 154308802 Blast Desc: ribosomal large subunit [Botryotinia fuckeliana B05.10] gi|206558270|sp|A6S4J2.1|NSA2_BOTFB RecName: Full=Ribosome biogenesis protein nsa2 gi|150852555|gb|EDN27747.1|
  misc_feature (81)..(330): NCBI GI: 255944817 Blast Desc: Pc20g06500 [Penicillium chrysogenum Wisconsin 54-1255] gi|211587911|emb|CAP85979.1| Pc20g06500 [Penicillium chrysogenum Wisconsin 54-1255]
  misc_feature (79)..(334): NCBI GI: 121705130 Blast Desc: 40S ribosomal protein S8e, [Aspergillus clavatus NRRL 1] gi|189042743|sp|A1CJS8.1|NSA2_ASPCL RecName: Full=Ribosome biogenesis protein nsa2 gi|119398974|gb|EAW09402.1| 40S ribosomal
  misc_feature (81)..(333): NCBI GI: 190358779 Blast Desc: 40S ribosomal protein S8e, [Aspergillus clavatus NRRL 1] gi|189042743|sp|A1CJS8.1|NSA2_ASPCL RecName: Full=Ribosome biogenesis protein nsa2 gi|119398974|gb|EAW09402.1| 40S ribosomal
  misc_feature (81)..(334): NCBI GI: 171684323 Blast Desc: protein product [Podospora anserina] gi|170942122|emb|CAP67774.1| protein product [Podospora anserina]
  misc_feature (81)..(334): NCBI GI: 189042745 Blast Desc: protein product [Podospora anserina] gi|170942122|emb|CAP67774.1| protein product [Podospora anserina]
  misc_feature (81)..(334): NCBI GI: 226292634 Blast Desc: TGF-beta-inducible nuclear protein [Paracoccidioides brasiliensis Pb18]
  misc_feature: Useful for introducing or modulating the production of volatile compounds
MNFYAASLSHHYLDFAVELFTRRQPPAHEDSLYIATTTNTDPESQVPLEGYAYSTCLKMSKKATPDLLSPAAFKHAIVVRYMEKHTKEHGRRLDHEERTRKREARSAHSISAKAQNLRGFKAKMFQQERHKHKIQMKKQIKAMEEKNVESAGDKDPSQPLPNYLLDRNNPQQAKSLSSAIKNRRQEKSARFAVPIPKVSGISEEDMFKVLKTGTRRHKSWKRMVTKPTFVGPDFTRRPVKYERFIRPMGLRYKKAHVTHPELNVTVQLPIISVKKNPQQQLYTQLGVLSKGTILEVNVSELGLTTAGGKVVWGRYAQVTNNPENDGCVNAVLLT

SEQ ID NO: 11211 - DNA, 1489 bp, Muscodor strobelii
  misc_feature: SGI EST ID NO. CUFF.26699.0
  misc_feature: Variant of the nucleotide sequence at SEQ ID NO 11209
ctttcccatcactacctcgactttgctgttgaactatttacacgacgacaacctcccgcacacgaggactccctctacatagcgacgacaacgaacaccgatcccgagtctcaagtccctctcgagggctacgcatattcgacatgcctcaaaatgagtacatggaaaaacacaccaaggagcatggccgccgtctggatcatgaggagcgaactcgcaagcgagaagctcgctcggctcacagcattagcgccaaggcacagaacttgcgtggattcaaagccaagatgtttcaacaggagcgacataagcacaagatacagatgaaaaagcaaattaaagcgatggaagagaagaatgtcgagtctgctggcgacaaagacccatcgcagccattgcccaactatctgctcgaccgtaacaatccacagcaagccaagagcctttcgtctgcgatcaagaacaggcgccaggagaaaagcgccagattcgctgtccctattcccaaagtttctggtattagcgaggaggatatgtttaaggtgttgaaaacgggcacgagaaggcataaatcgtggaaaagaatggtcaccaagcctacctttgttggccccgacttcacccgtcgcccggtcaaatacgaacgcttcattcgtcctatgggtcttcggtacaagaaggctcacgttacccacccagagctaaatgttactgtacagcttcccatcatcagcgtcaagaaaaacccgcaacagcaactctacacacaactaggcgtcttatcaaaaggaactatcctcgaggtcaacgtctccgagcttggtcttacgacggccggtggcaaagttgtatggggtcgctacgcccaggtcacaaacaatccggaaaatgacggatgtgtcaacgctgttctcctaacgtaataaatgctctatccccaaagatggacggattgtctagatgcggacttcgagtgttagatgatgcatataagcatatgaacggcgtttcggcgtttgatacaccaaaatggactttgtgatgacaggctcttacccatgattgagatctggggcaagatatggcgactttgacaattagtagataggtactggaagacaaatgggtgaaaatacactattggctctagattgcaacctaatatctgagaaccttatgtgaaattaacaagccattcagtacaagatttcttcgttcgccagaatgaagaacagacagacgaagataagcccctgtcctatcgtcgaaatatgcgcaggccagcccgcacttcgagtgccacaatccaaacatttgaggcagttctcgaacatcgataatgtttcaagccagctccttttttgtattagtactatttatgtcccacggattgcaccttaccagtaacaatcttgatagatcttgctgttgtcgctagaatacaacggatgtaaaaaggttaggggagcataatgacgttgggtgatgc

SEQ ID NO: 11212 - DNA, 1002 bp, Muscodor strobelii
  misc_feature: SGI cDNA ID NO. 563593
  misc_feature: Encodes the peptide sequence at SEQ ID NO 11213
atgaatttctatgccgcctcactttcccatcactacctcgactttgctgttgaactatttacacgacgacaacctcccgcacacgaggactccctctacatagcgacgacaacgaacaccgatcccgagtctcaagtccctctcgagggctacgcatattcgacatgcctcaaaatgagtacatggaaaaagtcagcgcacgtgaattcggaaaaatacagcagtgcgactaacgcagagaacagcacaccaaggagcatggccgccgtctggatcatggtgcaggagcgaactcgcaagcgagaagctcgctcggctcacagcattagcgccaaggcacagaacttgcgtggattcaaagccaagatgtttcaacaggagcgacataagcacaagatacagatgaaaaagcaaattaaagcgatggaagagaagaatgtcgagtctgctggcgacaaagacccatcgcagccattgcccaactatctgctcgaccgtaacaatccacagcaagccaagagcctttcgtctgcgatcaagaacaggcgccaggagaaaagcgccagattcgctgtccctattcccaaagtttctggtattagcgaggaggatatgtttaaggtgttgaaaacgggcacgagaaggcataaatcgtggaaaagaatggtcaccaagcctacctttgttggccccgacttcacccgtcgcccggtcaaatacgaacgcttcattcgtcctatgggtcttcggtacaagaaggctcacgttacccacccagagctaaatgttactgtacagcttcccatcatcagcgtcaagaaaaacccgcaacagcaactctacacacaactaggcgtcttatcaaaaggaactatcctcgaggtcaacgtctccgagcttggtcttacgacggccggtggcaaagttgtatggggtcgctacgcccaggtcacaaacaatccggaaaatgacggatgtgtcaacgctgttctcctaacgtaa

SEQ ID NO: 11213 - protein, 333 aa, Muscodor strobelii
  misc_feature: SGI Peptide ID NO. 563593
  misc_feature (87)..(310): Pfam Id: PF01201 Pfam Desc: Ribosomal protein S8e
  misc_feature (95)..(310): Pfam Id: PF01201 Pfam Desc: Ribosomal protein S8e
  misc_feature (95)..(333): NCBI GI: 46108506 Blast Desc: FG01135.1 [Gibberella zeae PH-1]
  misc_feature (95)..(333): NCBI GI: 256734401 Blast Desc: [Nectria haematococca mpVI 77-13-4]
  misc_feature (95)..(333): NCBI GI: 154308802 Blast Desc: ribosomal large subunit [Botryotinia fuckeliana B05.10] gi|206558270|sp|A6S4J2.1|NSA2_BOTFB RecName: Full=Ribosome biogenesis protein nsa2 gi|150852555|gb|EDN27747.1|
  misc_feature (96)..(333): NCBI GI: 206558233 Blast Desc: ribosomal large subunit [Botryotinia fuckeliana B05.10] gi|206558270|sp|A6S4J2.1|NSA2_BOTFB RecName: Full=Ribosome biogenesis protein nsa2 gi|150852555|gb|EDN27747.1|
  misc_feature (95)..(329): NCBI GI: 255944817 Blast Desc: Pc20g06500 [Penicillium chrysogenum Wisconsin 54-1255] gi|211587911|emb|CAP85979.1| Pc20g06500 [Penicillium chrysogenum Wisconsin 54-1255]
  misc_feature (95)..(333): NCBI GI: 85117074 Blast Desc: TGF beta-inducible nuclear protein 1 [Neurospora crassa OR74A] gi|74618656|sp|Q7SGE1.1|NSA2_NEUCR RecName: Full=Ribosome biogenesis protein nsa-2 gi|28926978|gb|EAA35938.1|
  misc_feature (96)..(333): NCBI GI: 121705130 Blast Desc: 40S ribosomal protein S8e, [Aspergillus clavatus NRRL 1] gi|189042743|sp|A1CJS8.1|NSA2_ASPCL RecName: Full=Ribosome biogenesis protein nsa2 gi|119398974|gb|EAW09402.1| 40S ribosomal
  misc_feature (96)..(332): NCBI GI: 190358779 Blast Desc: 40S ribosomal protein S8e, [Aspergillus clavatus NRRL 1] gi|189042743|sp|A1CJS8.1|NSA2_ASPCL RecName: Full=Ribosome biogenesis protein nsa2 gi|119398974|gb|EAW09402.1| 40S ribosomal
  misc_feature (96)..(333): NCBI GI: 189042745 Blast Desc: 40S ribosomal protein S8e, [Aspergillus clavatus NRRL 1] gi|189042743|sp|A1CJS8.1|NSA2_ASPCL RecName: Full=Ribosome biogenesis protein nsa2 gi|119398974|gb|EAW09402.1| 40S ribosomal
  misc_feature (95)..(333): NCBI GI: 171684323 Blast Desc: protein product [Podospora anserina] gi|170942122|emb|CAP67774.1| protein product [Podospora anserina]
MNFYAASLSHHYLDFAVELFTRRQPPAHEDSLYIATTTNTDPESQVPLEGYAYSTCLKMSTWKKSAHVNSEKYSSATNAENSTPRSMAAVWIMVQERTRKREARSAHSISAKAQNLRGFKAKMFQQERHKHKIQMKKQIKAMEEKNVESAGDKDPSQPLPNYLLDRNNPQQAKSLSSAIKNRRQEKSARFAVPIPKVSGISEEDMFKVLKTGTRRHKSWKRMVTKPTFVGPDFTRRPVKYERFIRPMGLRYKKAHVTHPELNVTVQLPIISVKKNPQQQLYTQLGVLSKGTILEVNVSELGLTTAGGKVVWGRYAQVTNNPENDGCVNAVLLT

SEQ ID NO: 11214 - DNA, 1489 bp, Muscodor strobelii; identical to SEQ ID NO: 11211
  misc_feature: SGI EST ID NO. CUFF.26699.0
  misc_feature: Variant of the nucleotide sequence at SEQ ID NO 11212

SEQ ID NO: 11215 - DNA, 1398 bp, Muscodor strobelii
  misc_feature: SGI cDNA ID NO. 563594
  misc_feature: Elevated expression when VOC is produced
  misc_feature: Encodes the peptide sequence at SEQ ID NO 11216
atggatgctaatcagtctcaccatccctaccagtatcggccactggactcggaggataccattcgtattcttaagttagatccagctggtcgcgacctggagcctttgaaaggcactatcatccactggaagcgacacgacgagagcatgttcacgacccctaacgaatatatcgctctctcatacacttggggtgaacccaattactctcgtcgaatactacttcatgcgaacgaagttggtaccggcacaaatgacacgtatctgcccatttccaagaatcttgaagtcgtgttgcaacatttgaggaaaccacacaagttccgctatctctggatcgatgctatttgcctcaaccagcaggatgagtccgaaaagggtcagcagatacctcttataggcgagattttcacggcggcaaagaaggtgtacgtgtggttgggccccagtggaaggcagggcgacgaagacgtggcgagggtcttcgccctgttccggaagatagcggtcatgcaatctggcaccgctcaaattgatacttcagaaagtcttctacatgtccgacgtttcttttctcgcaggtggtttttcagacgctggattctccaggagaccaagttcgcgcagcagaaagctgtcttgctttgcggccatcactctattgactggcctgtattcctttctgcctgtcgcgttctgcagaatcgcgtaacggactatgggatacaggttgtgattgcgctggctgaaacgcttcatgagactgacgaccttttctcgcttctgtacaaatttcgtcgatccgtctgtctagagaaaaaggatagtattgctgcattggttgggatgataccagctagagtccgaccgtcaattaattacactgattcgtaccaggacatattcaaacagaaggccgtcgagctggcgaatagcgctgaccagtattgtctgctacttcacctcttatcttttggctcgttgaaaatcgccgcagaccctggcttcccatcgtggattccggactggtcatcgggcaacgaacaacatcctcttctgcgctctcatgtgaacaaacccagctatatgggtcaaggtcaaacactgcccggtatccgcgaatggtttatgttgctacgacctgaaagaatgagtcttattgatgagcttgatgatttggaatacttctcaccgcttgctcagttcgttggctttgaagatcgcgcacttatcagtgactctgatacccccaacagcttcgatgctcgttcggacgtgggaccgacggatactgatgatccgcgacgcattctattccctattcactggccaggacgatggaaatcacagacactacagctgcttgagaaccggctcggtattatctgggtttgttag

SEQ ID NO: 11216 - protein, 465 aa, Muscodor strobelii
  misc_feature: SGI Peptide ID NO. 563594
  misc_feature (57)..(204): Pfam Id: PF06985 Pfam Desc: Heterokaryon incompatibility protein (HET)
  misc_feature (10)..(335): NCBI GI: 156061491 Blast Desc: SS1G_02890 [Sclerotinia sclerotiorum 1980] gi|154700292|gb|EDO00031.1| SS1G_02890 [Sclerotinia sclerotiorum 1980]
  misc_feature (2)..(353): NCBI GI: 256722966 Blast Desc: NECHADRAFT_86875 [Nectria haematococca mpVI 77-13-4]
  misc_feature (10)..(345): NCBI GI: 256730222 Blast Desc: NECHADRAFT_82497 [Nectria haematococca mpVI 77-13-4]
  misc_feature (7)..(343): NCBI GI: 169614059 Blast Desc: SNOG_10164 [Phaeosphaeria nodorum SN15] gi|111061379|gb|EAT82499.1| SNOG_10164 [Phaeosphaeria nodorum SN15]
  misc_feature (10)..(352): NCBI GI: 168037338 Blast Desc: [Physcomitrella patens subsp. patens] gi|162677541|gb|EDQ64010.1| [Physcomitrella patens subsp. patens]
  misc_feature (10)..(344): NCBI GI: 256722982 Blast Desc: NECHADRAFT_86908 [Nectria haematococca mpVI 77-13-4]
  misc_feature (8)..(350): NCBI GI: 169619623 Blast Desc: SNOG_13010 [Phaeosphaeria nodorum SN15] gi|111058690|gb|EAT79810.1| SNOG_13010 [Phaeosphaeria nodorum SN15]
  misc_feature (5)..(344): NCBI GI: 189202434 Blast Desc: conserved [Pyrenophora tritici-repentis Pt-1C-BFP] gi|187984652|gb|EDU50140.1| conserved [Pyrenophora tritici-repentis Pt-1C-BFP]
  misc_feature (7)..(384): NCBI GI: 256730052 Blast Desc: NECHADRAFT_82659 [Nectria haematococca mpVI 77-13-4]
  misc_feature (4)..(343): NCBI GI: 171691096 Blast Desc: protein product [Podospora anserina] gi|170945496|emb|CAP71608.1| protein product [Podospora anserina]
  misc_feature: Useful for introducing or modulating the production of volatile compounds
MDANQSHHPYQYRPLDSEDTIRILKLDPAGRDLEPLKGTIIHWKRHDESMFTTPNEYIALSYTWGEPNYSRRILLHANEVGTGTNDTYLPISKNLEVVLQHLRKPHKFRYLWIDAICLNQQDESEKGQQIPLIGEIFTAAKKVYVWLGPSGRQGDEDVARVFALFRKIAVMQSGTAQIDTSESLLHVRRFFSRRWFFRRWILQETKFAQQKAVLLCGHHSIDWPVFLSACRVLQNRVTDYGIQVVIALAETLHETDDLFSLLYKFRRSVCLEKKDSIAALVGMIPARVRPSINYTDSYQDIFKQKAVELANSADQYCLLLHLLSFGSLKIAADPGFPSWIPDWSSGNEQHPLLRSHVNKPSYMGQGQTLPGIREWFMLLRPERMSLIDELDDLEYFSPLAQFVGFEDRALISDSDTPNSFDARSDVGPTDTDDPRRILFPIHWPGRWKSQTLQLLENRLGIIWVC

SEQ ID NO: 11217 - DNA, 1830 bp, Muscodor strobelii
  misc_feature: SGI cDNA ID NO. 563595
  misc_feature: Encodes the peptide sequence at SEQ ID NO 11218
atggcgccgtatccttacgcccctccaccgccgcctccggcctcttctacgccggccactacccaatatccatcctacgggactcagcctgctccgtataatgctggtggctcccatcgcggtggagtcggcgggagaggaggtcgtggtcaccaccaagcgtctggccacgatcacaacgcggcacgctactaccagcagccacaacccccccatgactatacgccctcccctcccaatggtcacttcggcggccctccacacggctcacaatggcagcccccgcctcccgccagtcattatcctcagcatcagcctcccgcgcctcatgcttcgtcctacccgcctacctacggtgcgccctatactccacagcccggcccaggctaccagtctcagtatccgagtgctgcgcccagaccagcgcatgctccctcgtaccctccacacccaagtgagcctcctacacagcgctggggcgagcaaggccatgcctactcctaccccagccgaggtggccgtggaggatacaacgctgaccgaggtgatcacaacaagcccgaccctgttatgggcggcccagcaccgatgcgcatgggctttgaccagaatgtagatcgtgccatgcatccccccagcgcctatggttcgccctttcaagctagtactcacccacagcctgcgccctactctcagcctccataccactatcctcctcctgagagttcatatccacctgcacacatgggtcacaattctcgtggctacggcatgggtggttcagggcgtgatagcttcggccactcgcacagaggcggccgtggaggacacggcgaccgaggcggaaagttccgcaatcgggatcacaaaggccatcaaggcaacaatcagaacaaccagtctcagaagcctgataactcggcccatgccaacaagaagaagaagcgcaagaccaatacccttggtctgacacccggggatgagagtagcgacgaggaggcagctggtgatgacgaagagaaacgcttagctgacctgttgggtgccgatgctccagtgatcggtgatatggccgcctggattgcagagcgcaaggccaatttccctaccaaagccaggacggaggcaaagaaagctgcgagtgcagatgccaacgagactgcaaaggaacctgctgtaaagattgacaaagaccaagccaaaatcgataagctcgaacgaaagcttagtaagctcaaaggcagcatcgagaagaggaagagagccgtcaacgatgaaggcgacgagatgcgcgcggataagtcgtcaagttcgtccgactcatctggcgacgagaagcccgaagtccagtcgagcaagaagtcccagtcctcgacattcctacccccgccgcccatcaccagggcagatccctccaaccactgcaaatactattccacagggggcacatgcggcaagaaaggcaagtgccgcttcaagcatgatcctctggtacgtgaagccgcgcttcaagagcgcactaagaacggtggacgcatgacgctgaagcaacgtctgctgttgaacgacaaggagcacgatgacatggatcttgtacgggctgttatggatatgcggaccagtggtcgcttgctcgacccttcttcgcagcagaagcagaatggaaaccaggctctggacagtgttaagaaagaggagtctgaggctgctcctgttgctattgttcattctacgctgcctggcgcggcgggcgtggctagtctgccgcctaatccttatgctaatgctaagaaggctgcggctgctcctgctcctgctcctgcggcatag

SEQ ID NO: 11218 - protein, 609 aa, Muscodor strobelii
  misc_feature: SGI Peptide ID NO. 563595
  misc_feature (143)..(550): NCBI GI: 39941960 Blast Desc: MGG_10829 [Magnaporthe grisea 70-15] gi|145021638|gb|EDK05767.1| MGG_10829 [Magnaporthe grisea 70-15]
  misc_feature (93)..(592): NCBI GI: 85117018 Blast Desc: NCU00967 [Neurospora crassa OR74A] gi|28926964|gb|EAA35924.1| [Neurospora crassa OR74A] gi|38567039|emb|CAE76337.1| [Neurospora crassa]
  misc_feature (273)..(544): NCBI GI: 46122451 Blast Desc: FG05603.1 [Gibberella zeae PH-1]
  misc_feature (302)..(582): NCBI GI: 261357586 Blast Desc: conserved [Verticillium albo-atrum VaMs.102]
  misc_feature (273)..(592): NCBI GI: 256729845 Blast Desc: NECHADRAFT_95471 [Nectria haematococca mpVI 77-13-4]
  misc_feature (248)..(548): NCBI GI: 171684377 Blast Desc: protein product [Podospora anserina] gi|170942149|emb|CAP67801.1| protein product [Podospora anserina]
  misc_feature (189)..(549): NCBI GI: 154308990 Blast Desc: BC1G_08023 [Botryotinia fuckeliana B05.10] gi|150852649|gb|EDN27841.1| BC1G_08023 [Botryotinia fuckeliana B05.10]
  misc_feature (189)..(549): NCBI GI: 156063176 Blast Desc: SS1G_01704 [Sclerotinia sclerotiorum 1980] gi|154697040|gb|EDN96778.1| SS1G_01704 [Sclerotinia sclerotiorum 1980]
  misc_feature (313)..(546): NCBI GI: 238845203 Blast Desc: CCCH zinc finger protein [Microsporum canis CBS 113480]
  misc_feature (312)..(408): NCBI GI: 70983432 Blast Desc: CCCH zinc finger protein [Aspergillus fumigatus Af293] gi|66844869|gb|EAL85205.1| CCCH zinc finger protein [Aspergillus fumigatus Af293]
MAPYPYAPPPPPPASSTPATTQYPSYGTQPAPYNAGGSHRGGVGGRGGRGHHQASGHDHNAARYYQQPQPPHDYTPSPPNGHFGGPPHGSQWQPPPPASHYPQHQPPAPHASSYPPTYGAPYTPQPGPGYQSQYPSAAPRPAHAPSYPPHPSEPPTQRWGEQGHAYSYPSRGGRGGYNADRGDHNKPDPVMGGPAPMRMGFDQNVDRAMHPPSAYGSPFQASTHPQPAPYSQPPYHYPPPESSYPPAHMGHNSRGYGMGGSGRDSFGHSHRGGRGGHGDRGGKFRNRDHKGHQGNNQNNQSQKPDNSAHANKKKKRKTNTLGLTPGDESSDEEAAGDDEEKRLADLLGADAPVIGDMAAWIAERKANFPTKARTEAKKAASADANETAKEPAVKIDKDQAKIDKLERKLSKLKGSIEKRKRAVNDEGDEMRADKSSSSSDSSGDEKPEVQSSKKSQSSTFLPPPPITRADPSNHCKYYSTGGTCGKKGKCRFKHDPLVREAALQERTKNGGRMTLKQRLLLNDKEHDDMDLVRAVMDMRTSGRLLDPSSQQKQNGNQALDSVKKEESEAAPVAIVHSTLPGAAGVASLPPNPYANAKKAAAAPAPAPAA

SEQ ID NO: 11219 - DNA, 2606 bp, Muscodor strobelii
  misc_feature: SGI EST ID NO. CUFF.26665.0
  misc_feature: Variant of the nucleotide sequence at SEQ ID NO 11217
cttcaacacccatccgtctcacttcgctgccgcccgtattgctgcaaggatttattatcatctttaccatcctcggccatctattggtacttgaagcagttcaactactgtcgttgaacacgtactatctgctctgcaaatcggggagtcgatgagcaactcctaccacttgatctatcccctataatattcgaaccccatttggtggatttatatcccaatcatctagaccaacatccatggtcatcatccctatttttcctgtatagcattatttcttcgtcatttttcagctgtttgtattttattcacgacgatcttgctgtgtgactcaacgttacctgtgctgcgtgtcatagcgctgcgctgtttctcagagaagaagtttcctagtatcattcacgcagttgttttccaagttgtccggttccaagtgctgtcattgcagtattgatcatggcgccgtatccttacgcccctccaccgccgcctccggcctcttctacgccggccactacccaatatccatcctacgggactcagcctgctccgtataatgctggtggctcccatcgcggtggagtcggcgggagaggaggtcgtggtcaccaccaagcgtctggccacgatcacaacgcggcacgctactaccagcagccacaacccccccatgactatacgccctcccctcccaatggtcacttcggcggccctccacacggctcacaatggcagcccccgcctcccgccagtcattatcctcagcatcagcctcccgcgcctcatgcttcgtcctacccgcctacctacggtgcgccctatactccacagcccggcccaggctaccagtctcagtatccgagtgctgcgcccagaccagcgcatgctccctcgtaccctccacacccaagtgagcctcctacacagcgctggggcgagcaaggccatgcctactcctaccccagccgaggtggccgtggaggatacaacgctgaccgaggtgatcacaacaagcccgaccctgttatgggcggcccagcaccgatgcgcatgggctttgaccagaatgtagatcgtgccatgcatccccccagcgcctatggttcgccctttcaagctagtactcacccacagcctgcgccctactctcagcctccataccactatcctcctcctgagagttcatatccacctgcacacatgggtcacaattctcgtggctacggcatgggtggttcagggcgtgatagcttcggccactcgcacagaggcggccgtggaggacacggcgaccgaggcggaaagttccgcaatcgggatcacaaaggccatcaaggcaacaatcagaacaaccagtctcagaagcctgataactcggcccatgccaacaagaagaagaagcgcaagaccaatacccttggtctgacacccggggatgagagtagcgacgaggaggcagctggtgatgacgaagagaaacgcttagctgacctgttgggtgccgatgctccagtgatcggtgatatggccgcctggattgcagagcgcaaggccaatttccctaccaaagccaggacggaggcaaagaaagctgcgagtgcagatgccaacgagactgcaaaggaacctgctgtaaagattgacaaagaccaagccaaaatcgataagctcgaacgaaagcttagtaagctcaaaggcagcatcgagaagaggaagagagccgtcaacgatgaaggcgacgagatgcgcgcggataagtcgtcaagttcgtccgactcatctggcgacgagaagcccgaagtccagtcgagcaagaagtcccagtcctcgacattcctacccccgccgcccatcaccagggcagatccctccaaccactgcaaatactattccacagggggcacatgcggcaagaaaggcaagtgccgcttcaagcatgatcctctggtacgtgaagccgcgcttcaagagcgcactaagaacggtggacgcatgacgctgaagcaacgtctgctgttgaacgacaaggagcacgatgacatggatcttgtacgggctgttatggatatgcggaccagtggtcgcttgctcgacccttcttcgcagcagaagcagaatggaaaccaggctctggacagtgttaagaaagaggagtctgaggctgctcctgttgctattgttcattctacgctgcctggcgcggcgggcgtggctagtctgccgcctaatccttatgctaatgctaagaaggctgcggctgctcctgctcctgctcctgcggcatagtaccgcgcaggtgaaaggagggggcgccgttttgaacgtgaatggagttgatgagggggtggctaaaactttcaaggggcgtttgtaatttgtagtttggtatttgtataatgctgttttatgttacttttgctacccggattaagattcttcgtttgtgtgttctcgtgttggagtgctgaaaaatgaagacggtgataagtgtctcgataggaaatttccaatggtctcttgacgttggatcttgctgagccgtgcttctggattgatccctaagctacgggtctattatcaatacgaattttccggttctcttatat

SEQ ID NO: 11220 - DNA, 582 bp, Muscodor strobelii
  misc_feature: SGI cDNA ID NO. 563596
  misc_feature: Encodes the peptide sequence at SEQ ID NO 11221
atgttcatcctcacaaagatcgcggacctagtccagatcccgtcgtcgcagttcgagcagcccagccgcgtggccatcgagcacaacatcaaccagaagtatgccaaccgcgtcatccagaagatcggcctctgcatcgccatgtatgacctgctctgggccagcgaggggctgatcgggactggtgatgggaaggttaacgtcaatgtcgagttccggatgattgtcttccgaccgttcaagaacgaggtcctttttggacgtatcagcagtgctagtcccgatggcatcaacatccgcaccgacttcttcgaggaaatactcatcccgcacaaagagcttcccgacggcgccttctacgaccacaacgaagcagcctgggtctggcgatgggagggcacggacatgcactacgacaagaacgagatggtgcgtctccaggtcgtagacgaggagtggcacgaccagaaccccgactctggagaggacggcgcggcggagcgcgctcagaagataagcccctacaaggtcaagggcaccatggtccaggaggggctgggcgtctgtctttggtgggactag

SEQ ID NO: 11221 - protein, 193 aa, Muscodor strobelii
  misc_feature: SGI Peptide ID NO. 563596
  misc_feature (79)..(192): Pfam Id: PF08292 Pfam Desc: RNA polymerase III subunit Rpc25
  misc_feature (8)..(77): Pfam Id: PF03876 Pfam Desc: RNA polymerase Rpb7-like, N-terminal domain
  misc_feature (1)..(193): NCBI GI: 46122449 Blast Desc: FG05602.1 [Gibberella zeae PH-1]
  misc_feature (1)..(193): NCBI GI: 256729660 Blast Desc: NECHADRAFT_95472 [Nectria haematococca mpVI 77-13-4]
  misc_feature (1)..(193): NCBI GI: 154308992 Blast Desc: BC1G_08024 [Botryotinia fuckeliana B05.10] gi|150852650|gb|EDN27842.1| BC1G_08024 [Botryotinia fuckeliana B05.10]
  misc_feature (1)..(192): NCBI GI: 169784414 Blast Desc: [Aspergillus oryzae RIB40] gi|238508450|ref|XP_002385418.1| DNA-directed RNA polymerase III subunit 22.9 kDa, [Aspergillus flavus NRRL3357] protein product
  misc_feature (1)..(192): NCBI GI: 145253312 Blast Desc: An16g08710 [Aspergillus niger] gi|134083732|emb|CAK42970.1| protein product [Aspergillus niger]
  misc_feature (1)..(192): NCBI GI: 212541336 Blast Desc: DNA-directed RNA polymerase III subunit 22.9 kDa, [Penicillium marneffei ATCC 18224] gi|210068122|gb|EEA22214.1| DNA-directed RNA polymerase III subunit 22.9 kDa, [Penicillium
  misc_feature (1)..(192): NCBI GI: 261197898 Blast Desc: DNA-directed RNA polymerase III polypeptide [Ajellomyces dermatitidis SLH14081] gi|239595314|gb|EEQ77895.1| DNA-directed RNA polymerase III polypeptide [Ajellomyces RNA III
  misc_feature (1)..(192): NCBI GI: 225561861 Blast Desc: DNA-directed RNA polymerase III 25 kD polypeptide [Ajellomyces capsulatus G186AR]
  misc_feature (1)..(192): NCBI GI: 225679219 Blast Desc: conserved [Paracoccidioides brasiliensis Pb03] gi|226278088|gb|EEH33654.1| DNA-directed RNA polymerase III subunit 22.9 kDa polypeptide [Paracoccidioides brasiliensis Pb01]
  misc_feature (5)..(192): NCBI GI: 119484158 Blast Desc: DNA-directed rna polymerase III 25 kD polypeptide [Neosartorya fischeri NRRL 181] gi|119410138|gb|EAW20085.1| DNA-directed rna polymerase III 25 kD polypeptide [Neosartorya
  misc_feature (1)..(149): SWISSPROT Homolog: EC 2.7.7.6 DNA-directed RNA polymerase
MFILTKIADLVQIPSSQFEQPSRVAIEHNINQKYANRVIQKIGLCIAMYDLLWASEGLIGTGDGKVNVNVEFRMIVFRPFKNEVLFGRISSASPDGINIRTDFFEEILIPHKELPDGAFYDHNEAAWVWRWEGTDMHYDKNEMVRLQVVDEEWHDQNPDSGEDGAAERAQKISPYKVKGTMVQEGLGVCLWWD

SEQ ID NO: 11222 - DNA, 2113 bp, Muscodor strobelii
  misc_feature: SGI EST ID NO. CUFF.26677.1
  misc_feature: Variant of the nucleotide sequence at SEQ ID NO 11220
gttcacttgaaggtctccaaaccagcacaaaatctaataacaggccgtcttcaaatcagcgcttgaatcgcaaggatatgaacccgtgacgttcacaaactcacagcagacaaacaaaatgttcatcctcacaaagatcgcggacctagtccagatcccgtcgtcgcagttcgagcagcccagccgcgtggccatcgagcacaacatcaaccagaagtatgccaaccgcgtcatccagaagatcggcctctgcatcgccatgtatgacctgctctgggccagcgaggggctgatcgggactggtgatgggaaggttaacgtcaatgtcgagttccggatgattgtcttccgaccgttcaagaacgaggtcctttttggacgtatcagcagtgctagtcccgatggcatcaacatccgcaccgacttcttcgaggaaatactcatcccgcacaaagagcttcccgacggcgccttctacgaccacaacgaagcagcctgggtctggcgatgggagggcacggacatgcactacgacaagaacgagatggtgcgtctccaggtcgtagacgaggagtggcacgaccagaaccccgactctggagaggacggcgcggcggagcgcgctcagaagataagcccctacaaggtcaagggcaccatggtccaggaggggctgggcgtctgtctttggtgggactagaagacgttcgcgccggaggagagaaagatcctcatgagaagtccgcgtgagggtgaggatactgagggacaggtacggaaaagcagggcatcgcacggcatggtatagcattcacaggcgttcgggggttaggaatggggaaaagatttgcatttcgattgattgattgtctatgaaggaggaccatgtacatgtataaacagacaggtccagccacttctctagttagacctagatacccccaagcaacctctcctccacatcatcaagcacagagtaatgttcaacaacagccaagttctcagcctcagtcttgaagttcttatccgggtcttggccaggaccaaacatctgggggttcgcctggggacccatagcacccatctgctgagccatctgactcgccgctatatcatccagtcagcaaacaagccccatcatatcgtgagaagaaaagggacgtagtgaaaggtataggtgcttaccgttctcactcccaagaataaagttaaaaacactctgcagcccaaaaatacacaggaaataccaactaatactactcatccacctggggtccatttctctcgttgccacacccgcctgcagcatactcttgaacttgatagtcaggggaaacggtagtttaataatcacaaatcccgagaagaaagcgttgatccagctcatgatcaacgtattggggatcatcatggccatgttgttcttcatcatgcccatcatgccgtccatggcgttggggtccgtcatggggtttgctggaggcttccccgcgcgatccggatctttgaggaaggcaccgctttcgtaggcggtggtcaggtattcccgacgggtgcggaatgatggggaggagagaacgtggaagttgttacgggtttggatgccgtggatcatggaccgttgctcgcgcatggatttttggtcgaggggtttgggaggtgagttcatgaggactgttgcgtagtggcggaggatgcccgttaagatcttgaggtgtgtcagcaagatgggtgaatggttggaggtatgaaaaggatatggatggactgaccatgaccactgtgatggggagcaggatccagtatctggacaactaagttagcttaactttcttctcctttctctgcttctatgctaatgctgaacgtacagcaactggggatcccgatggatcgtctggaccggtatctgcgccatggtgtgtgagagcttgtcggagggcgctgctagataaagtgagtaggttggctgaatgtcgacttgaggaatttggctctgcacacggtaggagatactcgacagcggtagctcctcaatgatggaagtcggagttgtggtgtgggaagccccgtccctccagcctcaggtaccgggtagctcccctcatacggg

SEQ ID NO: 11223 - DNA, 780 bp, Muscodor strobelii
  misc_feature: SGI cDNA ID NO. 563597
  misc_feature: Encodes the peptide sequence at SEQ ID NO 11224
atggcgcagataccggtccagacgatccatcgggatccccagttgctatactggatcctgctccccatcacagtggtcatgatcttaacgggcatcctccgccactacgcaacagtcctcatgaactcacctcccaaacccctcgaccaaaaatccatgcgcgagcaacggtccatgatccacggcatccaaacccgtaacaacttccacgttctctcctccccatcattccgcacccgtcgggaatacctgaccaccgcctacgaaagcggtgccttcctcaaagatccggatcgcgcggggaagcctccagcaaaccccatgacggaccccaacgccatggacggcatgatgggcatgatgaagaacaacatggccatgatgatccccaatacgttgatcatgagctggatcaacgctttcttctcgggatttgtgattattaaactaccgtttcccctgactatcaagttcaagagtatgctgcaggcgggtgtggcaacgagagaaatggaccccaggtggatgagtagtattagttggtatttcctgtgtatttttgggctgcagagtgtttttaactttattcttgggagtgagaacgcggcgagtcagatggctcagcagatgggtgctatgggtccccaggcgaacccccagatgtttggtcctggccaagacccggataagaacttcaagactgaggctgagaacttggctgttgttgaacattactctgtgcttgatgatgtggaggagaggttgcttgggggtatctag

SEQ ID NO: 11224 - protein, 259 aa, Muscodor strobelii
  misc_feature: SGI Peptide ID NO. 563597
  misc_feature (6)..(248): Pfam Id: PF05863 Pfam Desc: Eukaryotic protein of function (DUF850)
  misc_feature (1)..(259): NCBI GI: 85117010 Blast Desc: NCU00966 [Neurospora crassa OR74A] gi|28926963|gb|EAA35923.1| NCU00966 [Neurospora crassa OR74A] gi|38567038|emb|CAE76336.1| conserved [Neurospora crassa]
  misc_feature (1)..(259): NCBI GI: 171684373 Blast Desc: protein product [Podospora anserina] gi|170942147|emb|CAP67799.1| protein product [Podospora anserina]
  misc_feature (2)..(256): NCBI GI: 39941964 Blast Desc: MGG_10831 [Magnaporthe grisea 70-15] gi|145021640|gb|EDK05769.1| MGG_10831 [Magnaporthe grisea 70-15]
  misc_feature (1)..(259): NCBI GI: 261357584 Blast Desc: pob [Verticillium albo-atrum VaMs.102]
  misc_feature (1)..(259): NCBI GI: 154295017 Blast Desc: BC1G_13637 [Botryotinia fuckeliana B05.10] gi|150844413|gb|EDN19606.1| BC1G_13637 [Botryotinia fuckeliana B05.10]
  misc_feature (1)..(259): NCBI GI: 256729846 Blast Desc: NECHADRAFT_8079 [Nectria haematococca mpVI 77-13-4]
  misc_feature (1)..(259): NCBI GI: 46122447 Blast Desc: FG05601.1 [Gibberella zeae PH-1]
  misc_feature (7)..(256): NCBI GI: 226278208 Blast Desc: DUF850 domain-containing protein [Paracoccidioides brasiliensis Pb01]
  misc_feature (7)..(256): NCBI GI: 225679317 Blast Desc: conserved [Paracoccidioides brasiliensis Pb03]
  misc_feature (7)..(256): NCBI GI: 226291037 Blast Desc: DUF850 domain-containing protein [Paracoccidioides brasiliensis Pb18]
MAQIPVQTIHRDPQLLYWILLPITVVMILTGILRHYATVLMNSPPKPLDQKSMREQRSMIHGIQTRNNFHVLSSPSFRTRREYLTTAYESGAFLKDPDRAGKPPANPMTDPNAMDGMMGMMKNNMAMMIPNTLIMSWINAFFSGFVIIKLPFPLTIKFKSMLQAGVATREMDPRWMSSISWYFLCIFGLQSVFNFILGSENAASQMAQQMGAMGPQANPQMFGPGQDPDKNFKTEAENLAVVEHYSVLDDVEERLLGGI

SEQ ID NO: 11225 - DNA, 1418 bp, Muscodor strobelii
  misc_feature: SGI EST ID NO. CUFF.26678.2
  misc_feature: Variant of the nucleotide sequence at SEQ ID NO 11223
cccgtatgaggggagctacccggtacctgaggctggagggacggggcttcccacaccacaactccgacttccatcattgaggagctaccgctgtcgagtatctcctaccgtgtgcagagccaaattcctcaagtcgacattcagccaacctactcactttatctagcagcgccctccgacaagctctcacacaccatggcgcagataccggtccagacgatccatcgggatccccagttgctatactggatcctgctccccatcacagtggtcatgatcttaacgggcatcctccgccactacgcaacagtcctcatgaactcacctcccaaacccctcgaccaaaaatccatgcgcgagcaacggtccatgatccacggcatccaaacccgtaacaacttccacgttctctcctccccatcattccgcacccgtcgggaatacctgaccaccgcctacgaaagcggtgccttcctcaaagatccggatcgcgcggggaagcctccagcaaaccccatgacggaccccaacgccatggacggcatgatgggcatgatgaagaacaacatggccatgatgatccccaatacgttgatcatgagctggatcaacgctttcttctcgggatttgtgattattaaactaccgtttcccctgactatcaagttcaagagtatgctgcaggcgggtgtggcaacgagagaaatggaccccaggtggatgagtagtattagttggtatttcctgtgtatttttgggctgcagagtgtttttaactttattcttgggagtgagaacgcggcgagtcagatggctcagcagatgggtgctatgggtccccaggcgaacccccagatgtttggtcctggccaagacccggataagaacttcaagactgaggctgagaacttggctgttgttgaacattactctgtgcttgatgatgtggaggagaggttgcttgggggtatctaggtctaactagagaagtggctggacctgtctgtttatacatgtacatggtcctccttcatagacaatcaatcaatcgaaatgcaaatcttttccccattcctaacccccgaacgcctgtgaatgctataccatgccgtgcgatgccctgcttttccgtacctgtccctcagtatcctcaccctcacgcggacttctcatgaggatctttctctcctccggcgcgaacgtcttctagtcccaccaaagacagacgcccagcccctcctggaccatggtgcccttgaccttgtaggggcttatcttctgagcgcgctccgccgcgccgtcctctccagagtcggggttctggtcgtgccactcctcgtctacgacctggagacgcaccatctcgttcttgtcgtagtgcatgtccgtgccctcccatcgccagacccaggctgctt

SEQ ID NO: 11226 - DNA, 708 bp, Muscodor strobelii
  misc_feature: SGI cDNA ID NO. 563598
  misc_feature: Encodes the peptide sequence at SEQ ID NO 11227
atggcatcccaagaaaagatcacggtccacaacctcgctgatctaaagaacacctcggacgacgcgatccccaactatctcaactccctgcacttcaagcaagaccacagcctcgtcgacacgcgcctggcgctgggctacagcgcattcgccatcgcggccgcctgcttcctgtgggattacaagttcggcttcgagagcacaaagtggtacaccgccgccgccgtcgccatttatagtgtagtcaacggcgccttgaccctgtggatcagcttcgtcgagaagggcaccatctaccagggcaccgccaaggatggctccaagatctcgatagccacagcaacaacgaaaaacataccaatctacaacctaaccataaccatcacgcccaaatcctcttcctcatccaaatcctcgtcgatcaagctctcccgctcttttacggaatggttcgacagtcaaggccgctttatttcgttacccttccaggtcatgctcgcctcctccgtgcctctcatcgcccaggccgaccccaagcgcgtcgccatggtgtctcagactgatgagagtgtcgggaagagtgctgctggtgtgccggacttcatgagtgcggacgctagtgtgctggacgcgcttgttgctgctgagagtactggcgcggagaaggagaaggatagtgggaagaagagcaagaggagaaaggtgtaa

SEQ ID NO: 11227 - protein, 235 aa, Muscodor strobelii
  misc_feature: SGI Peptide ID NO. 563598
  misc_feature (1)..(171): Pfam Id: PF06703 Pfam Desc: Microsomal signal peptidase 25 kDa subunit (SPC25)
  misc_feature (15)..(155): Pfam Id: PF06703 Pfam Desc: Microsomal signal peptidase 25 kDa subunit (SPC25)
  misc_feature (5)..(233): NCBI GI: 46122445 Blast Desc: FG05600.1 [Gibberella zeae PH-1]
  misc_feature (5)..(234): NCBI GI: 256729661 Blast Desc: NECHADRAFT_95474 [Nectria haematococca mpVI 77-13-4]
  misc_feature (1)..(234): NCBI GI: 261357583 Blast Desc: conserved [Verticillium albo-atrum VaMs.102]
  misc_feature (1)..(234): NCBI GI: 171684371 Blast Desc: protein product [Podospora anserina] gi|170942146|emb|CAP67798.1| protein product [Podospora anserina]
  misc_feature (11)..(231): NCBI GI: 145614750 Blast Desc: MGG_10832 [Magnaporthe grisea 70-15] gi|145021641|gb|EDK05770.1| MGG_10832 [Magnaporthe grisea 70-15]
  misc_feature (3)..(234): NCBI GI: 116192263 Blast Desc: CHGG_05849 [Chaetomium globosum CBS 148.51] gi|88181762|gb|EAQ89230.1| CHGG_05849 [Chaetomium globosum CBS 148.51]
  misc_feature (1)..(234): NCBI GI: 85117006 Blast Desc: NCU00965 [Neurospora crassa OR74A] gi|28926962|gb|EAA35922.1| [Neurospora crassa OR74A] gi|38567037|emb|CAE76335.1| related to signal peptidase 18 KD
  misc_feature (1)..(232): NCBI GI: 156050305 Blast Desc: SS1G_07739 [Sclerotinia sclerotiorum 1980] gi|154692140|gb|EDN91878.1| SS1G_07739 [Sclerotinia sclerotiorum 1980]
  misc_feature (1)..(233): NCBI GI: 189203455 Blast Desc: conserved [Pyrenophora tritici-repentis Pt-1C-BFP] gi|187985162|gb|EDU50650.1| conserved [Pyrenophora tritici-repentis Pt-1C-BFP]
  misc_feature (3)..(233): NCBI GI: 169623921 Blast Desc: SNOG_15209 [Phaeosphaeria nodorum SN15] gi|111056314|gb|EAT77434.1| SNOG_15209 [Phaeosphaeria nodorum SN15]
MASQEKITVHNLADLKNTSDDAIPNYLNSLHFKQDHSLVDTRLALGYSAFAIAAACFLWDYKFGFESTKWYTAAAVAIYSVVNGALTLWISFVEKGTIYQGTAKDGSKISIATATTKNIPIYNLTITITPKSSSSSKSSSIKLSRSFTEWFDSQGRFISLPFQVMLASSVPLIAQADPKRVAMVSQTDESVGKSAAGVPDFMSADASVLDALVAAESTGAEKEKDSGKKSKRRKV

SEQ ID NO: 11228 - DNA, 1058 bp, Muscodor strobelii
  misc_feature: SGI EST ID NO. CUFF.26681.0
  misc_feature: Variant of the nucleotide sequence at SEQ ID NO 11226
tagcaagcattcatctagagcttcaatttcaccactgctaaactccaacctctgcaagcctctcttttactttccaactctcctacatagccacttattcgcattgccagagtatctgcctgtctcagtagagaccaagcgcacaatggcatcccaagaaaagatcacggtccacaacctcgctgatctaaagaacacctcggacgacgcgatccccaactatctcaactccctgcacttcaagcaagaccacagcctcgtcgacacgcgcctggcgctgggctacagcgcattcgccatcgcggccgcctgcttcctgtgggattacaagttcggcttcgagagcacaaagtggtacaccgccgccgccgtcgccatttatagtgtagtcaacggcgccttgaccctgtggatcagcttcgtcgagaagggcaccatctaccagggcaccgccaaggatggctccaagatctcgatagccacagcaacaacgaaaaacataccaatctacaacctaaccataaccatcacgcccaaatcctcttcctcatccaaatcctcgtcgatcaagctctcccgctcttttacggaatggttcgacagtcaaggccgctttatttcgttacccttccaggtcatgctcgcctcctccgtgcctctcatcgcccaggccgaccccaagcgcgtcgccatggtgtctcagactgatgagagtgtcgggaagagtgctgctggtgtgccggacttcatgagtgcggacgctagtgtgctggacgcgcttgttgctgctgagagtactggcgcggagaaggagaaggatagtgggaagaagagcaagaggagaaaggtgtaagcggggatgagacaatagggtttgatgggatatgggaggtagtggaatgaaaaattgattgatacccttgctattgtgaacttgacttgctgatgatatgatttggattgcttagatgcgaactgactctatctatgaatccttaagtgatgatctaatcgcgtttaatcaccacgccccagcaatccgctactagactcccgtc

SEQ ID NO: 11229 - DNA, 1029 bp, Muscodor strobelii
  misc_feature: SGI cDNA ID NO. 563599
  misc_feature: Encodes the peptide sequence at SEQ ID NO 11230
atgcctacaccaccggtgtgctcggagccgagcagaatcgcattgaatgagctctttggtgtactagccaacaaatacaacgccggcacaaacgagccgtacgctttagcaagacgcggaatccaagaaaagttggacgtaattttccgtagcatgcgccatgatgacatggctggatccatcatgattgctcgcaccgtcttccactacctggcgggtgatgttctgttgcagtcacgaactattggcaaccaagatccgagtatcaacccaaacccccttttggctcaactcattccgcttgtgccacactacgcgatatttggcagacatcttgcccgagacttaggaatcattaattgcccgagagagagtctctcagctgagaaccatacagttcgcacgcgtttaggtcctaattggttctacaaccaagccgtacgaccatgcatccccggatgctttcccgtggtcaatactaacccagaccagctccaggccgtcgacagctgcgcgataggcatgttctctatgcttcagcatgttccattcagtagttatgaggacgacggtgagaatatagccatgattggtgtgcgagtaatgggaaccctgaagatcggcagagaaaccgagtctctgcttcgcgtcttcctcgacatcttgcagcacaatgcagagatactaaagctgcacattgagatcattatcaacgacgtggcgaacatttacgagatggcgcggaaagtggcagattctgacaaattcaaggacgcatatccgccgagggatgcaggacgaggagtgcgaggtatcccgaaggttaagaaagaacgggatcccatccctacgcgcaaactagccttgaagttcatgttggacgtcactaaggcctacgagacgcacaagctgctgccagcccgccagactatgatgcagccgctgcagtacgcttgtggtgatccggtgcgagaaatccgtaagacggcacagaaagctcggcaggcgtgggaggacctctcgggatag

SEQ ID NO: 11230 - protein, 342 aa, Muscodor strobelii
  misc_feature: SGI Peptide ID NO. 563599
  misc_feature (10)..(340): NCBI GI: 256729847 Blast Desc: NECHADRAFT_47028 [Nectria haematococca mpVI 77-13-4]
  misc_feature (20)..(337): NCBI GI: 171684369 Blast Desc: protein product [Podospora anserina] gi|170942145|emb|CAP67797.1| protein product [Podospora anserina]
  misc_feature (11)..(340): NCBI GI: 46122443 Blast Desc: FG05599.1 [Gibberella zeae PH-1]
  misc_feature (109)..(342): NCBI GI: 39941968 Blast Desc: MGG_10833 [Magnaporthe grisea 70-15] gi|145021642|gb|EDK05771.1| MGG_10833 [Magnaporthe grisea 70-15]
  misc_feature (98)..(337): NCBI GI: 164428718 Blast Desc: NCU00964 [Neurospora crassa OR74A] gi|157072253|gb|EAA35921.2| [Neurospora crassa OR74A]
  misc_feature (98)..(337): NCBI GI: 38567036 Blast Desc: conserved [Neurospora crassa]
  misc_feature (92)..(337): NCBI GI: 116192261 Blast Desc: CHGG_05848 [Chaetomium globosum CBS 148.51] gi|88181761|gb|EAQ89229.1| CHGG_05848 [Chaetomium globosum CBS 148.51]
MPTPPVCSEPSRIALNELFGVLANKYNAGTNEPYALARRGIQEKLDVIFRSMRHDDMAGSIMIARTVFHYLAGDVLLQSRTIGNQDPSINPNPLLAQLIPLVPHYAIFGRHLARDLGIINCPRESLSAENHTVRTRLGPNWFYNQAVRPCIPGCFPVVNTNPDQLQAVDSCAIGMFSMLQHVPFSSYEDDGENIAMIGVRVMGTLKIGRETESLLRVFLDILQHNAEILKLHIEIIINDVANIYEMARKVADSDKFKDAYPPRDAGRGVRGIPKVKKERDPIPTRKLALKFMLDVTKAYETHKLLPARQTMMQPLQYACGDPVREIRKTAQKARQAWEDLSG

SEQ ID NO: 11231 - DNA, 3938 bp, Muscodor strobelii
  misc_feature: SGI EST ID NO. CUFF.26685.0
  misc_feature: Variant of the nucleotide sequence at SEQ ID NO 11229
cgctcttcctttgcggattcatgcccagtgttttcgcaattctcttagcatgaagacggccttgtttctttctttgagcagctcatatccttcatatcattcatgaagtatttctaaagcatccgcaatgtctaattcctcaggctttgatgaactggccctccagttcgtcttggcagaggagcagcctgaacgggatcggattgcgcaaaatgctgctgatgccattgcgagaagcgcaaatactagaatagccgtcgggcaatgggctggatccattcagagatggatgcaacccagcgaggacgataaccttgttctacgagccgcagcacttggatttctttctagtacccttgagtgtctagatcgcgacaacttcgtcttatctggagaccagatccaattactggtggccttcttcaccaactccttcgacaatgatcacagggctggagtgttcgcggcttccaaatctttgctctatctaacccggatgaagcaattcaagccttctcttggcatgaatattgtctcgagtataggcaagctgggcgacgattttatgcgccagactccatcgactcgtttggagatctatcgcttgatccgacaactcgtggacaatcccgtgatggcaagtgatgtgacgcgccagtctggcaattcttgcgagtttatgcccaatatcatcagtctctgtgaaaaagagcgaaatccggagaatcttattcagtggttctcgatactgaagatcttcttacagaaatatgaaccctcggatgagatcactaaaacaatcttcgctgcattctcatcttatttccccatctccatacgtgcttcgagcgaaacgcagaacatcaccgcagacgacctcaaagttgcactccgttcttgcttttcggcacattcccgcctagcagagctcaccgttccgtacttgctcaacaagctcgaccaaggcgacgccatctctattccggtcaaagtagacattcttactactatcgatgcttgtctttcaagctacgaaaatccgaaacagagtgtcgttccgaatgctgaccggatctggaactctttaaagtacgaagtacgaaatggtgagatcgtggacgccatcaagggaacactgaaagccttgacatctctcactaagcggcttgatggtgtcgacttacaaacgttcctgagcaacacctggagagacttgggtgaggacatactggagccgaagtatacggctcccgcaggtcgtttacttattgcgctcatcggtgccacaacaacatctttcggccttttggcgccccgagcactagaccacgtcaagactgctatcaaatcttcaacgtctatagcatacaaacaggacctcatcactattgtcggctccatgctcaacttgcgcttgcatcttgtggacagcttagagtcgcagcaacttttctcggatacaatcaactatctttcagatgacctctttggcgattctctatttcaggatctatattggactgtatgggaagctcattctgcacccactggaccgatagagaacacaggtatccttagagaaataatgaaagggctcggtacactagttggccagaagacaagtcgagagaggccattcaagaagctatgctccgattcgacatgcgatacaatcgcggcaatccttgcaaagccccttatcatctgccaggtcgaaggtgttcatcttttgcaatcagataatgacgagggatttgtctccaaggatctgctctcagctgcaacggaggctttaatgattgcggttccccgttatccacctacctttcagcatctcttattacagtatctctcgtcagctcaaacagtacaggagctcagtcatcattccctgagttcgagactttgcaattccttgctcagcctctgtcagcttctcgactcggatagaatggagcctgcttcaagctggctgaatgaagcagctctcatgaacacaatgctgcagcagatccacgtatttctgtcgcaaaggcaacatcctaagctttggggctcgatactcaactgtctctcagtttgcctgcctcgttcgatggagaaatcaaacgtccacgacatccatcctcttacgcgagactcgttccatgagttcgagattcgcatggaaacgatcaatgtgcctcgcattgataagaacatcatgggcaatattcatgcaatggagcttgaagaacctggctccgatcgtccacgacgtgcattctgcctctttgtagtgagacagctctaccgacgattcgcaaggtttcacctcgtggcggacacaaacgaagggaccgttaagatcgacccagatttggataaaattgaccctaaactagaacaccactacgatgagggcgttcatagacttggctccatcgcaacgcaagtcattcgacaactgactgaggccgaacaaaaggacatgagtctagatcgtgagatactcgagctcttccagtacaatagctacatgaagagtacagatatgcggcccattctgtttagcaaggagagcgcattcagaacggctccattgtccttgggaatcgctcaagggctatggcctaaggctatagatatcggaatgaatatgagcttgcaaaacagccttatcgcattcttaatgcctacaccaccggtgtgctcggagccgagcagaatcgcattgaatgagctctttggtgtactagccaacaaatacaacgccggcacaaacgagccgtacgctttagcaagacgcggaatccaagaaaagttggacgtaattttccgtagcatgcgccatgatgacatggctggatccatcatgattgctcgcaccgtcttccactacctggcgggtgatgttctgttgcagtcacgaactattggcaaccaagatccgagtatcaacccaaacccccttttggctcaactcattccgcttgtgccacactacgcgatatttggcagacatcttgcccgagacttaggaatcattaattgcccgagagagagtctctcagctgagaaccatacagttcgcacgcgtttaggtcctaattggttctacaaccaagccgtacgaccatgcatccccggatgctttcccgtggtcaatactaacccagaccagctccaggccgtcgacagctgcgcgataggcatgttctctatgcttcagcatgttccattcagtagttatgaggacgacggtgagaatatagccatgattggtgtgcgagtaatgggaaccctgaagatcggcagagaaaccgagtctctgcttcgcgtcttcctcgacatcttgcagcacaatgcagagatactaaagctgcacattgagatcattatcaacgacgtggcgaacatttacgagatggcgcggaaagtggcagattctgacaaattcaaggacgcatatccgccgagggatgcaggacgaggagtgcgaggtatcccgaaggttaagaaagaacgggatcccatccctacgcgcaaactagccttgaagttcatgttggacgtcactaaggcctacgagacgcacaagctgctgccagcccgccagactatgatgcagccgctgcagtacgcttgtggtgatccggtgcgagaaatccgtaagacggcacagaaagctcggcaggcgtgggaggacctctcgggatagtggcatggatcaatactgtcgcctggagagacgacaacaacgtgatggaataaaacgactccgaatatgcaaatttaggtgcaaggagaaatgtatatataaatggtctgatacccgccaagtcttcacaactccttctagaatagattggagaaccctttgcgtcctaccacttctttcagtatagaggtagataggaaagacaaaaggcagtaaataaaaagatacaaaaccaaga

SEQ ID NO: 11232 - DNA, 3573 bp, Muscodor strobelii
  misc_feature: SGI cDNA ID NO. 563600
  misc_feature: Encodes the peptide sequence at SEQ ID NO 11233
atgtctaattcctcaggctttgatgaactggccctccagttcgtcttggcagaggagcagcctgaacgggatcggattgcgcaaaatgctgctgatgccattgcgagaagcgcaaatactagaatagccgtcgggcaatgggctggatccattcagagatggatgcaacccagcgaggacgataaccttgttctacgagccgcagcacttggatttctttctagtacccttgagtgtctagatcgcgacaacttcgtcttatctggagaccagatccaattactggtggccttcttcaccaactccttcgacaatgatcacagggctggagtgttcgcggcttccaaatctttgctctatctaacccggatgaagcaattcaagccttctcttggcatgaatattgtctcgagtataggcaagctgggcgacgattttatgcgccagactccatcgactcgtttggagatctatcgcttgatccgacaactcgtggacaatcccgtgatggcaagtgatgtgacgcgccagtctggcaattcttgcgagtttatgcccaatatcatcagtctctgtgaaaaagagcgaaatccggagaatcttattcagtggttctcgatactgaagatcttcttacagaaatatgaaccctcggatgagatcactaaaacaatcttcgctgcattctcatcttatttccccatctccatacgtgcttcgagcgaaacgcagaacatcaccgcagacgacctcaaagttgcactccgttcttgcttttcggcacattcccgcctagcagagctcaccgttccgtacttgctcaacaagctcgaccaaggcgacgccatctctattccggtcaaagtagacattcttactactatcgatgcttgtctttcaagctacgaaaatccgaaacagagtgtcgttccgaatgctgaccggatctggaactctttaaagtacgaagtacgaaatggtgagatcgtggacgccatcaagggaacactgaaagccttgacatctctcactaagcggcttgatggtgtcgacttacaaacgttcctgagcaacacctggagagacttgggtgaggacatactggagccgaagtatacggctcccgcaggtcgtttacttattgcgctcatcggtgccacaacaacatctttcggccttttggcgccccgagcactagaccacgtcaagactgctatcaaatcttcaacgtctatagcatacaaacaggacctcatcactattgtcggctccatgctcaacttgcgcttgcatcttgtggacagcttagagtcgcagcaacttttctcggatacaatcaactatctttcagatgacctctttggcgattctctatttcaggatctatattggactgtatgggaagctcattctgcacccactggaccgatagagaacacaggtatccttagagaaataatgaaagggctcggtacactagttggccagaagacaagtcgagagaggccattcaagaagctatgctccgattcgacatgcgatacaatcgcggcaatccttgcaaagccccttatcatctgccaggtcgaaggtgttcatcttttgcaatcagataatgacgagggatttgtctccaaggatctgctctcagctgcaacggaggctttaatgattgcggttccccgttatccacctacctttcagcatctcttattacagtatctctcgtcagctcaaacagtacaggagctcagtcatcattccctgagttcgagactttgcaattccttgctcagcctctgtcagcttctcgactcggatagaatggagcctgcttcaagctggctgaatgaagcagctctcatgaacacaatgctgcagcagatccacgtatttctgtcgcaaaggcaacatcctaagctttggggctcgatactcaactgtctctcagtttgcctgcctcgttcgatggagaaatcaaacgtccacgacatccatcctcttacgcgagactcgttccatgagttcgagattcgcatggaaacgatcaatgtgcctcgcattgataagaacatcatgggcaatattcatgcaatggagcttgaagaacctggctccgatcgtccacgacgtgcattctgcctctttgtagtgagacagctctaccgacgattcgcaaggtttcacctcgtggcggacacaaacgaagggaccgttaagatcgacccagatttggataaaattgaccctaaactagaacaccactacgatgagggcgttcatagacttggctccatcgcaacgcaagtcattcgacaactgactgaggccgaacaaaaggacatgagtctagatcgtgagatactcgagctcttccagtacaatagctacatgaagagtacagatatgcggcccattctgtttagcaaggagagcgcattcagaacggctccattgtccttgggaatcgctcaagggctatggcctaaggctatagatatcggaatgaatatgagcttgcaaaacagccttatcgcattcttaatgcctacaccaccggtgtgctcggagccgagcagaatcgcattgaatgagctctttggtgtactagccaacaaatacaacgccggcacaaacgagccgtacgctttagcaagacgcggaatccaagaaaagttggacgtaattttccgtagcatgcgccatgatgacatggctggatccatcatgattgctcgcaccgtcttccactacctggcgggtgatgttctgttgcagtcacgaactattggcaaccaagatccgagtatcaacccaaacccccttttggctcaactcattccgcttgtgccacactacgcgatatttggcagacatcttgcccgagacttaggaatcattaattgcccgagagagagtctctcagctgagaaccatacagttcgcacgcgtttaggtcctaattggttctacaaccaagccgtacgaccatgcatccccggatgctttcccgtggtcaatactaacccagaccagctccaggccgtcgacagctgcgcgataggcatgttctctatgcttcagcatgttccattcagtagttatgaggacgacggtgagaatatagccatgattggtgtgcgagtaatgggaaccctgaagatcggcagagaaaccgagtctctgcttcgcgtcttcctcgacatcttgcagcacaatgcagagatactaaagctgcacattgagatcattatcaacgacgtggcgaacatttacgagatggcgcggaaagtggcagattctgacaaattcaaggacgcatatccgccgagggatgcaggacgaggagtgcgaggtatcccgaaggttaagaaagaacgggatcccatccctacgcgcaaactagccttgaagttcatgttggacgtcactaaggcctacgagacgcacaagctgctgccagcccgccagactatgatgcagccgctgcagtacgcttgtggtgatccggtgcgagaaatccgtaagacggcacagaaagctcggcaggcgtgggaggacctctcgggatag

SEQ ID NO: 11233 - protein, 1190 aa, Muscodor strobelii
  misc_feature: SGI Peptide ID NO. 563600
  misc_feature (7)..(1188): NCBI GI: 256729847 Blast Desc: NECHADRAFT_47028 [Nectria haematococca mpVI 77-13-4]
  misc_feature (7)..(1188): NCBI GI: 46122443 Blast Desc: FG05599.1 [Gibberella zeae PH-1]
  misc_feature (5)..(1185): NCBI GI: 38567036 Blast Desc: conserved [Neurospora crassa]
  misc_feature (5)..(1185): NCBI GI: 164428718 Blast Desc: NCU00964 [Neurospora crassa OR74A] gi|157072253|gb|EAA35921.2| [Neurospora crassa OR74A]
  misc_feature (7)..(571): NCBI GI: 171684369 Blast Desc: protein product [Podospora anserina] gi|170942145|emb|CAP67797.1| protein product [Podospora anserina]
  misc_feature (92)..(1093): NCBI GI: 261357582 Blast Desc: conserved [Verticillium albo-atrum VaMs.102]
  misc_feature (7)..(577): NCBI GI: 39941968 Blast Desc: MGG_10833 [Magnaporthe grisea 70-15] gi|145021642|gb|EDK05771.1| MGG_10833 [Magnaporthe grisea 70-15]
  misc_feature (7)..(539): NCBI GI: 116192261 Blast Desc: CHGG_05848 [Chaetomium globosum CBS 148.51] gi|88181761|gb|EAQ89229.1| CHGG_05848 [Chaetomium globosum CBS 148.51]
  misc_feature (14)..(395): NCBI GI: 259486854 Blast Desc: TPA: DNA repair and TFIIH regulator (Eurofung) [Aspergillus nidulans FGSC A4]
  misc_feature (14)..(347): NCBI GI: 70983624 Blast Desc: DNA repair/transcription protein [Aspergillus fumigatus Af293] gi|66844965|gb|EAL85301.1| DNA repair/transcription protein, [Aspergillus fumigatus Af293]
MSNSSGFDELALQFVLAEEQPERDRIAQNAADAIARSANTRIAVGQWAGSIQRWMQPSEDDNLVLRAAALGFLSSTLECLDRDNFVLSGDQIQLLVAFFTNSFDNDHRAGVFAASKSLLYLTRMKQFKPSLGMNIVSSIGKLGDDFMRQTPSTRLEIYRLIRQLVDNPVMASDVTRQSGNSCEFMPNIISLCEKERNPENLIQWFSILKIFLQKYEPSDEITKTIFAAFSSYFPISIRASSETQNITADDLKVALRSCFSAHSRLAELTVPYLLNKLDQGDAISIPVKVDILTTIDACLSSYENPKQSVVPNADRIWNSLKYEVRNGEIVDAIKGTLKALTSLTKRLDGVDLQTFLSNTWRDLGEDILEPKYTAPAGRLLIALIGATTTSFGLLAPRALDHVKTAIKSSTSIAYKQDLITIVGSMLNLRLHLVDSLESQQLFSDTINYLSDDLFGDSLFQDLYWTVWEAHSAPTGPIENTGILREIMKGLGTLVGQKTSRERPFKKLCSDSTCDTIAAILAKPLIICQVEGVHLLQSDNDEGFVSKDLLSAATEALMIAVPRYPPTFQHLLLQYLSSAQTVQELSHHSLSSRLCNSLLSLCQLLDSDRMEPASSWLNEAALMNTMLQQIHVFLSQRQHPKLWGSILNCLSVCLPRSMEKSNVHDIHPLTRDSFHEFEIRMETINVPRIDKNIMGNIHAMELEEPGSDRPRRAFCLFVVRQLYRRFARFHLVADTNEGTVKIDPDLDKIDPKLEHHYDEGVHRLGSIATQVIRQLTEAEQKDMSLDREILELFQYNSYMKSTDMRPILFSKESAFRTAPLSLGIAQGLWPKAIDIGMNMSLQNSLIAFLMPTPPVCSEPSRIALNELFGVLANKYNAGTNEPYALARRGIQEKLDVIFRSMRHDDMAGSIMIARTVFHYLAGDVLLQSRTIGNQDPSINPNPLLAQLIPLVPHYAIFGRHLARDLGIINCPRESLSAENHTVRTRLGPNWFYNQAVRPCIPGCFPVVNTNPDQLQAVDSCAIGMFSMLQHVPFSSYEDDGENIAMIGVRVMGTLKIGRETESLLRVFLDILQHNAEILKLHIEIIINDVANIYEMARKVADSDKFKDAYPPRDAGRGVRGIPKVKKERDPIPTRKLALKFMLDVTKAYETHKLLPARQTMMQPLQYACGDPVREIRKTAQKARQAWEDLSG

SEQ ID NO: 11234 - DNA, 3938 bp, Muscodor strobelii; identical to SEQ ID NO: 11231
  misc_feature: SGI EST ID NO. CUFF.26685.0
  misc_feature: Variant of the nucleotide sequence at SEQ ID NO 11232

SEQ ID NO: 11235 - DNA, 1023 bp, Muscodor strobelii
  misc_feature: SGI cDNA ID NO. 563601
  misc_feature: Reduced expression when VOC is produced
  misc_feature: Encodes the peptide sequence at SEQ ID NO 11236
atggcctctcagaatgaagtgcctaagacctgtaaggtcgtcatggccgagaccattgccaagggtctgctggctgaggttaaagacaccttgaaatcattccaacaagacactgaagggaagccaacattagtggctttcctagccaacgatgatcctgcagctatcaagtatgctgaatggtcgcaaaagacgtgcgaagaaaatggattcatttttgagctccgccaggttgagaagggcgacctagaagaagagatcatgatcgctaacgaagacggcaaagtcgatggaatccttgtctactatccgatatttcctggaaacccagctcatgataaatacatacaagagactgtctccctcgctaaggatattgagggactttgccacaaacacatctccaatatgtaccacaatgtgcgatacttggatcctccacaaaacttgaagaagtcgatcctgccatgcactccgctagcggtcgtcaagatcttggaatatcttcaaatctataattcaatcttgccatatggaaaccgtctgttcggaaagacgatcacagtcatcaaccgatctgaggtcaacggtcggcctcttgcagctctgttggctaatgatggtgcgacagtatactccgttgacttaacgggagttcaagttttcacccgtggtcaaggaatccggcagcttcgtcatcaggtgcaggataaagagggctggaccctcgagcaatgccttgcagtcagcgatgtcatcgttggtggtgtcccttccgagaaatacaagataccaacagagcttatccgggatggtgctgtgtgcatcaatttttcatcattccgcaatttcgatgggccagccatcaaggagaaagcatccatttacgttccttccgttggaaaagtcacgattgctgttctgctaaggaacttagtgcgcttgatcgccaacaccccaccgtccaaggcaaccgatgagagcacgttgaaagcgaagcatgaggcttttgcggaagactga

SEQ ID NO: 11236 - protein, 340 aa, Muscodor strobelii
  misc_feature: SGI Peptide ID NO. 563601
  misc_feature (12)..(127): Pfam Id: PF00763 Pfam Desc: Tetrahydrofolate dehydrogenase/cyclohydrolase, catalytic domain
  misc_feature (146)..(317): Pfam Id: PF02882 Pfam Desc: Tetrahydrofolate dehydrogenase/cyclohydrolase, NAD(P)-binding domain
  misc_feature (151)..(211): Pfam Id: PF02882 Pfam Desc: Tetrahydrofolate dehydrogenase/cyclohydrolase, NAD(P)-binding domain
  misc_feature (1)..(340): NCBI GI: 46106310 Blast Desc: FG00417.1 [Gibberella zeae PH-1]
  misc_feature (6)..(339): NCBI GI: 85116998 Blast Desc: methylenetetrahydrofolate dehydrogenase [Neurospora crassa OR74A] gi|28926960|gb|EAA35920.1| methylenetetrahydrofolate dehydrogenase [Neurospora crassa OR74A]
  misc_feature (1)..(318): NCBI GI: 116192259 Blast Desc: CHGG_05847 [Chaetomium globosum CBS 148.51] gi|88181760|gb|EAQ89228.1| CHGG_05847 [Chaetomium globosum CBS 148.51]
  misc_feature (5)..(340): NCBI GI: 171684365 Blast Desc: protein product [Podospora anserina] gi|170942143|emb|CAP67795.1| protein product [Podospora anserina]
  misc_feature (1)..(318): NCBI GI: 145614752 Blast Desc: MGG_10834 [Magnaporthe grisea 70-15] gi|145021643|gb|EDK05772.1| MGG_10834 [Magnaporthe grisea 70-15]
  misc_feature (1)..(339): NCBI GI: 261357581 Blast Desc: methylenetetrahydrofolate dehydrogenase [Verticillium albo-atrum VaMs.102]
  misc_feature (1)..(306): NCBI GI: 156050329 Blast Desc: SS1G_07751 [Sclerotinia sclerotiorum 1980] gi|154692152|gb|EDN91890.1| SS1G_07751 [Sclerotinia sclerotiorum 1980]
  misc_feature (1)..(323): NCBI GI: 239607715 Blast Desc: methylenetetrahydrofolate dehydrogenase [Ajellomyces dermatitidis ER-3]
  misc_feature (1)..(323): NCBI GI: 261197846 Blast Desc: methylenetetrahydrofolate dehydrogenase [Ajellomyces dermatitidis SLH14081] gi|239595288|gb|EEQ77869.1| methylenetetrahydrofolate dehydrogenase [Ajellomyces dermatitidis
  misc_feature (3)..(332): NCBI GI: 169766378 Blast Desc: [Aspergillus oryzae RIB40] gi|238483085|ref|XP_002372781.1| methylenetetrahydrofolate dehydrogenase [Aspergillus flavus NRRL3357] protein product
  misc_feature (3)..(317): SWISSPROT Homolog: EC 1.5.1.15 Methylenetetrahydrofolate dehydrogenase (NAD(+))
  misc_feature: Useful for introducing or modulating the production of volatile compounds
MASQNEVPKTCKVVMAETIAKGLLAEVKDTLKSFQQDTEGKPTLVAFLANDDPAAIKYAEWSQKTCEENGFIFELRQVEKGDLEEEIMIANEDGKVDGILVYYPIFPGNPAHDKYIQETVSLAKDIEGLCHKHISNMYHNVRYLDPPQNLKKSILPCTPLAVVKILEYLQIYNSILPYGNRLFGKTITVINRSEVNGRPLAALLANDGATVYSVDLTGVQVFTRGQGIRQLRHQVQDKEGWTLEQCLAVSDVIVGGVPSEKYKIPTELIRDGAVCINFSSFRNFDGPAIKEKASIYVPSVGKVTIAVLLRNLVRLIANTPPSKATDESTLKAKHEAFAED

SEQ ID NO: 11237 - DNA, 1526 bp, Muscodor strobelii
  misc_feature: SGI EST ID NO. CUFF.26687.0
  misc_feature: Variant of the nucleotide sequence at SEQ ID NO 11235
cgaaaacatagcatgggactgagtcggccactgttggtcattccaccagctccaaacccggccggctatttgccattgccattgaatttttcctcttctgcgtttttccagttctcaacgtctttccacctcacacgctcgttccgacaagcaaagaagccactctctactactagtggtgtcgccccatccccgttcaacttctacttaaatcgcagggtctctgtagtggggcaacagaagagaatggcctctcagaatgaagtgcctaagacctgtaaggtcgtcatggccgagaccattgccaagggtctgctggctgaggttaaagacaccttgaaatcattccaacaagacactgaagggaagccaacattagtggctttcctagccaacgatgatcctgcagctatcaagtatgctgaatggtcgcaaaagacgtgcgaagaaaatggattcatttttgagctccgccaggttgagaagggcgacctagaagaagagatcatgatcgctaacgaagacggcaaagtcgatggaatccttgtctactatccgatatttcctggaaacccagctcatgataaatacatacaagagactgtctccctcgctaaggatattgagggactttgccacaaacacatctccaatatgtaccacaatgtgcgatacttggatcctccacaaaacttgaagaagtcgatcctgccatgcactccgctagcggtcgtcaagatcttggaatatcttcaaatctataattcaatcttgccatatggaaaccgtctgttcggaaagacgatcacagtcatcaaccgatctgaggtcaacggtcggcctcttgcagctctgttggctaatgatggtgcgacagtatactccgttgacttaacgggagttcaagttttcacccgtggtcaaggaatccggcagcttcgtcatcaggtgcaggataaagagggctggaccctcgagcaatgccttgcagtcagcgatgtcatcgttggtggtgtcccttccgagaaatacaagataccaacagagcttatccgggatggtgctgtgtgcatcaatttttcatcattccgcaatttcgatgggccagccatcaaggagaaagcatccatttacgttccttccgttggaaaagtcacgattgctgttctgctaaggaacttagtgcgcttgatcgccaacaccccaccgtccaaggcaaccgatgagagcacgttgaaagcgaagcatgaggcttttgcggaagactgaaaatagaccacggcattgggacttagagaaggcgaagagagactagaattgtgtaaattagataagggatactgtcgaattatttgcgacgaactgttaggaaaagatctggcgttgcacgcgacatagacacaaaatcataaacgagccagcttttgattcatacacatctacttattgcggaggttgatgttggtgatcctatccacgaatgtagccacttcatagcagaaatcgcattccaattacactgcaag

SEQ ID NO: 11238 - DNA, 795 bp, Muscodor strobelii
  misc_feature: SGI cDNA ID NO. 563602
  misc_feature: Encodes the peptide sequence at SEQ ID NO 11239
atgcctttcctccaacgagacaatgcatcgatcttttacgtcgctgaaggcacagggcccgcagtcctgttgttccacggatgggcatgcgattctctagactggcaatatcaaatccccttcttccaatctcttggctatcaaacagttgccttcgatgcccgtggccacggcgcgtcttcgatcccgcctgaggacgacctagatcaattcaaggctgaaattacagctgctgatgccattgcattactatcacatctcaacatatccgaagcgattttcataagccattcaatgggtgcggtaccggcttcactcatagcagtgagacatcctgagctcgtgaaagcaagcatcttcatcgacccttactactaccgcgagcatgatcctacgggcacttttcacgcagcgctcgcagccgatgctcagacgacggttacaagggcgctggagggaggctactccgataatacacctgagtggttgaagttatggcatcggtataggatcttgaggacactgccgcatgtcatatatcagagcttacgagtgaagacactcacgccggagtcgatacaatgttgggaggctgggagcgtgtggatgcgagagaggaatggttcacgcttggtcgtgctgcaagatgagacaaatgtcgaaaaggagaagagtcttgggatgggcgaaggggataaggtagtagtgatgagtggcaaaggacattggatgcatattcttgatccagaaaagttgaacagtcttctgagggagtggctgtcggaggttctatag

SEQ ID NO: 11239 - protein, 264 aa, Muscodor strobelii
  misc_feature: SGI Peptide ID NO. 563602
  misc_feature (47)..(258): Pfam Id: PF00561 Pfam Desc: alpha/beta hydrolase fold
  misc_feature (47)..(163): Pfam Id: PF00561 Pfam Desc: alpha/beta hydrolase fold
  misc_feature (3)..(262): NCBI GI: 39956919 Blast Desc: MGG_09131 [Magnaporthe grisea 70-15] gi|149210929|ref|XP_001522839.1| MGCH7_ch7g937 [Magnaporthe grisea 70-15] gi|86196892|gb|EAQ71530.1| MGCH7_ch7g937 grisea
  misc_feature (1)..(264): NCBI GI: 280965767 Blast Desc: alpha/beta hydrolase fold protein [Frankia sp. EuI1c] gi|270730163|gb|EFA58422.1| alpha/beta hydrolase fold protein [Frankia sp. EuI1c]
  misc_feature (1)..(263): NCBI GI: 271963507 Blast Desc: hydrolase or acyltransferase (alpha/beta hydrolase superfamily)-like protein [Streptosporangium roseum DSM 43021] gi|270506682|gb|ACZ84960.1| hydrolase or acyltransferase protein
  misc_feature (20)..(263): NCBI GI: 158313846 Blast Desc: alpha/beta hydrolase fold [Frankia sp. EAN1pec] gi|158109251|gb|ABW11448.1| alpha/beta hydrolase fold [Frankia sp. EAN1pec]
  misc_feature (1)..(261): NCBI GI: 271965935 Blast Desc: hydrolase or acyltransferase (alpha/beta hydrolase superfamily)-like protein [Streptosporangium roseum DSM 43021] gi|270509110|gb|ACZ87388.1| hydrolase or acyltransferase protein
  misc_feature (6)..(260): NCBI GI: 170690215 Blast Desc: alpha/beta hydrolase fold [Burkholderia graminis C4D1M] gi|170144650|gb|EDT12811.1| alpha/beta hydrolase fold [Burkholderia graminis C4D1M]
  misc_feature (8)..(260): NCBI GI: 171681650 Blast Desc: protein product [Podospora anserina] gi|170940784|emb|CAP66433.1| protein product [Podospora anserina]
  misc_feature (3)..(161): NCBI GI: 196012277 Blast Desc: TRIADDRAFT_30313 [Trichoplax adhaerens] gi|190581324|gb|EDV21401.1| TRIADDRAFT_30313 [Trichoplax adhaerens]
  misc_feature (6)..(260): NCBI GI: 115495833 Blast Desc: epoxide hydrolase 2, cytoplasmic [Bos taurus] gi|109659347|gb|AAI18307.1| Epoxide hydrolase 2, cytoplasmic [Bos taurus]
  misc_feature (3)..(161): NCBI GI: 196012279 Blast Desc: TRIADDRAFT_59995 [Trichoplax adhaerens] gi|190581325|gb|EDV21402.1| TRIADDRAFT_59995 [Trichoplax adhaerens]
MPFLQRDNASIFYVAEGTGPAVLLFHGWACDSLDWQYQIPFFQSLGYQTVAFDARGHGASSIPPEDDLDQFKAEITAADAIALLSHLNISEAIFISHSMGAVPASLIAVRHPELVKASIFIDPYYYREHDPTGTFHAALAADAQTTVTRALEGGYSDNTPEWLKLWHRYRILRTLPHVIYQSLRVKTLTPESIQCWEAGSVWMRERNGSRLVVLQDETNVEKEKSLGMGEGDKVVVMSGKGHWMHILDPEKLNSLLREWLSEVL

SEQ ID NO: 11240 - DNA, 154 bp, Muscodor strobelii
  misc_feature: SGI EST ID NO. CUFF.26690.0
  misc_feature: Variant of the nucleotide sequence at SEQ ID NO 11238
cggcgcgtcttcgatcccgcctgaggacgacctagatcaattcaaggctgaaattacagctgctgatgccattgcattactatcacatctcaacatatccgaagcgattttcataagccattcaatgggtgcggtaccggcttcactcatagca

SEQ ID NO: 11241 - DNA, 1320 bp, Muscodor strobelii
  misc_feature: SGI cDNA ID NO. 563603
  misc_feature: Encodes the peptide sequence at SEQ ID NO 11242
atgccgtggtcagggccctttcctcccgagatcattctacgagttgtgcactacctgtcacatgaccaaatcatctcaccatcctaccgcgacgatgatcttccagatttgcacggggcctggacacgctggggtcgcattcagggcgtctcacgcttcgcgtccattgaccgaacctggcaagatgctgtggaacgtgagacttttgctcagctgcaccttgactggggacgactcgtgaagggccatgatatcttgaacaggattccgcaacgtcgaacttatatacgcttcatccatctctacatcactctgcgcgccagtaaacctggcaccagccaaaagcgaaaggacaaccgcttattgcaacgcaccttcgggaccttgctttccttcctcgttgatcggaaccccggaccacctctaaagctctatattgatgcgcaaaactccccactgaaaggacgcggatcttcggtttcatgtcactcgccactggagcttgaaaatcccgagcgcattctgaacataaaggcggtgaatgcaattacgcatatggccgtggcgagaaatgatatatcgggaagacacatatcaggcgcggcaatctgcactctgcttaaagcactgccggcaacaaagatagtatacctctattggcaagatgacgacgatggacctgatgcgcgaagtgacttcgctaaagctctggacaacgtcgagcataacatagattccttcactcttgatggcgaatacgtggaccaaaacttgatgcaacctgctcacgtatcgacagagagcaaaaccaaagtagatgatctctcgcgctctctgggtattctatctcaacgtttacgacgattcaatatatccgaggtggccgtcaccgatgacatcttcttacagtataacgcagagactgcgtcgacagcgtcctggccgcgactacaagagtttactctctactacccgggagaatctgtattctcctattattatagtaccaataaagagcaagcgatgaccgtggcgactgacgcttggaatgcccgctttcttgcagcggcacgagcggcgctaaatatgccgcttctggaagaaatgacactgatagcgaatggagatcctggagaatgctggaacaagttctgttatagtcatgattcggtgaaaaacactgcaaaggtcctctggacaagcagccatggatttgtacctgagtatgaagtgctcgaagcatgggaggctgtcacacgacggcatgcagtaggcacgaagctagaagtggagtactcaaatgatgagagcctactttag

SEQ ID NO: 11242 - protein, 439 aa, Muscodor strobelii
  misc_feature: SGI Peptide ID NO. 563603
MPWSGPFPPEIILRVVHYLSHDQIISPSYRDDDLPDLHGAWTRWGRIQGVSRFASIDRTWQDAVERETFAQLHLDWGRLVKGHDILNRIPQRRTYIRFIHLYITLRASKPGTSQKRKDNRLLQRTFGTLLSFLVDRNPGPPLKLYIDAQNSPLKGRGSSVSCHSPLELENPERILNIKAVNAITHMAVARNDISGRHISGAAICTLLKALPATKIVYLYWQDDDDGPDARSDFAKALDNVEHNIDSFTLDGEYVDQNLMQPAHVSTESKTKVDDLSRSLGILSQRLRRFNISEVAVTDDIFLQYNAETASTASWPRLQEFTLYYPGESVFSYYYSTNKEQAMTVATDAWNARFLAAARAALNMPLLEEMTLIANGDPGECWNKFCYSHDSVKNTAKVLWTSSHGFVPEYEVLEAWEAVTRRHAVGTKLEVEYSNDESLL

SEQ ID NO: 11243 - DNA, 1841 bp, Muscodor strobelii
  misc_feature: SGI EST ID NO. CUFF.26694.0
  misc_feature: Variant of the nucleotide sequence at SEQ ID NO 11241
ctgaatttcaccgaatttgactaagaagaactgcaaataagtcatacatagcatgcatattctcgagttcatatgaacaagtttccatcgtaaagtagatcgacgcatttctatgatctacagaaccccgtcgtcgtgatcttctccgcaccgtcttgagccatctcgatgccgtggtcagggccctttcctcccgagatcattctacgagttgtgcactacctgtcacatgaccaaatcatctcaccatcctaccgcgacgatgatcttccagatttgcacggggcctggacacgctggggtcgcattcagggcgtctcacgcttcgcgtccattgaccgaacctggcaagatgctgtggaacgtgagacttttgctcagctgcaccttgactggggacgactcgtgaagggccatgatatcttgaacaggattccgcaacgtcgaacttatatacgcttcatccatctctacatcactctgcgcgccagtaaacctggcaccagccaaaagcgaaaggacaaccgcttattgcaacgcaccttcgggaccttgctttccttcctcgttgatcggaaccccggaccacctctaaagctctatattgatgcgcaaaactccccactgaaaggacgcggatcttcggtttcatgtcactcgccactggagcttgaaaatcccgagcgcattctgaacataaaggcggtgaatgcaattacgcatatggccgtggcgagaaatgatatatcgggaagacacatatcaggcgcggcaatctgcactctgcttaaagcactgccggcaacaaagatagtatacctctattggcaagatgacgacgatggacctgatgcgcgaagtgacttcgctaaagctctggacaacgtcgagcataacatagattccttcactcttgatggcgaatacgtggaccaaaacttgatgcaacctgctcacgtatcgacagagagcaaaaccaaagtagatgatctctcgcgctctctgggtattctatctcaacgtttacgacgattcaatatatccgaggtggccgtcaccgatgacatcttcttacagtataacgcagagactgcgtcgacagcgtcctggccgcgactacaagagtttactctctactacccgggagaatctgtattctcctattattatagtaccaataaagagcaagcgatgaccgtggcgactgacgcttggaatgcccgctttcttgcagcggcacgagcggcgctaaatatgccgcttctggaagaaatgacactgatagcgaatggagatcctggagaatgctggaacaagttctgttatagtcatgattcggtgaaaaacactgcaaaggtcctctggacaagcagccatggatttgtacctgagtatgaagtgctcgaagcatgggaggctgtcacacgacggcatgcagtaggcacgaagctagaagtggagtactcaaatgatgagagcctactttagagcgacatacagaaggatgcgaagccatcccctaagtgtatatgggagccagaagtatatacatttcgaaggtaattgtttgatatccaagagattggaagaacaagatttggaattgtcaatccagcaagtctctatcgcaaagtagatctacatattcccgtgatctatagaacctccgacagccactccctcagaagactgttcaacttttctggatcaagaatatgcatccaatgtcctttgccactcatcactactaccttatccccttcgcccatcccaagactcttctccttttcgacatttgtctcatcttgcagcacgaccaagcgtgaaccattcctctctcg

SEQ ID NO: 11244 - DNA, 1776 bp, Muscodor strobelii
  misc_feature: SGI cDNA ID NO. 563604
  misc_feature: Encodes the peptide sequence at SEQ ID NO 11245
atggcggaccctttgagcgttgcggccagtgtggtcggtctcattggggctggagccaagatctcacaagctctcgcacatgtcgtgagcaaagcccgacatgcgccaaaggagtgcaagaatctgaagattgaagttgatactattcaggccatcctaagccagctccagctatttcttcttgggagtcgccgggccccaagatcacggacgtcattgatcttggttgaccaggttattgcgactctagcagcctgtgttacaacattctcagaattggatactttcacggaaacactccagtctgatcatgacttgggaatccttgacagactgcgatgggtcgctaaggagggagaggtcaaagatatgctaactcggttagagtcgcacaaaagctctctcaatctaatgctgatgatactaacatgtcaaaagcaagaagaagcagaagataaagtggacatactctgcgagctagttcaaaaagtactagaatcgaatacgattctgaatcaacgtctagcagccatcgaagcggcaccacataatctaccgccgaccgtggctggaactataccatcacggagaagccttgacgaggcatcaacgcttgatgctggagatcctggtcctggtattactcgtactggtacattggttcgagataaacgaggtttcgcgttcgaggaactcctaatgagctccagagcttatagaaatgcctccaaggataactcagacgcgttttcaattgtcagctccgctggaaggacgggatcatggtcaatgttgtcgggcctcagtctttccgaaacatctcacatcggaatactagccatcccaatatatgagactgacatcgcgaataaggaggcctacgatttcagtccgccaaatatagagcctgttgcagtcatcgtccaaacgggatcggaatcacgagtaaacaagggttcgcgaagggattggttgaagggacttgttcgaggtgatggtttccgacagggacagtccgtgtctgcacaaacggaacaagagccgttacagccgaacagagttttcggtgtacccttggtggaaagtatccactacgcaaacgtggctatcagcttgattaatgcacagggagaaagcttcatctacggttatatcccaattgtagtagccaaagtgggagtgtttctcaaagagaagggtactgatgttgtggacatctttgcgcatcgtggtaacccgatgcgacttatgcatatgcagaccgttttcgatactccagagcggtacggaaagggattcaactgggatgggtatacggtacatgatgctgctgcgctattacttcggtttatcaagacactcccgcagcctgtcattccatatgatatgtacgactcatatattcaaacatgcgaagagctcgcagccgctcatgagatatcgaagcttgccagcgatagcgaagactttgacaaggtcaaagtggaaatacaacagctcatcaaagccctcccgccacttaatcgccagctcctcatatacctactcgatctcatcaaggtctttggcgaaaaatcgcatataaacaagatgacactagcgagattaacagcggcttttcaacctggcattctctccacgccaccggcagaaatggatgccgaggcatacaccgtcgccgctcgcgtggtcatctttctagcagacttccacgaagatttcctgtatggcatacttaacgagaccgataatccagctaccagtaacgaagcttga

SEQ ID NO: 11245 - protein, 591 aa, Muscodor strobelii
  misc_feature: SGI Peptide ID NO. 563604
  misc_feature (386)..(553): Pfam Id: PF00620 Pfam Desc: RhoGAP domain
  misc_feature (351)..(578): NCBI GI: 85079767 Blast Desc: NCU00196 [Neurospora crassa OR74A] gi|28917482|gb|EAA27183.1| conserved [Neurospora crassa OR74A]
  misc_feature (350)..(578): NCBI GI: 119497819 Blast Desc: Rho GTPase activator (Sac7), [Neosartorya fischeri NRRL 181] gi|119413831|gb|EAW23770.1| Rho GTPase activator (Sac7), [Neosartorya fischeri NRRL 181]
  misc_feature (320)..(578): NCBI GI: 240282150 Blast Desc: rho GTPase activator [Ajellomyces capsulatus H143]
  misc_feature (320)..(578): NCBI GI: 225559217 Blast Desc: rho-GTPase-activating protein [Ajellomyces capsulatus G186AR]
  misc_feature (350)..(578): NCBI GI: 159128656 Blast Desc: Rho GTPase activator (Sac7), [Aspergillus fumigatus A1163]
  misc_feature (350)..(578): NCBI GI: 70988775 Blast Desc: Rho GTPase activator (Sac7) [Aspergillus fumigatus Af293] gi|66846873|gb|EAL87204.1| Rho GTPase activator (Sac7), [Aspergillus fumigatus Af293]
  misc_feature (350)..(578): NCBI GI: 121711094 Blast Desc: Rho GTPase activator (Sac7), [Aspergillus clavatus NRRL 1] gi|119401313|gb|EAW11737.1| Rho GTPase activator (Sac7), [Aspergillus clavatus NRRL 1]
  misc_feature (350)..(578): NCBI GI: 115433250 Blast Desc: conserved [Aspergillus terreus NIH2624] gi|114189614|gb|EAU31314.1| conserved [Aspergillus terreus NIH2624]
  misc_feature (345)..(578): NCBI GI: 145256163 Blast Desc: An10g00490 [Aspergillus niger CBS 513.88] gi|134078614|emb|CAK40488.1| protein product [Aspergillus niger]
  misc_feature (350)..(590): NCBI GI: 169777523 Blast Desc: [Aspergillus oryzae RIB40] gi|83771964|dbj|BAE62094.1| protein product [Aspergillus oryzae]
MADPLSVAASVVGLIGAGAKISQALAHVVSKARHAPKECKNLKIEVDTIQAILSQLQLFLLGSRRAPRSRTSLILVDQVIATLAACVTTFSELDTFTETLQSDHDLGILDRLRWVAKEGEVKDMLTRLESHKSSLNLMLMILTCQKQEEAEDKVDILCELVQKVLESNTILNQRLAAIEAAPHNLPPTVAGTIPSRRSLDEASTLDAGDPGPGITRTGTLVRDKRGFAFEELLMSSRAYRNASKDNSDAFSIVSSAGRTGSWSMLSGLSLSETSHIGILAIPIYETDIANKEAYDFSPPNIEPVAVIVQTGSESRVNKGSRRDWLKGLVRGDGFRQGQSVSAQTEQEPLQPNRVFGVPLVESIHYANVAISLINAQGESFIYGYIPIVVAKVGVFLKEKGTDVVDIFAHRGNPMRLMHMQTVFDTPERYGKGFNWDGYTVHDAAALLLRFIKTLPQPVIPYDMYDSYIQTCEELAAAHEISKLASDSEDFDKVKVEIQQLIKALPPLNRQLLIYLLDLIKVFGEKSHINKMTLARLTAAFQPGILSTPPAEMDAEAYTVAARVVIFLADFHEDFLYGILNETDNPATSNEA

SEQ ID NO: 11246 - DNA, 2373 bp, Muscodor strobelii
  misc_feature: SGI EST ID NO. CUFF.26711.0
  misc_feature: Variant of the nucleotide sequence at SEQ ID NO 11244
gtcaaaagcaagaagaagcagaagataaagtggacatactctgcgagctagttcaaaaagtactagaatcgaatacgattctgaatcaacgtctagcagccatcgaagcggcaccacataatctaccgccgaccgtggctggaactataccatcacggagaagccttgacgaggcatcaacgcttgatgctggagatcctggtcctggtattactcgtactggtacattggttcgagataaacgaggtttcgcgttcgaggaactcctaatgagctccagagcttatagaaatgcctccaaggataactcagacgcgttttcaattgtcagctccgctggaaggacgggatcatggtcaatgttgtcgggcctcagtctttccgaaacatctcacatcggaatactagccatcccaatatatgagactgacatcgcgaataaggaggcctacgatttcagtccgccaaatatagagcctgttgcagtcatcgtccaaacgggatcggaatcacgagtaaacaagggttcgcgaagggattggttgaagggacttgttcgaggtgatggtttccgacagggacagtccgtgtctgcacaaacggaacaagagccgttacagccgaacagagttttcggtgtacccttggtggaaagtatccactacgcaaacgtggctatcagcttgattaatgcacagggagaaagcttcatctacggttatatcccaattgtagtagccaaagtgggagtgtttctcaaagagaagggtactgatgttgtggacatctttgcgcatcgtggtaacccgatgcgacttatgcatatgcagaccgttttcgatactccagagcggtacggaaagggattcaactgggatgggtatacggtacatgatgctgctgcgctattacttcggtttatcaagacactcccgcagcctgtcattccatatgatatgtacgactcatatattcaaacatgcgaagagctcgcagccgctcatgagatatcgaagcttgccagcgatagcgaagactttgacaaggtcaaagtggaaatacaacagctcatcaaagccctcccgccacttaatcgccagctcctcatatacctactcgatctcatcaaggtctttggcgaaaaatcgcatataaacaagatgacactagcgagattaacagcggcttttcaacctggcattctctccacgccaccggcagaaatggatgccgaggcatacaccgtcgccgctcgcgtggtcatctttctagcagacttccacgaagatttcctgtatggcatacttaacgagaccgataatccagctaccagtaacgaagcttgattttagtatgcatctttctaaggttgagtgggtactgtgagaataagaatcattctacgtagaatttacatgtgctgatagataaggtaagagctcgccaacaaattttgatttacatggtgactctgccaggaatctaagacagcggctcggtgaaatgttaggcttctaggaagcatgtctagccggtagtcggatacaatttgcccactgtccatccgatcatttcatactgcgtgttgaaacttcagaatcccgcgctcccaattcatcttataatgtcattttccaaaataatcctctatggccgatgacgctcgcatttggacggcaaggtttagcaatcttagaagaaagcacgatgatgatatagcatatggccgttgaggttgaggcgattagggtcgaggtagaagaaaggtttcagaattcaagactgcgcgacgtaaatggccaatgtggacttcgtaaaatccgctgactaatgaatttacatgtttctcataagcatcgttgatgttttgcgaaataaatacttcgcttttcctcgacgtaatgcgcgaggagaacaaagtaaggatataaacgggcagggagagaaaacattcatcgatatggatcggcgactatgctcgcatcgttcagaccaactccagggcttccagtactatgcctctttgcgaaatagcgtctgctgtcatcctcggatcgttcacgctgatagtactgctgtctttgtgctcaaatacgaaaggcggcaaaaagggatcgagtgatggtgcctcttcccagcctgaaggtaaagaaccaagtcttgcgtcatctttcaatagcgcacctgtgtcggtattgagaaagtatgacaacgcccaacccctggtaacaggaagcacattcttccaaggcggttctagaggcgccttcagggcttcgccgagcatcagtccatgaacgaagcacggcccaacaacctcatagcggccagaccccatcggccggagaatcatggggaaatcacatcctaaga

SEQ ID NO: 11247 - DNA, 2148 bp, Muscodor strobelii
  misc_feature: SGI cDNA ID NO. 563605
  misc_feature: Elevated expression when VOC is produced
  misc_feature: Encodes the peptide sequence at SEQ ID NO 11248
atgaatacttatgtttatactgagcttcagccagagatgggtgacctaaggctggtgatcctagagccaggcgcttttcacgacgtactgcaatgcaacatcgttcattaccctctacttgagcccaagacgccaaccaatgatgagagattatccattagtgaactacagaagagcctcccagaaggctggattgtcgatcagactttggacgggcgatacttgttcatgagcccgcgcaattcggggattccaaactcttggacgcatcccgatagttcggttgacaaaaaagcatatgaattaccggaacgctcggcagaagacggactgtcgtggcatgtgcccccatacgaggccttgtcttacagttggggaacgactgaaaatcaagagtatatccacatcaccgactccgccaacccccaagaaacgcaagcttggttgcgaatccggagtaatttatctagtgcactgaggcatctcaggtatgctgatcgacagcgcacattatggatcgatgctatctctatcaaccagtcagacattcacgaacgtgggcgacaggtcaagcggatgagccaaatctatcccctctcggagaacgttataatctggctaggcccagaatctgaagacagcaagtatgctctcgagactctggagtatttcagcaaacaggtggaatatgtcgtctcacatcgatggggcgatgcgcccaacgcgcaggagccagattggtggcgggatgggcatatgctcccctacgaccagaagacctgggatgcggtcttatcactattgcatcgaccgtggttcgagcgaggttgggtcttgcaagaagcactctcgtgcgatcgggtcctgctccaatgcgggcgagatacaatcccttgggtccatgtacgcaaggcgttgttggttctcagacagaagacatccatactcccactcaagctccgagatcgtcttctcccatatgcccgaggtttgatggcaccaccgctcgcgtcctgtgagcacttgctcctctgggcgcgaaatcaatcattttctgaccctcgggacaaggtctacggcattctaggtcttctagatcctaagatcgtcgccaagatcgaggtcgactatgggacaccgatttggagaacctactcgcagcttgtcttagctgagaatgaagcataccagaaattaaacatgatgaatctctgtaacatcacaactcgtaatgaaggatatccgtcatggataccgaacctgaaccaaccgattgagggtgcgaataccgggtatctaagcatccgacgattttacgcctcggctcgctctagcgccgctgcaaagctcatagagccgggttaccatctccaagtcacgggaaggcgtatcggtgccatctctcgcgtaagcccccacctgactggcacattcccagagatcatcgacgagatcttcaaatgggcacctatagacccaggtggcgacttgtatacttccggagagcccgctattgatgcttttgtcgaagtactcgtaaggggcaggacgagcgacagagccttgggcgacaatccatgcccttcaattaggcaactgagtgagctcatgaccagagctttatctagccgccagcttgatgatgaaataagtcgcggatttaaggactgtttcttcgcgagcgaatgtctatttgccactgaaaaggggtatctgggcgtttccgcgaaaggccttcgcgaaggcgacgaactttcagtgatcttaggatgtgatttccccatgattctccggccgatggggtctggccgctatgaggttgttgggccgtgcttcgttcatggactgatgctcggcgaagccctgaaggcgcctctagaaccgccttggaagaatgtgcttcctgttaccaggggttgggcgttgtcatactttctcaataccgacacaggtgcgctattgaaagatgacgcaagacttggttctttaccttcaggctgggaagaggcaccatcactcgatccctttttgccgcctttcgtatttgagcacaaagacagcagtactatcagcgtgaacgatccgaggatgacagcagacgctatttcgcaaagaggcatagtactggaagccctggagttggtctga

SEQ ID NO: 11248 - protein, 715 aa, Muscodor strobelii
  misc_feature: SGI Peptide ID NO. 563605
  misc_feature (118)..(281): Pfam Id: PF06985 Pfam Desc: Heterokaryon incompatibility protein (HET)
  misc_feature (118)..(228): Pfam Id: PF06985 Pfam Desc: Heterokaryon incompatibility protein (HET)
  misc_feature (1)..(715): NCBI GI: 154311024 Blast Desc: BC1G_06630 [Botryotinia fuckeliana B05.10] gi|150851034|gb|EDN26227.1| BC1G_06630 [Botryotinia fuckeliana B05.10]
  misc_feature (1)..(715): NCBI GI: 256719970 Blast Desc: NECHADRAFT_98482 [Nectria haematococca mpVI 77-13-4]
  misc_feature (1)..(715): NCBI GI: 115492481 Blast Desc: [Aspergillus terreus NIH2624] gi|114197728|gb|EAU39428.1| [Aspergillus terreus NIH2624]
  misc_feature (1)..(715): NCBI GI: 169603560 Blast Desc: SNOG_04789 [Phaeosphaeria nodorum SN15] gi|111066060|gb|EAT87180.1| SNOG_04789 [Phaeosphaeria nodorum SN15]
  misc_feature (90)..(715): NCBI GI: 256727220 Blast Desc: NECHADRAFT_32743 [Nectria haematococca mpVI 77-13-4]
  misc_feature (1)..(698): NCBI GI: 46139411 Blast Desc: FG11220.1 [Gibberella zeae PH-1]
  misc_feature (176)..(715): NCBI GI: 145609067 Blast Desc: MGG_09107 [Magnaporthe grisea 70-15] gi|145016510|gb|EDK00940.1| MGG_09107 [Magnaporthe grisea 70-15]
  misc_feature (1)..(470): NCBI GI: 261357884 Blast Desc: conserved [Verticillium albo-atrum VaMs.102]
  misc_feature (4)..(715): NCBI GI: 39974569 Blast Desc: MGG_00569 [Magnaporthe grisea 70-15] gi|145018530|gb|EDK02809.1| MGG_00569 [Magnaporthe grisea 70-15]
  misc_feature (116)..(626): NCBI GI: 256730222 Blast Desc: NECHADRAFT_82497 [Nectria haematococca mpVI 77-13-4]
  misc_feature: Useful for introducing or modulating the production of volatile compounds
MNTYVYTELQPEMGDLRLVILEPGAFHDVLQCNIVHYPLLEPKTPTNDERLSISELQKSLPEGWIVDQTLDGRYLFMSPRNSGIPNSWTHPDSSVDKKAYELPERSAEDGLSWHVPPYEALSYSWGTTENQEYIHITDSANPQETQAWLRIRSNLSSALRHLRYADRQRTLWIDAISINQSDIHERGRQVKRMSQIYPLSENVIIWLGPESEDSKYALETLEYFSKQVEYVVSHRWGDAPNAQEPDWWRDGHMLPYDQKTWDAVLSLLHRPWFERGWVLQEALSCDRVLLQCGRDTIPWVHVRKALLVLRQKTSILPLKLRDRLLPYARGLMAPPLASCEHLLLWARNQSFSDPRDKVYGILGLLDPKIVAKIEVDYGTPIWRTYSQLVLAENEAYQKLNMMNLCNITTRNEGYPSWIPNLNQPIEGANTGYLSIRRFYASARSSAAAKLIEPGYHLQVTGRRIGAISRVSPHLTGTFPEIIDEIFKWAPIDPGGDLYTSGEPAIDAFVEVLVRGRTSDRALGDNPCPSIRQLSELMTRALSSRQLDDEISRGFKDCFFASECLFATEKGYLGVSAKGLREGDELSVILGCDFPMILRPMGSGRYEVVGPCFVHGLMLGEALKAPLEPPWKNVLPVTRGWALSYFLNTDTGALLKDDARLGSLPSGWEEAPSLDPFLPPFVFEHKDSSTISVNDPRMTADAISQRGIVLEALELV

SEQ ID NO: 11249 - DNA, 3471 bp, Muscodor strobelii
  misc_feature: SGI EST ID NO. CUFF.26712.1
  misc_feature: Variant of the nucleotide sequence at SEQ ID NO 11247
cgggagccttttctcttccatgttcctatatgcattcgacatagtcactgacttaattgagccctggggagcagtagatcccgtgatctagagacttgagcctggctgatgaatacttatgtttatactgagcttcagccagagatgggtgacctaaggctggtgatcctagagccaggcgcttttcacgacgtactgcaatgcaacatcgttcattaccctctacttgagcccaagacgccaaccaatgatgagagattatccattagtgaactacagaagagcctcccagaaggctggattgtcgatcagactttggacgggcgatacttgttcatgagcccgcgcaattcggggattccaaactcttggacgcatcccgatagttcggttgacaaaaaagcatatgaattaccggaacgctcggcagaagacggactgtcgtggcatgtgcccccatacgaggccttgtcttacagttggggaacgactgaaaatcaagagtatatccacatcaccgactccgccaacccccaagaaacgcaagcttggttgcgaatccggagtaatttatctagtgcactgaggcatctcaggtatgctgatcgacagcgcacattatggatcgatgctatctctatcaaccagtcagacattcacgaacgtgggcgacaggtcaagcggatgagccaaatctatcccctctcggagaacgttataatctggctaggcccagaatctgaagacagcaagtatgctctcgagactctggagtatttcagcaaacaggtggaatatgtcgtctcacatcgatggggcgatgcgcccaacgcgcaggagccagattggtggcgggatgggcatatgctcccctacgaccagaagacctgggatgcggtcttatcactattgcatcgaccgtggttcgagcgaggttgggtcttgcaagaagcactctcgtgcgatcgggtcctgctccaatgcgggcgagatacaatcccttgggtccatgtacgcaaggcgttgttggttctcagacagaagacatccatactcccactcaagctccgagatcgtcttctcccatatgcccgaggtttgatggcaccaccgctcgcgtcctgtgagcacttgctcctctgggcgcgaaatcaatcattttctgaccctcgggacaaggtctacggcattctaggtcttctagatcctaagatcgtcgccaagatcgaggtcgactatgggacaccgatttggagaacctactcgcagcttgtcttagctgagaatgaagcataccagaaattaaacatgatgaatctctgtaacatcacaactcgtaatgaaggatatccgtcatggataccgaacctgaaccaaccgattgagggtgcgaataccgggtatctaagcatccgacgattttacgcctcggctcgctctagcgccgctgcaaagctcatagagccgggttaccatctccaagtcacgggaaggcgtatcggtgccatctctcgcgtaagcccccacctgactggcacattcccagagatcatcgacgagatcttcaaatgggcacctatagacccaggtggcgacttgtatacttccggagagcccgctattgatgcttttgtcgaagtactcgtaaggggcaggacgagcgacagagccttgggcgacaatccatgcccttcaattaggcaactgagtgagctcatgaccagagctttatctagccgccagcttgatgatgaaataagtcgcggatttaaggactgtttcttcgcgagcgaatgtctatttgccactgaaaaggggtatctgggcgtttccgcgaaaggccttcgcgaaggcgacgaactttcagtgatcttaggatgtgatttccccatgattctccggccgatggggtctggccgctatgaggttgttgggccgtgcttcgttcatggactgatgctcggcgaagccctgaaggcgcctctagaaccgccttggaagaatgtgcttcctgttaccaggggttgggcgttgtcatactttctcaataccgacacaggtgcgctattgaaagatgacgcaagacttggttctttaccttcaggctgggaagaggcaccatcactcgatccctttttgccgcctttcgtatttgagcacaaagacagcagtactatcagcgtgaacgatccgaggatgacagcagacgctatttcgcaaagaggcatagtactggaagccctggagttggtctgaacgatgcgagcatagtcgccgatccatatcgatgaatgttttctctccctgcccgtttatatccttactttgttctcctcgcgcattacgtcgaggaaaagcgaagtatttatttcgcaaaacatcaacgatgcttatgagaaacatgtaaattcattagtcagcggattttacgaagtccacattggccatttacgtcgcgcagtcttgaattctgaaacctttcttctacctcgaccctaatcgcctcaacctcaacggccatatgctatatcatcatcgtgctttcttctaagattgctaaaccttgccgtccaaatgcgagcgtcatcggccatagaggattattttggaaaatgacattataagatgaattgggagcgcgggattctgaagtttcaacacgcagtatgaaatgatcggatggacagtgggcaaattgtatccgactaccggctagacatgcttcctagaagcctaacatttcaccgagccgctgtcttagattcctggcagagtcaccatgtaaatcaaaatttgttggcgagctcttaccttatctatcagcacatgtaaattctacgtagaatgattcttattctcacagtacccactcaaccttagaaagatgcatactaaaatcaagcttcgttactggtagctggattatcggtctcgttaagtatgccatacaggaaatcttcgtggaagtctgctagaaagatgaccacgcgagcggcgacggtgtatgcctcggcatccatttctgccggtggcgtggagagaatgccaggttgaaaagccgctgttaatctcgctagtgtcatcttgtttatatgcgatttttcgccaaagaccttgatgagatcgagtaggtatatgaggagctggcgattaagtggcgggagggctttgatgagctgttgtatttccactttgaccttgtcaaagtcttcgctatcgctggcaagcttcgatatctcatgagcggctgcgagctcttcgcatgtttgaatatatgagtcgtacatatcatatggaatgacaggctgcgggagtgtcttgataaaccgaagtaatagcgcagcagcatcatgtaccgtatacccatcccagttgaatccctttccgtaccgctctggagtatcgaaaacggtctgcatatgcataagtcgcatcgggttaccacgatgcgcaaagatgtccacaacatca

SEQ ID NO: 11250 - DNA, 1593 bp, Muscodor strobelii
  misc_feature: SGI cDNA ID NO. 563606
  misc_feature: Elevated expression when VOC is produced
  misc_feature: Encodes the peptide sequence at SEQ ID NO 11251
atgaacgggaggcaatcagcagctccgttgcacatgagcaatggctctgcagcccatcgcaaaccaagattcctcgtcatcggtgcaggccgacgcggcacggcgtatgcgtccgcagtcaagcgtgaggatttgcccgcaatcattgccgcaattgcagagcctattctctcaaagcggacctcctttgggaagaaatatgtctatggtgacgagacaccgaaggaggggcaagattttgagtcctggcagcaattcctggcttatgagcggggtcgacggcaggacgaggctgctggtgcgcaagtattgcctggagttgacggcgtcatcgtatgcactcaggatcaaacgcacaaggacatcttacacgctttgggtccgttgaaattgcacgtattgtgtgaaaagccaatcgcaacgacgctacaggactgtcaggacatttacgtcagtctcgggggaggcaaggccccagagactatcttctcgaccggccatgtcctccgctacagccctcataacatgctattaaggaagctactattggaagataggctgattggcgaactgatctcagtcgagcacacggagccggtcggctggttccatttctcgcattcgtacgtccgagggaactggcggaaggaatccgtcgcggccccatcgctcctctgcaaatcatgccacgatatcgacttcatattatggctactatgctacaagacggacttcggagaaccgatgcatatgccgagcctggtcacatcgtctggaaacctctcgctcttcaccaagcgccgaaaacccaaatcggctcgaaacgccaccaactgcttctcatgcccacacgagcaagattgcgagtggagtgctaagaagatgtatatcgagaagttttacgatcaaggagaaagagatttcccggtgtgtgtcgtagtccctgatatcgaggacattgccgctgcagctggcgtcgaacatgggcgtgcgttgcttaagcaagccctaactttagactacgacagttctacaccgaaagacactgttgagtctcagcaatggtacggtcgttgtgtatgggagtctgataacgacgtcctcgatgatcaaatcgtcactctaacctgggacgacgactctggctcggttagcgataaggaattttctgatcgcggaccgaagactgctctcttccatatggtagccttcacagaagcgcagtgccagcgtcgtggcaagatctcgggcactcacggagagatacagtacaacagcaaagagatacgcgtgtttagatttgatcgattcggagaaccggaggcggtgcaggtttttacgccgccgaaggctacgagcggtcacgacggcggtgacgggggcctcatgaataacttctcgagagccgtggaggctgtcgtcaatagagagttgagcgtagagcaagcacaggcaaagtacgtcggatgtaccttgaaagaggcgttcatgagccacgctatggtcttcgctgccgaggaggctcgtcttggacggcaagtactggattggcaggattggtgggcggagctggagcatcgactcgattcttaa

SEQ ID NO: 11251 - protein, 530 aa, Muscodor strobelii
  misc_feature: SGI Peptide ID NO. 563606
  misc_feature (22)..(167): Pfam Id: PF01408 Pfam Desc: Oxidoreductase family, NAD-binding Rossmann fold
  misc_feature (105)..(150): Pfam Id: PF01408 Pfam Desc: Oxidoreductase family, NAD-binding Rossmann fold
  misc_feature (20)..(522): NCBI GI: 239607022 Blast Desc: NAD binding Rossmann fold oxidoreductase [Ajellomyces dermatitidis ER-3]
  misc_feature (20)..(522): NCBI GI: 261193988 Blast Desc: NAD binding Rossmann fold oxidoreductase [Ajellomyces dermatitidis SLH14081] gi|239588413|gb|EEQ71056.1| NAD binding Rossmann fold oxidoreductase [Ajellomyces dermatitidis SLH14081]
  misc_feature (23)..(523): NCBI GI: 258563770 Blast Desc: conserved [Uncinocarpus reesii 1704] gi|237908137|gb|EEP82538.1| conserved [Uncinocarpus reesii 1704]
  misc_feature (13)..(521): NCBI GI: 225556489 Blast Desc: streptomycin biosynthesis protein StrI [Ajellomyces capsulatus G186AR]
  misc_feature (23)..(521): NCBI GI: 212526336 Blast Desc: NAD binding Rossmann fold oxidoreductase, [Penicillium marneffei ATCC 18224] gi|210072723|gb|EEA26810.1| NAD binding Rossmann fold oxidoreductase, [Penicillium marneffei ATCC 18224]
  misc_feature (16)..(521): NCBI GI: 242780578 Blast Desc: NAD binding Rossmann fold oxidoreductase, [Talaromyces stipitatus ATCC 10500] gi|218719772|gb|EED19191.1| NAD binding Rossmann fold oxidoreductase, [Talaromyces stipitatus ATCC 10500]
  misc_feature (13)..(521): NCBI GI: 240273596 Blast Desc: streptomycin biosynthesis protein StrI [Ajellomyces capsulatus H143]
  misc_feature (23)..(521): NCBI GI: 240108290 Blast Desc: Oxidoreductase family, NAD-binding Rossmann fold containing protein [Coccidioides posadasii C735 delta SOWgp]
  misc_feature (22)..(523): NCBI GI: 164422372 Blast Desc: NCU10059 [Neurospora crassa OR74A] gi|157069563|gb|EAA34469.2| conserved [Neurospora crassa OR74A]
  misc_feature (23)..(521): NCBI GI: 119187181 Blast Desc: CIMG_03638 [Coccidioides immitis RS]
  misc_feature: Useful for introducing or modulating the production of volatile compounds
MNGRQSAAPLHMSNGSAAHRKPRFLVIGAGRRGTAYASAVKREDLPAIIAAIAEPILSKRTSFGKKYVYGDETPKEGQDFESWQQFLAYERGRRQDEAAGAQVLPGVDGVIVCTQDQTHKDILHALGPLKLHVLCEKPIATTLQDCQDIYVSLGGGKAPETIFSTGHVLRYSPHNMLLRKLLLEDRLIGELISVEHTEPVGWFHFSHSYVRGNWRKESVAAPSLLCKSCHDIDFILWLLCYKTDFGEPMHMPSLVTSSGNLSLFTKRRKPKSARNATNCFSCPHEQDCEWSAKKMYIEKFYDQGERDFPVCVVVPDIEDIAAAAGVEHGRALLKQALTLDYDSSTPKDTVESQQWYGRCVWESDNDVLDDQIVTLTWDDDSGSVSDKEFSDRGPKTALFHMVAFTEAQCQRRGKISGTHGEIQYNSKEIRVFRFDRFGEPEAVQVFTPPKATSGHDGGDGGLMNNFSRAVEAVVNRELSVEQAQAKYVGCTLKEAFMSHAMVFAAEEARLGRQVLDWQDWWAELEHRLDS

SEQ ID NO: 11252 - DNA, 1524 bp, Muscodor strobelii
  misc_feature: SGI cDNA ID NO. 563607
  misc_feature: Elevated expression when VOC is produced
  misc_feature: Encodes the peptide sequence at SEQ ID NO 11253
atgccgtggcttttagtcgccggcgtcctggcaggctacttcatgtctacaccactcttcaaatccgcctccagctacttgatcccaccaagtctcttagctttccacaaagggcagagcaatgcccacttatcaagcaatttgagctggtatgcgccatcggcttcacacataaacgatctcggttcagtgatcaatggtacgggaacgtatggcttcatctatgactcctccgagttaccggagggagttccttacggcacatacaactggtgcaacatgccgcatgtccggcgcaccgaatatccaaaaacggactcctcgtattctctcgagtacgttgaagtaatccatcgacaccacaagcggactccgtacgccgccaacacctttccagccgagacctacccctggtattgcaacgatgagggcctcttcttctacggcgctcccttgccgccacagagtgcgaatcattcagctaacacatactggagagtatacacctcttcatctaaccccttagttccgcgaggatttcagggcacctgtcagtttccacagatcactcgcgaagggcttgatgatagctggcagcatggcaaggacctatatgaaatttatcatgacatgcttgggtttttacccaagaaatacgaccccgatctcatcagttttcgagttacgaacaacatcatcacatcacaggtggcaagcatggtaatatcaggcatgtttaccaaccaagctgaccaagacatacccctcctcattcaacctgcgagcattgatggtctcgagccgggctaccagtgcccagcggcccaggataaatttgcagcgtatggtccggggagctccgatccaggttggactgcgcaccttgaagctgcctccggcctatttgcggatcttgataccatatctggcgtttcgcctacagactcaggtttccacatgtcctttgaccactacttcgacaacctctccgcgcgcctctgccacgaaaaaccgctgccctgcaacgccagcaacccatccctctgcgtcacgcaagccatggcggacgaggtcttccggttagggcagtatgagtacagttacttatatcgaggcgccggcgtacagacgcttgagtatactgttggtaaatacggcatttggattgcggaactagcgcataacttacgcgacatgatgcaggcagttgggagcaaaacgaaaagtgccatacgatatcggcataacgttgcacatgatggaagcattagttacatactgagtatcctgcaggtggaatcaatggtgtggccggggatggggagtgagatagtatttgagctctacaagcgtaaggaagatcagcagtactacatcagagtcttgtggggtgggcaagtgctgagaagtagcaatccgggtcttgggtcgctagaaatggtaccagctgagctccttcttacatactttgatgagcttgtaggccaggaggcagagaagatacccggcctgtgtaggctgtga

SEQ ID NO: 11253 - protein, 507 aa, Muscodor strobelii
  misc_feature: SGI Peptide ID NO. 563607
  misc_feature (110)..(464): Pfam Id: PF00328 Pfam Desc: Histidine acid phosphatase
  misc_feature (396)..(464): Pfam Id: PF00328 Pfam Desc: Histidine acid phosphatase
  misc_feature (44)..(505): NCBI GI: 238842759 Blast Desc: conserved [Microsporum canis CBS 113480]
  misc_feature (47)..(506): NCBI GI: 240110865 Blast Desc: Histidine acid phosphatase family protein [Coccidioides posadasii C735 delta SOWgp]
  misc_feature (47)..(506): NCBI GI: 225678579 Blast Desc: conserved [Paracoccidioides brasiliensis Pb03]
  misc_feature (47)..(506): NCBI GI: 119196509 Blast Desc: CIMG_02629 [Coccidioides immitis RS]
  misc_feature (47)..(506): NCBI GI: 226285770 Blast Desc: conserved [Paracoccidioides brasiliensis Pb01]
  misc_feature (68)..(505): NCBI GI: 226294706 Blast Desc: conserved [Paracoccidioides brasiliensis Pb18]
  misc_feature (27)..(506): NCBI GI: 169595838 Blast Desc: SNOG_00663 [Phaeosphaeria nodorum SN15] gi|160701168|gb|EAT92158.2| SNOG_00663 [Phaeosphaeria nodorum SN15]
  misc_feature (94)..(506): NCBI GI: 258569617 Blast Desc: [Uncinocarpus reesii 1704] gi|237903882|gb|EEP78283.1| [Uncinocarpus reesii 1704]
  misc_feature (46)..(505): NCBI GI: 242823966 Blast Desc: DNA replication factor C subunit Rfc4, [Talaromyces stipitatus ATCC 10500] gi|218713087|gb|EED12512.1| DNA replication factor C subunit Rfc4, [Talaromyces stipitatus ATCC
  misc_feature (50)..(505): NCBI GI: 256732312 Blast Desc: NECHADRAFT_41379 [Nectria haematococca mpVI 77-13-4]
  misc_feature (103)..(480): SWISSPROT Homolog: EC 3.1.3.2 Acid phosphatase
  misc_feature: Useful for introducing or modulating the production of volatile compounds
MPWLLVAGVLAGYFMSTPLFKSASSYLIPPSLLAFHKGQSNAHLSSNLSWYAPSASHINDLGSVINGTGTYGFIYDSSELPEGVPYGTYNWCNMPHVRRTEYPKTDSSYSLEYVEVIHRHHKRTPYAANTFPAETYPWYCNDEGLFFYGAPLPPQSANHSANTYWRVYTSSSNPLVPRGFQGTCQFPQITREGLDDSWQHGKDLYEIYHDMLGFLPKKYDPDLISFRVTNNIITSQVASMVISGMFTNQADQDIPLLIQPASIDGLEPGYQCPAAQDKFAAYGPGSSDPGWTAHLEAASGLFADLDTISGVSPTDSGFHMSFDHYFDNLSARLCHEKPLPCNASNPSLCVTQAMADEVFRLGQYEYSYLYRGAGVQTLEYTVGKYGIWIAELAHNLRDMMQAVGSKTKSAIRYRHNVAHDGSISYILSILQVESMVWPGMGSEIVFELYKRKEDQQYYIRVLWGGQVLRSSNPGLGSLEMVPAELLLTYFDELVGQEAEKIPGLCRL

SEQ ID NO: 11254 - DNA, 3931 bp, Muscodor strobelii
  misc_feature: SGI EST ID NO. CUFF.26706.1
  misc_feature: Variant of the nucleotide sequence at SEQ ID NO 11252
gttctcatccattattgagattcgattcgcaaagtcattttagtagatgattcggaacgctaacagcacacgtttagtgcaacgacaatacgctctactagtagtatccttgatcgcgggcaggtcctgcgcatagaggaacagagcagaagacttcctctgtgaaattatagatacagtacaagttctgcgtattgtatatatctcctgtctatgcacgtcgtactttacaaataatactatatcatacgaagggagtgcttgtatcatcaaaatctcgaaatgccgtggcttttagtcgccggcgtcctggcaggctacttcatgtctacaccactcttcaaatccgcctccagctacttgatcccaccaagtctcttagctttccacaaagggcagagcaatgcccacttatcaagcaatttgagctggtatgcgccatcggcttcacacataaacgatctcggttcagtgatcaatggtacgggaacgtatggcttcatctatgactcctccgagttaccggagggagttccttacggcacatacaactggtgcaacatgccgcatgtccggcgcaccgaatatccaaaaacggactcctcgtattctctcgagtacgttgaagtaatccatcgacaccacaagcggactccgtacgccgccaacacctttccagccgagacctacccctggtattgcaacgatgagggcctcttcttctacggcgctcccttgccgccacagagtgcgaatcattcagctaacacatactggagagtatacacctcttcatctaaccccttagttccgcgaggatttcagggcacctgtcagtttccacagatcactcgcgaagggcttgatgatagctggcagcatggcaaggacctatatgaaatttatcatgacatgcttgggtttttacccaagaaatacgaccccgatctcatcagttttcgagttacgaacaacatcatcacatcacaggtggcaagcatggtaatatcaggcatgtttaccaaccaagctgaccaagacatacccctcctcattcaacctgcgagcattgatggtctcgagccgggctaccagtgcccagcggcccaggataaatttgcagcgtatggtccggggagctccgatccaggttggactgcgcaccttgaagctgcctccggcctatttgcggatcttgataccatatctggcgtttcgcctacagactcaggtttccacatgtcctttgaccactacttcgacaacctctccgcgcgcctctgccacgaaaaaccgctgccctgcaacgccagcaacccatccctctgcgtcacgcaagccatggcggacgaggtcttccggttagggcagtatgagtacagttacttatatcgaggcgccggcgtacagacgcttgagtatactgttggtaaatacggcatttggattgcggaactagcgcataacttacgcgacatgatgcaggcagttgggagcaaaacgaaaagtgccatacgatatcggcataacgttgcacatgatggaagcattagttacatactgagtatcctgcaggtggaatcaatggtgtggccggggatggggagtgagatagtatttgagctctacaagcgtaaggaagatcagcagtactacatcagagtcttgtggggtgggcaagtgctgagaagtagcaatccgggtcttgggtcgctagaaatggtaccagctgagctccttcttacatactttgatgagcttgtaggccaggaggcagagaagatacccggcctgtgtaggctgtgaattgcggggacatctagctcagatactttgatcagggaacgataataggctttctaattaagaatcgagtcgatgctccagctccgcccaccaatcctgccaatccagtacttgccgtccaagacgagcctcctcggcagcgaagaccatagcgtggctcatgaacgcctctttcaaggtacatccgacgtactttgcctgtgcttgctctacgctcaactctctattgacgacagcctccacggctctcgagaagttattcatgaggcccccgtcaccgccgtcgtgaccgctcgtagccttcggcggcgtaaaaacctgcaccgcctccggttctccgaatcgatcaaatctaaacacgcgtatctctttgctgttgtactgtatctctccgtgagtgcccgagatcttgccacgacgctggcactgcgcttctgtgaaggctaccatatggaagagagcagtcttcggtccgcgatcagaaaattccttatcgctaaccgagccagagtcgtcgtcccaggttagagtgacgatttgatcatcgaggacgtcgttatcagactcccatacacaacgaccgtaccattgctgagactcaacagtgtctttcggtgtagaactgtcgtagtctaaagttagggcttgcttaagcaacgcacgcccatgttcgacgccagctgcagcggcaatgtcctcgatatcagggactacgacacacaccgggaaatctctttctccttgatcgtaaaacttctcgatatacatcttcttagcactccactcgcaatcttgctcgtgtgggcatgagaagcagttggtggcgtttcgagccgatttgggttttcggcgcttggtgaagagcgagaggtttccagacgatgtgaccaggctcggcatatgcatcggttctccgaagtccgtcttgtagcatagtagccataatatgaagtcgatatcgtggcatgatttgcagaggagcgatggggccgcgacggattccttccgccagttccctcggacgtacgaatgcgagaaatggaaccagccgaccggctccgtgtgctcgactgagatcagttcgccaatcagcctatcttccaatagtagcttccttaatagcatgttatgagggctgtagcggaggacatggccggtcgagaagatagtctctggggccttgcctcccccgagactgacgtaaatgtcctgacagtcctgtagcgtcgttgcgattggcttttcacacaatacgtgcaatttcaacggacccaaagcgtgtaagatgtccttgtgcgtttgatcctgagtgcatacgatgacgccgtcaactccaggcaatacttgcgcaccagcagcctcgtcctgccgtcgaccccgctcataagccaggaattgctgccaggactcaaaatcttgcccctccttcggtgtctcgtcaccatagacatatttcttcccaaaggaggtccgctttgagagaataggctctgcaattgcggcaatgattgcgggcaaatcctcacgcttgactgcggacgcatacgccgtgccgcgtcggcctgcaccgatgacgaggaatcttggtttgcgatgggctgcagagccattgctcatgtgcaacggagctgctgattgcctcccgttcatgtttccggccatgtcagatagtctacggacattaacgtacaggcccaaaattccatagactcgatgggtttcctatgtgcttgaggcaatgagtagcttagatacggtactggcgccaagaatttcatttgcggccgttgtgtgggtggcccagcttgtctcgcctcctagcatctggcagggtccgcaagaaaatgattgcgtattgcgcaattacgacttagattctaacactgctatcatttctatcatttatatataaacagtgctcaatcgcaatgtgtaagtcgtttgcgattttgaatgttcttggctggagaccgtttcacccaagtagtaagacccgcagcatgtcgtcgcaaaccctctctttgtgtaatctttccaggactcatggaaatagtcttctcgcccgcaggcttcgcgcggcagactaggtgaattcttgaagggtacacataggcgggtggtgtac

SEQ ID NO: 11255 - DNA, 5349 bp, Muscodor strobelii
  misc_feature: SGI cDNA ID NO. 563608
  misc_feature: Encodes the peptide sequence at SEQ ID NO 11256
atgagtacctctggacttcctaaactccctgccgctcacgatgagctggtcaactacatcgcggatcagccttccacgcccttggagacgttggtggaaccataccgcaagtttgaagcccagctccgtgagatctacgctcaagaccgcaaaaatcctatccttgatgacccttacctcaatgtcttgcccctattcaccaaagacacccctaacatcaagactcgagcccgcgatgttgcgaacgaaactcgggaacagaaggataagtatatcatgtcccttcctgacgacaaacgtcgtgccaatggatctcccgctacagtcgaatctctcaaggagtttcgccacaactttagtgtcttctccgagtcgtctctggctgatatgaactgggacaatgtcgttgctgccggctcttccgttgtcaactgtattcttcctgttcccccagagttcaagaaatccaagcgagcactccgtgaatactaccatgagagattctgtccagcgtctgacgtcgacttgttcttgtatggtctcaacgaggaacaagctattgagaaaatcaaagacatcgaagctcgtattcgcgatgccattctctcggaggtgactgttgtcagaaccaagaacgctattaccatttgcagtcaatatcccacacgccacgtccaagttgttcttcgtgtatacaagtccatctcggaaattctgacaggattcgacatcgattgctcgggcgcagcatatgatggcaaacaagtgtacacaacaccgcgtgccctggcatcgtatatcacccagatcaatcctatcgacctcactcgccgaagtccctcatacgagaatcgtttgtctaagtatagtcaccgaaacttcgaagtttattggccagagcttgaccgttctcgtgttgatccaacgatcttcgaacgaagcttccagcggacactgggtcttgctcgactgcttgtactcgaacgattgcctactactaatgctcgtgagcagtatttgaagaagcgtagagaggaaagaggtcgtcctgagctcgtgcagcgcttccaacatcgcctctttggcaacatcaaggatatccacgaggatgagattgccgattgggtagatgaaacagaggtgtccaactatcataccttcacagttccatacggtgtcaagttccacgcaaaaaagattgagaagctttgttatacgaaagatcttttacttaatgcagagtggaaccagccgaaagaaagagaagtttatctccataggcatccagctttctttgggagagttgaagacgtcttcggtgactgttgcggaacatgccctcaacctaagacaaccgaagagatcgaaattgctgagaaagagaccgaaatttacgtatcaggtaatgtgtccttccgcatcgatgaccctgggcgacaacagatcgggtctttcaatcctctgaccgaagacgactggactgaaatggcatatgttggcaatactgctcgactttgccaagctattgtcgacggcgatctagagcatgttgaggactggcttgcccaagagggtgctgatcctaacacgagagattacactggccggacgccactacatctcgccgttacaagttcgacccctgctatcgtcaagtgtctggtcgaccatggtgcacgcctagtagcacgaatcgctgatggtcgaactgcacttcatctcgcagctggtcgcggaaatgttgaaatggttaagatccttctccaacagagtgaggccaacgaagaagaagaggaagagagacaagatcaacgccgcaaagctcgagaggaagccactaaagatggcaaatcaagcaccacaagcggaggcgaggcttcgagtgaagaaaccgatgaaagtgaagacgaagagtcagatggcgagcttgtcgacgatgattcgtccgacgatggtgtacaatccatggccacaggctcgttcgtcaaagtcggtaaagaagacactaagagtgatgggtctgtaccacttgatgatgataagaacgacccagatttctataagatagaagctgtcgcgtgggattcgaaatgctccgccctacatctggcaattcttggcggacacattgatgttgttagattgttggtgtcagagttcggcgctgatgcgcttgtccccgtcaagttcggagatggctcgtacggcgaccctctggttgcaattctcacattggttctcgccctttctctgcctcttaagaaggcagtggaaatgtcccagacactactcgatctgggcgccacctcttcacaggctgatgtaaatggaatcacggctttccaccgatacgtacagaatggcacaccggaacttcttgatagtctctgggcaaatgataagctcggcctcaaaaccgcgatcaatcacgttgcagtttccgggaatgcctggaacgcaaacgcaactactcctcttatgaccgcgatcgaccaaggcaacccgatcctcgttctcaagattcttgaagcaggagcgaaaccagaggttgactttgaaagttggctcaagggtgcaaaattcactttcgatagacaactaggtgacgaaaattcgaacagggtcaaataccaagattcagttgaacaacctcttttagttgcgattagatctccccagccaacgattgcactcgaacttctggacagaggtgcagaccccaacccagtcacaaaggcatcacacaactgtattcgaaacgaatgggcgcgtcgttacaatagaggagagagcgcattggatgttgtacgaaagctattagggaagcttcgcgactacacgagtcagaaaggcgtggccctacaagacgggcaccggcaaatcaaacagcgcccttcggagccgcgtcgcgtaaatgagttcctgagtcagttcgaggaagggacttaccaacactgggttgcctcaattgacgctcgagataccgttaaacattatgaagaagaactcgagaaatacgagaaacaagagaagagactcggtgcactgaaaggtcgaaaagagaagctagacgccatcaaaggtacaatctctcaacttgaaaaagtcgagaaagagcttttgaggcgtggcgcaaagacgtttcaggagttgcatcccaacatcgagaccacgtatcagactcagaagtcgacggaagctgaaaacaataaacccgactacacattcgaatttgggtttcagggggtcaacaatctgactgacgctcgcaggcaagcctacatagagttgttcgaagctgcctgggttggcgatctagacaaaatcaggtccttgacactagcctcgtgggacacagaaggtcaggagcctccgctaaacatcaccgtgagtgacaacaagtacagcactgctttctcacttgcgttcctcaagggtcacttcgatgttgcgaaagctatactcgagatcgcacaagctcagtgggcgcccatggaggaagaaaaggccgtgttcaagatcaagaagtacgatgaagacgaagaggaggagaactctgattccgacagtggtagcgacgtggaagtctacaaggaaataatcaacaaccagttcacgatcgacaatatcggccaagtatcgatgcaggtcaaaagccacgttctaccaagttcgtacctcagtcgccacgttacgacctttgtgatgaaaggcggaaaggttgaggattccacgttccactcccggaaccctctgacttttgcaatggagcagaatgatacggagcgtttcaatttcctactggatatgcacactaagtttgctagcctcaagcctgaccaggatgacgatgaagactccacaaagatataccgatttcctgacattgagtttcaacatgcgattcgtatgggcagaactcagatgcttgcggacgttattcgacggtcaggcgcaggcattcctcttgaggacctcgtgaagaagagtggaacagaattgaaaatcaaaccgcgctactaccagggcttgacagtgtacggcaaaaagagagcggattgggtaaataaaagccgcaatatcttccatcgccccaattcaagcaaaaaccgaccaccgctcctgcaggcggcctccgatggatcccttgagtccgtagaatggttcttgagcgacgcccctctgagatactattctgagttcggtcaatccaaagctgcgaaagaggatccccgtctaaagcatctcgtcgaatcttccggcggattcgacagggcgatcaccaaatggttgggtgcgcaaaatgatttagtcattcactgcgccgtattaggtcctatcggggagaacacaaacaaattgattgagtacctcatcaaagtttgcccttcatcacttgaagccaagtcagagcaagggtttacaccgctgtatctcgcctgtcttaacggcagagttcagttcgccaagaccctcattgatgctggagctgaccaatcggtcaaggacaaggagttcaacaacctcatacacgcgtgtcttgcaaacggaccaatcgtcgaactgctcaaacaaatgtttgacctgttcgatccggagttaagagctcacatgttctgccagcggaacaatctcacgaatggtggcgacactcctctacatttctggcttaagactgcgaacccggtcacctattcataccgatacacaaatagaggacgtatcggagatttggaagacgagaaactctacaatgtgaagatactacgtctaatccttgagtactcaaacggagaggagttggagatcctgaatggatcgggtgataccgtgcttcacactgctgttgtccgtcacttacctcgtcatgccgaggtactcctcgagcagaagcctaaggtactctaccgcgaaaacaccgtcggacgcaccccaggcgagatcgcgtatgatgctttcatcaattgcaaggtgcagactccggagtctctcgaacttcttgacaacaacagttatgctcagcaaattgtggacagggagccaggatcattcgacaaggccagcacaaaaaccaagacgactcgtaaggaagcgacgtgggagctagtccaggagtatcttgcaaaagtgcccggcgagagaagacttgtcagcctgaacgaggcaaacgacgttgcgagacgcctgggggagagctatgcttggcaacgctacttctcgtatgcaaagaagactccgaacgacgacgagatgcccgaagaggaaaagaaggaagaggagaaagaaacagatttcattggcaatggtcgaagaggtgtttggtatgtggagaagaagagtgaggcataa

SEQ ID NO: 11256 - protein, 1782 aa, Muscodor strobelii
  misc_feature: SGI Peptide ID NO. 563608
  misc_feature (1472)..(1504): Pfam Id: PF00023 Pfam Desc: Ankyrin repeat
  misc_feature (534)..(566): Pfam Id: PF00023 Pfam Desc: Ankyrin repeat
  misc_feature (567)..(598): Pfam Id: PF00023 Pfam Desc: Ankyrin repeat
  misc_feature (696)..(729): Pfam Id: PF00023 Pfam Desc: Ankyrin repeat
  misc_feature (567)..(590): Pfam Id: PF00023 Pfam Desc: Ankyrin repeat
  misc_feature (6)..(1778): NCBI GI: 256734513 Blast Desc: NECHADRAFT_98809 [Nectria haematococca mpVI 77-13-4]
  misc_feature (4)..(1740): NCBI GI: 46107334 Blast Desc: FG00550.1 [Gibberella zeae PH-1]
  misc_feature (1)..(1740): NCBI GI: 261357573 Blast Desc: ankyrin repeat protein [Verticillium albo-atrum VaMs.102]
  misc_feature (1)..(1766): NCBI GI: 39941490 Blast Desc: MGG_05656 [Magnaporthe grisea 70-15] gi|145022344|gb|EDK06364.1| MGG_05656 [Magnaporthe grisea 70-15]
  misc_feature (1)..(1738): NCBI GI: 171687587 Blast Desc: protein product [Podospora anserina] gi|170943755|emb|CAP69407.1| protein product [Podospora anserina]
  misc_feature (1)..(1738): NCBI GI: 116180612 Blast Desc: CHGG_00934 [Chaetomium globosum CBS 148.51] gi|88185231|gb|EAQ92699.1| CHGG_00934 [Chaetomium globosum CBS 148.51]
  misc_feature (1)..(1774): NCBI GI: 164423360 Blast Desc: NCU08603 [Neurospora crassa OR74A] gi|157070058|gb|EAA34799.2| conserved [Neurospora crassa OR74A]
  misc_feature (6)..(1734): NCBI GI: 121704329 Blast Desc: ankyrin repeat protein [Aspergillus clavatus NRRL 1] gi|119398573|gb|EAW09002.1| ankyrin repeat protein [Aspergillus clavatus NRRL 1]
  misc_feature (5)..(1730): NCBI GI: 169781966 Blast Desc: [Aspergillus oryzae RIB40] gi|83774188|dbj|BAE64313.1| protein product [Aspergillus oryzae]
  misc_feature (6)..(1762): NCBI GI: 119501367 Blast Desc: ankyrin repeat protein [Neosartorya fischeri NRRL 181] gi|119415606|gb|EAW25543.1| ankyrin repeat protein [Neosartorya fischeri NRRL 181]
MSTSGLPKLPAAHDELVNYIADQPSTPLETLVEPYRKFEAQLREIYAQDRKNPILDDPYLNVLPLFTKDTPNIKTRARDVANETREQKDKYIMSLPDDKRRANGSPATVESLKEFRHNFSVFSESSLADMNWDNVVAAGSSVVNCILPVPPEFKKSKRALREYYHERFCPASDVDLFLYGLNEEQAIEKIKDIEARIRDAILSEVTVVRTKNAITICSQYPTRHVQVVLRVYKSISEILTGFDIDCSGAAYDGKQVYTTPRALASYITQINPIDLTRRSPSYENRLSKYSHRNFEVYWPELDRSRVDPTIFERSFQRTLGLARLLVLERLPTTNAREQYLKKRREERGRPELVQRFQHRLFGNIKDIHEDEIADWVDETEVSNYHTFTVPYGVKFHAKKIEKLCYTKDLLLNAEWNQPKEREVYLHRHPAFFGRVEDVFGDCCGTCPQPKTTEEIEIAEKETEIYVSGNVSFRIDDPGRQQIGSFNPLTEDDWTEMAYVGNTARLCQAIVDGDLEHVEDWLAQEGADPNTRDYTGRTPLHLAVTSSTPAIVKCLVDHGARLVARIADGRTALHLAAGRGNVEMVKILLQQSEANEEEEEERQDQRRKAREEATKDGKSSTTSGGEASSEETDESEDEESDGELVDDDSSDDGVQSMATGSFVKVGKEDTKSDGSVPLDDDKNDPDFYKIEAVAWDSKCSALHLAILGGHIDVVRLLVSEFGADALVPVKFGDGSYGDPLVAILTLVLALSLPLKKAVEMSQTLLDLGATSSQADVNGITAFHRYVQNGTPELLDSLWANDKLGLKTAINHVAVSGNAWNANATTPLMTAIDQGNPILVLKILEAGAKPEVDFESWLKGAKFTFDRQLGDENSNRVKYQDSVEQPLLVAIRSPQPTIALELLDRGADPNPVTKASHNCIRNEWARRYNRGESALDVVRKLLGKLRDYTSQKGVALQDGHRQIKQRPSEPRRVNEFLSQFEEGTYQHWVASIDARDTVKHYEEELEKYEKQEKRLGALKGRKEKLDAIKGTISQLEKVEKELLRRGAKTFQELHPNIETTYQTQKSTEAENNKPDYTFEFGFQGVNNLTDARRQAYIELFEAAWVGDLDKIRSLTLASWDTEGQEPPLNITVSDNKYSTAFSLAFLKGHFDVAKAILEIAQAQWAPMEEEKAVFKIKKYDEDEEEENSDSDSGSDVEVYKEIINNQFTIDNIGQVSMQVKSHVLPSSYLSRHVTTFVMKGGKVEDSTFHSRNPLTFAMEQNDTERFNFLLDMHTKFASLKPDQDDDEDSTKIYRFPDIEFQHAIRMGRTQMLADVIRRSGAGIPLEDLVKKSGTELKIKPRYYQGLTVYGKKRADWVNKSRNIFHRPNSSKNRPPLLQAASDGSLESVEWFLSDAPLRYYSEFGQSKAAKEDPRLKHLVESSGGFDRAITKWLGAQNDLVIHCAVLGPIGENTNKLIEYLIKVCPSSLEAKSEQGFTPLYLACLNGRVQFAKTLIDAGADQSVKDKEFNNLIHACLANGPIVELLKQMFDLFDPELRAHMFCQRNNLTNGGDTPLHFWLKTANPVTYSYRYTNRGRIGDLEDEKLYNVKILRLILEYSNGEELEILNGSGDTVLHTAVVRHLPRHAEVLLEQKPKVLYRENTVGRTPGEIAYDAFINCKVQTPESLELLDNNSYAQQIVDREPGSFDKASTKTKTTRKEATWELVQEYLAKVPGERRLVSLNEANDVARRLGESYAWQRYFSYAKKTPNDDEMPEEEKKEEEKETDFIGNGRRGVWYVEKKSEA

SEQ ID NO: 11257 - DNA, 3005 bp, Muscodor strobelii
  misc_feature: SGI EST ID NO. CUFF.26721.0
  misc_feature: Variant of the nucleotide sequence at SEQ ID NO 11255
gcaaaattcactttcgatagacaactaggtgacgaaaattcgaacagggtcaaataccaagattcagttgaacaacctcttttagttgcgattagatctccccagccaacgattgcactcgaacttctggacagaggtgcagaccccaacccagtcacaaaggcatcacacaactgtattcgaaacgaatgggcgcgtcgttacaatagaggagagagcgcattggatgttgtacgaaagctattagggaagcttcgcgactacacgagtcagaaaggcgtggccctacaagacgggcaccggcaaatcaaacagcgcccttcggagccgcgtcgcgtaaatgagttcctgagtcagttcgaggaagggacttaccaacactgggttgcctcaattgacgctcgagataccgttaaacattatgaagaagaactcgagaaatacgagaaacaagagaagagactcggtgcactgaaaggtcgaaaagagaagctagacgccatcaaaggtacaatctctcaacttgaaaaagtcgagaaagagcttttgaggcgtggcgcaaagacgtttcaggagttgcatcccaacatcgagaccacgtatcagactcagaagtcgacggaagctgaaaacaataaacccgactacacattcgaatttgggtttcagggggtcaacaatctgactgacgctcgcaggcaagcctacatagagttgttcgaagctgcctgggttggcgatctagacaaaatcaggtccttgacactagcctcgtgggacacagaaggtcaggagcctccgctaaacatcaccgtgagtgacaacaagtacagcactgctttctcacttgcgttcctcaagggtcacttcgatgttgcgaaagctatactcgagatcgcacaagctcagtgggcgcccatggaggaagaaaaggccgtgttcaagatcaagaagtacgatgaagacgaagaggaggagaactctgattccgacagtggtagcgacgtggaagtctacaaggaaataatcaacaaccagttcacgatcgacaatatcggccaagtatcgatgcaggtcaaaagccacgttctaccaagttcgtacctcagtcgccacgttacgacctttgtgatgaaaggcggaaaggttgaggattccacgttccactcccggaaccctctgacttttgcaatggagcagaatgatacggagcgtttcaatttcctactggatatgcacactaagtttgctagcctcaagcctgaccaggatgacgatgaagactccacaaagatataccgatttcctgacattgagtttcaacatgcgattcgtatgggcagaactcagatgcttgcggacgttattcgacggtcaggcgcaggcattcctcttgaggacctcgtgaagaagagtggaacagaattgaaaatcaaaccgcgctactaccagggcttgacagtgtacggcaaaaagagagcggattgggtaaataaaagccgcaatatcttccatcgccccaattcaagcaaaaaccgaccaccgctcctgcaggcggcctccgatggatcccttgagtccgtagaatggttcttgagcgacgcccctctgagatactattctgagttcggtcaatccaaagctgcgaaagaggatccccgtctaaagcatctcgtcgaatcttccggcggattcgacagggcgatcaccaaatggttgggtgcgcaaaatgatttagtcattcactgcgccgtattaggtcctatcggggagaacacaaacaaattgattgagtacctcatcaaagtttgcccttcatcacttgaagccaagtcagagcaagggtttacaccgctgtatctcgcctgtcttaacggcagagttcagttcgccaagaccctcattgatgctggagctgaccaatcggtcaaggacaaggagttcaacaacctcatacacgcgtgtcttgcaaacggaccaatcgtcgaactgctcaaacaaatgtttgacctgttcgatccggagttaagagctcacatgttctgccagcggaacaatctcacgaatggtggcgacactcctctacatttctggcttaagactgcgaacccggtcacctattcataccgatacacaaatagaggacgtatcggagatttggaagacgagaaactctacaatgtgaagatactacgtctaatccttgagtactcaaacggagaggagttggagatcctgaatggatcgggtgataccgtgcttcacactgctgttgtccgtcacttacctcgtcatgccgaggtactcctcgagcagaagcctaaggtactctaccgcgaaaacaccgtcggacgcaccccaggcgagatcgcgtatgatgctttcatcaattgcaaggtgcagactccggagtctctcgaacttcttgacaacaacagttatgctcagcaaattgtggacagggagccaggatcattcgacaaggccagcacaaaaaccaagacgactcgtaaggaagcgacgtgggagctagtccaggagtatcttgcaaaagtgcccggcgagagaagacttgtcagcctgaacgaggcaaacgacgttgcgagacgcctgggggagagctatgcttggcaacgctacttctcgtatgcaaagaagactccgaacgacgacgagatgcccgaagaggaaaagaaggaagaggagaaagaaacagatttcattggcaatggtcgaagaggtgtttggtatgtggagaagaagagtgaggcataagaccatggcttgcttctatttgttatgccgatgcgagaagtttcatgtgacaggagagatgacatatgagaagctcaatgatgatcttctttgtacgagaatgggtctatgaatgattaaaatcaagccttaggtagcttacatcatgatagctcacagttcacatcaatatcatgtctatagctcgaggcgaccgtagccaaatgccaaatgtggtcgccaaacttcta

SEQ ID NO: 11258 - DNA, 1887 bp, Muscodor strobelii
  misc_feature: SGI cDNA ID NO. 563609
  misc_feature: Elevated expression when VOC is produced
  misc_feature: Encodes the peptide sequence at SEQ ID NO 11259
atgctttcctcctccacttactgcattcaattacaagcatctccaacccgtgctgatgtcgacaaggcgcacaagcgtaatagatgggtggatattggtgcaccgagtcttagaaacttgagatatataggtcgctggcggcttctctcatgcgttgttctcctcttgacttctttgcccattcatctcgtcttcaactcggctgtctttcaatcactggcgtctaatgattattctgttgcggtagccaaggactcgttccttacaggagcgagttggaatctatcgacagcccaacgcaatgggaaggacaatgttgggtgggacgaatggaaggtaaccgcaccagacgaggactatgagaccatcatctcggatatgcaaaaagacgttatgaagggccgctacgagaggaagaatctatctgactgctacgcgatctacgacgactactggaatctgcagcaaagcaatgttgtggtgctcatcaagaatgcgactctgagaacagaagacaatgacacattgttactctataacttcgttgcaccccgttacgacaactatgcgaagaacctatgggccgctaccaatggtactaatgaaaccgtcgcattctcaccagatccgcccgtaacgactgtgtacctcggaccgccttactttgaggcttctcactgtctcgtggagccccctcgtccggctacagacaagtgtcgactcgagtactcaacacacatactgtacacagttgtcgtcctcaatttcatcaagctcatcgcaatattgtccgtcttcactagccggagagtagcagggcggcgactcaaaacccgtactgatgaatggagcgcttgtgagaatacgcaaggttcaattgctgcgcgcaaagaagtggtcctctcgactctcggcgatgcgattgaatcctttatgcgggatcctgatgaagcaacaagaggcatgtgtctcatcaccaagtacgacgtggtcaagaagtcagatcgtgacattcatcctcgccagtggaaactgttaccgaaaaggtggttctcatctgtgtcgggcaagcagtggttcagtctgatattcatctatatcttattcctcactggtctctataccagccttgggcttctcactgcatctctgaagaaccgacatttcgacctcactcttcctttcttccgatccttgggcttcggatccgtctcggctctcacataccttaacatcgagctcccacgtggcgatcctgaaggtcttatctcaaatgttctgatcattaattccccacaagttctattttcaatcttgtacagcatctcgggtgctgtactaaccactttcctcgttcaacgcgaatgggctctcatgtggaagtccgaccgccgcaagacgttgcgcgtgtcagagcctgtagggattcagcgctcaagttacttcatatctcttcccttgcgctacggcatccctctgaacgtatcatcggccgtctttcactggctcatctctcaaagttacttccttgcgcgtgtcaccgcactacttcccagtggcgagcaggactatggaaactccttctcgaccctcgggtacagcccttatcccatcatcataacgggaataattggtttcataaatctcatggcgattgtcatcatgggattccgtaagtacgatggtacaatgagtatggtctctacaaatagtagggcgattagtgctgcgtgtcatagtcttccccaggatagtgaatttgggtatcagctccctcttcaatggggtgtggtcggttctagtgattatggagttggacattgcgcttttacttctgcaccgccccatactgttgggagaccgcaagagggagctttgtattggtag

SEQ ID NO: 11259 - protein, 628 aa, Muscodor strobelii
  misc_feature: SGI Peptide ID NO. 563609
  misc_feature (1)..(627): NCBI GI: 259485829 Blast Desc: TPA: [Aspergillus nidulans FGSC A4]
  misc_feature (1)..(627): NCBI GI: 255940860 Blast Desc: Pc16g08800 [Penicillium chrysogenum Wisconsin 54-1255] gi|211585822|emb|CAP93550.1| Pc16g08800 [Penicillium chrysogenum Wisconsin 54-1255]
  misc_feature (1)..(627): NCBI GI: 169784740 Blast Desc: [Aspergillus oryzae RIB40] gi|83775578|dbj|BAE65698.1| protein product [Aspergillus oryzae]
  misc_feature (1)..(601): NCBI GI: 255943715 Blast Desc: Pc20g00630 [Penicillium chrysogenum Wisconsin 54-1255] gi|211587360|emb|CAP85392.1| Pc20g00630 [Penicillium chrysogenum Wisconsin 54-1255]
  misc_feature (1)..(627): NCBI GI: 238839355 Blast Desc: conserved [Microsporum canis CBS 113480]
  misc_feature (1)..(612): NCBI GI: 255949210 Blast Desc: Pc22g14510 [Penicillium chrysogenum Wisconsin 54-1255] gi|211592389|emb|CAP98739.1| Pc22g14510 [Penicillium chrysogenum Wisconsin 54-1255]
  misc_feature (1)..(627): NCBI GI: 256733357 Blast Desc: NECHADRAFT_67018 [Nectria haematococca mpVI 77-13-4]
  misc_feature (56)..(627): NCBI GI: 189201289 Blast Desc: conserved [Pyrenophora tritici-repentis Pt-1C-BFP] gi|187984080|gb|EDU49568.1| conserved [Pyrenophora tritici-repentis Pt-1C-BFP]
  misc_feature (1)..(627): NCBI GI: 169767150 Blast Desc: [Aspergillus oryzae RIB40] gi|83765901|dbj|BAE56044.1| protein product [Aspergillus oryzae]
  misc_feature (1)..(627): NCBI GI: 169774921 Blast Desc: [Aspergillus oryzae RIB40] gi|83769791|dbj|BAE59926.1| protein product [Aspergillus oryzae]
  misc_feature: Useful for introducing or modulating the production of volatile compounds
MLSSSTYCIQLQASPTRADVDKAHKRNRWVDIGAPSLRNLRYIGRWRLLSCVVLLLTSLPIHLVFNSAVFQSLASNDYSVAVAKDSFLTGASWNLSTAQRNGKDNVGWDEWKVTAPDEDYETIISDMQKDVMKGRYERKNLSDCYAIYDDYWNLQQSNVVVLIKNATLRTEDNDTLLLYNFVAPRYDNYAKNLWAATNGTNETVAFSPDPPVTTVYLGPPYFEASHCLVEPPRPATDKCRLEYSTHILYTVVVLNFIKLIAILSVFTSRRVAGRRLKTRTDEWSACENTQGSIAARKEVVLSTLGDAIESFMRDPDEATRGMCLITKYDVVKKSDRDIHPRQWKLLPKRWFSSVSGKQWFSLIFIYILFLTGLYTSLGLLTASLKNRHFDLTLPFFRSLGFGSVSALTYLNIELPRGDPEGLISNVLIINSPQVLFSILYSISGAVLTTFLVQREWALMWKSDRRKTLRVSEPVGIQRSSYFISLPLRYGIPLNVSSAVFHWLISQSYFLARVTALLPSGEQDYGNSFSTLGYSPYPIIITGIIGFINLMAIVIMGFRKYDGTMSMVSTNSRAISAACHSLPQDSEFGYQLPLQWGVVGSSDYGVGHCAFTSAPPHTVGRPQEGALYW

SEQ ID NO: 11260 - DNA, 2712 bp, Muscodor strobelii
  misc_feature: SGI EST ID NO. CUFF.26718.0
  misc_feature: Variant of the nucleotide sequence at SEQ ID NO 11258
gggcaacacgcagtgcaacatgcacgttggttataagcccacgtaagaaagccatatcaaggacttagcagaccatttcccgaaatattgattatccgtgtggaaagagctcatattgctgtataatattaatctctagatggcctacgaatatcatcacatgcaatcaatttgagcacttgtctgcgcattgtctcattcatcatgggaaatctcccatatcccacgcaggcttgattaattgcgtgccgcaaatctgcatgactttacgataatcattttattcaatcatcagcgcgctggccgcccgcctcccactattaccaacatggagtatactaatgaaactatacccacgtatcattatcctacgagaagcgatacatctagtagtcagaatacaggagacatacccaaaatctcaagtacgaacaccaagtccagtctcatcccacatattttgccgtttcgagcgaactcttttccagagaagatagattttgcaagtctattcgctcgtgtcaacggtagaaagaagagatcgcacaggtttggactatcgaaaagagaccgagctttgctcatacaagtcgccctcataattgctgtattcgtaaccaacctcaccatattgctatacgcttctttgaaatacccagccgttaatggcgttgggcttctttattctgggaattgtggaacgattcagactgccaatcgatggctccatctgttgattaacgttttgagcactgcgatgctttcctcctccacttactgcattcaattacaagcatctccaacccgtgctgatgtcgacaaggcgcacaagcgtaatagatgggtggatattggtgcaccgagtcttagaaacttgagatatataggtcgctggcggcttctctcatgcgttgttctcctcttgacttctttgcccattcatctcgtcttcaactcggctgtctttcaatcactggcgtctaatgattattctgttgcggtagccaaggactcgttccttacaggagcgagttggaatctatcgacagcccaacgcaatgggaaggacaatgttgggtgggacgaatggaaggtaaccgcaccagacgaggactatgagaccatcatctcggatatgcaaaaagacgttatgaagggccgctacgagaggaagaatctatctgactgctacgcgatctacgacgactactggaatctgcagcaaagcaatgttgtggtgctcatcaagaatgcgactctgagaacagaagacaatgacacattgttactctataacttcgttgcaccccgttacgacaactatgcgaagaacctatgggccgctaccaatggtactaatgaaaccgtcgcattctcaccagatccgcccgtaacgactgtgtacctcggaccgccttactttgaggcttctcactgtctcgtggagccccctcgtccggctacagacaagtgtcgactcgagtactcaacacacatactgtacacagttgtcgtcctcaatttcatcaagctcatcgcaatattgtccgtcttcactagccggagagtagcagggcggcgactcaaaacccgtactgatgaatggagcgcttgtgagaatacgcaaggttcaattgctgcgcgcaaagaagtggtcctctcgactctcggcgatgcgattgaatcctttatgcgggatcctgatgaagcaacaagaggcatgtgtctcatcaccaagtacgacgtggtcaagaagtcagatcgtgacattcatcctcgccagtggaaactgttaccgaaaaggtggttctcatctgtgtcgggcaagcagtggttcagtctgatattcatctatatcttattcctcactggtctctataccagccttgggcttctcactgcatctctgaagaaccgacatttcgacctcactcttcctttcttccgatccttgggcttcggatccgtctcggctctcacataccttaacatcgagctcccacgtggcgatcctgaaggtcttatctcaaatgttctgatcattaattccccacaagttctattttcaatcttgtacagcatctcgggtgctgtactaaccactttcctcgttcaacgcgaatgggctctcatgtggaagtccgaccgccgcaagacgttgcgcgtgtcagagcctgtagggattcagcgctcaagttacttcatatctcttcccttgcgctacggcatccctctgaacgtatcatcggccgtctttcactggctcatctctcaaagttacttccttgcgcgtgtcaccgcactacttcccagtggcgagcaggactatggaaactccttctcgaccctcgggtacagcccttatcccatcatcataacgggaataattggtttcataaatctcatggcgattgtcatcatgggattccgtaagtacgatggtacaatgagtatggtctctacaaatagtagggcgattagtgctgcgtgtcatagtcttccccaggatagtgaatttgggtatcagctccctcttcaatggggtgtggtcggttctagtgattatggagttggacattgcgcttttacttctgcaccgccccatactgttgggagaccgcaagagggagctttgtattggtagttgttgggtttttatatatcgtactgttaatgcttatactaccatgttcaataatatcaaaatagaag

SEQ ID NO: 11261 - DNA, 3861 bp, Muscodor strobelii
  misc_feature: SGI cDNA ID NO. 563610
  misc_feature: Encodes the peptide sequence at SEQ ID NO 11262
atgaccctgcgccatcgcgacgccttcggccgcgtcaagtatgtcgaccagacgaaggctggtcatgagcattatctgcggccgcatgatggaagactagttcccctgcgagtccaaggaacggataacgcgtacggatatgggcaaaggacgtgggagcggaacggccgtcctcggtcgcgggtgtctgccattttgcatcttgctcactggacatacgattcagtcctagttgaaggaacagaagagcgtcgctataattctagtaccattcctagcatcgcattcaaatggattccctcttgtctcacacttgccgttctcctcttgataccccaaaacttggaaggggtcttcaaaaatcagggcttctatgatccggtgcaatatcaagattggcgatatccaaaagtatccaggaatcgtagagaaggcgagctcggatcgtcttcggacaaagatgccgaagaaaatgaaccgctcttggaaagcgacattgagatgaagcctcaactcccacctgtgctcccaatgatcgatgagaggatagacgaggactttgatgatttgccagcccggcactttcggccgagatatctgtgttttctccaagatgggccacgcggcccagacacagagtatgccaggtacaaggttacggattggattcaagaccacggcgactttgccagtaccgactttgttcttgtctcctatacaaggcaccactttctagtcagcgctgatcagaaatggagaaataagcccgaacctgatgccgagacgaaggcgcaatacgaacagcaggcacatgaagatcgtggaatggtacttgcatatggcatggaagctgcgcgggccgctggcaaacgagctttttggattgattttgaatgcatcagagacaaagacactgacggtgaggtgcggggacacgtgaagaatgaggatgtctatcgtataagtgacatcgtccgagccgcccattcagttgttgtgctcgtaggaccaccacacgacagcagaccaccaggtcagccccagcagaatacttatagtccatcggccatgacagaatggctacaagactggggttcacggctctggacactgcccgagattctcctttgttccccagagcggcgtatcaaactctacgctgttggcggtccgaatcctccggaagaaatcgctaagcgaaacatagctgcgcggtgcgtttggtcggatgcgaaattggtgcgaaacctagtcgatcattacgagtcgtcaatacatttgacgccgctcgagctcgtgagcattgcgctggaatgtttctcatcgcgacagacagaccagttcagcgggggcgacatcgcgtatgcactcatgggccttctacgaaggcgaccagctgtagtcacggaggatacgagttttgaagcgttcgcccgactttctcttgcaaacgacagtgataaactcctcgagcgactgatttgcatgcaacccactcgtcgcgacgctccttggcacaagattcgcgatgcgtggaacgtcagactgtgggatattgaaccacggtgccaagtcgctggtattgtcgacgatcaaactgttacattagatggtgcatttggagctacgatccagtgggatgccatggagcaggttgcttttctcaaacgccctaccgtaagtcgcttagtaggcaagattttacttcgcggtgtaccggcctacttgatatttggcctggcttttactattctcgggggcgtttttctggcggaggcaaattctgcttcagactcgagcagcggcattggtgagaacccctctggattctcatctggtgcagcagcagcttttctagtccccggtctactatttctcataccctcggctatcatcacgctcttaattccagtcatgctgttgaacatataccaagggaaattctggtccgtacaagcacatttcataggtctggagggtattccaaatgatattggcaagatcgaacggatcctctttgggtttaatcacggccggctcaaatggagtgttgcgggctcgccactatctcgcaatggaccgtctgagaatggagaacgtgtcgggcgcccacccgtaagttcagctgattctcacgatggctcttatgataagggacttcagtctggacctgaaaaagagacggtcttcactttgatagatacgtatgctatgactgctacagcattccgcgccgccaggcctccaactgcagtcatcgtttgcggtcatgaaggcggcatgcaacgtgctattttatgctcctacgactggcaggaaggcacttttgtccgcgaagccgttattcgcgtcaagacattagtcctggatcgtatgttccgagttgacaggttccgttttgcgctcaaccgaaaagcgcataggccagccaagtctgttgggtcatctgcagatgctgcccgcaatggccagatgcatcagcgcgacaggttctgggatcgatggaagatagatctttgtctgcttccattcatgttccttgtttacggagtatacattctggatggctctctaagaggccgtcacccattagttgggcgtgagctttaccatgttgccttcctactccttcagccattgaactttgtcttgttccgcaaagtccacatgggtaatcttgtgggtgtagcggcactgataaaaggcattatcgccgttgtaacaaacttcgtgcacggaaattctgcaggccttgcctttgactttatttatggccttaccgatggtatccttgcccctgccttcgtttacctaactggtctttggtatgacggcgcaacgggtcgcatgctcagaattgtcctttgggcttccggtgaactttttctctcgtctctgccgaatgtaaacaacaatgacataaatccactagcgttgtcctgggctatcatttgtatattattatcgggatatgcattctcgtttcttggaacgcctgaacaagccctttggctgtgggaaagccaaagatccatatcatcatcagcccgtccatggcatcgacatgaaacaccatccaagatccttgccctcttcaaaaatgtgcagacatatttctttatcgcgactttcctttttgtcgccgcgtttgactcttgtaacctcggctacatcccctctggtctgctgcaactaccagaagtcacgctactttgggttttccctctgattctagtcctctttcttggagtattcttcaccaagtttcgatattctcaattgccaatctcaatcatcatcgtgtctttatcgttcgccggcaagatcaaactcgctcagcttggagaggatatatattacgataattcagccgatgggctattcttcttgcagcagatcagcagctttgctgtgtatctcacatgggcattattactcaccgacatggtagattcccaagctttcctgggcactctatgcatagcgttcgtttcgtatgggctcggaaagactgttgtcggcgcagttctggctagcgcaaactctagagaattgggtttcatcgccgatgcacctcatgttccgggcttcaaagtcatgctcatactcttcttcgccttatcaattattgctcttctatcttggtcggtgtatcgcgtgtggaatggacggaatggacgtggaagaaatgcatcgacggcgggcgtgtatcaccagcaagtcgacgagcaaccttttgaccatgatggcgataatagctatcgttctccgctatcaagagcatcaaagcagagccaaggaggtatggagagctatgacactccggatcggccttatgtgggcggacgtggctcggtctag

SEQ ID NO: 11262 - protein, 1286 aa, Muscodor strobelii
  misc_feature: SGI Peptide ID NO. 563610
  misc_feature (4)..(804): NCBI GI: 67538450 Blast Desc: AN5395.2 [Aspergillus nidulans FGSC A4] gi|40743365|gb|EAA62555.1| AN5395.2 [Aspergillus nidulans FGSC A4] gi|259485160|tpe|CBF81979.1| TPA: conserved [Aspergillus FGSC
  misc_feature (1)..(815): NCBI GI: 46111403 Blast Desc: FG02583.1 [Gibberella zeae PH-1]
  misc_feature (4)..(822): NCBI GI: 189196016 Blast Desc: conserved [Pyrenophora tritici-repentis Pt-1C-BFP] gi|187980225|gb|EDU46851.1| conserved [Pyrenophora tritici-repentis Pt-1C-BFP]
  misc_feature (3)..(820): NCBI GI: 256726168 Blast Desc: [Nectria haematococca mpVI 77-13-4]
  misc_feature (185)..(1005): NCBI GI: 46117418 Blast Desc: FG04551.1 [Gibberella zeae PH-1]
  misc_feature (186)..(542): NCBI GI: 154299295 Blast Desc: BC1G_11133 [Botryotinia fuckeliana B05.10] gi|150857398|gb|EDN32590.1| BC1G_11133 [Botryotinia fuckeliana B05.10]
  misc_feature (7)..(804): NCBI GI: 171691188 Blast Desc: protein product [Podospora anserina] gi|170945542|emb|CAP71654.1| protein product [Podospora anserina]
  misc_feature (217)..(790): NCBI GI: 154315292 Blast Desc: BC1G_04685 [Botryotinia fuckeliana B05.10] gi|150847648|gb|EDN22841.1| BC1G_04685 [Botryotinia fuckeliana B05.10]
  misc_feature (23)..(692): NCBI GI: 238844829 Blast Desc: conserved [Microsporum canis CBS 113480]
  misc_feature (238)..(790): NCBI GI: 156037828 Blast Desc: SS1G_12628 [Sclerotinia sclerotiorum 1980] gi|154698036|gb|EDN97774.1| SS1G_12628 [Sclerotinia sclerotiorum 1980]
MTLRHRDAFGRVKYVDQTKAGHEHYLRPHDGRLVPLRVQGTDNAYGYGQRTWERNGRPRSRVSAILHLAHWTYDSVLVEGTEERRYNSSTIPSIAFKWIPSCLTLAVLLLIPQNLEGVFKNQGFYDPVQYQDWRYPKVSRNRREGELGSSSDKDAEENEPLLESDIEMKPQLPPVLPMIDERIDEDFDDLPARHFRPRYLCFLQDGPRGPDTEYARYKVTDWIQDHGDFASTDFVLVSYTRHHFLVSADQKWRNKPEPDAETKAQYEQQAHEDRGMVLAYGMEAARAAGKRAFWIDFECIRDKDTDGEVRGHVKNEDVYRISDIVRAAHSVVVLVGPPHDSRPPGQPQQNTYSPSAMTEWLQDWGSRLWTLPEILLCSPERRIKLYAVGGPNPPEEIAKRNIAARCVWSDAKLVRNLVDHYESSIHLTPLELVSIALECFSSRQTDQFSGGDIAYALMGLLRRRPAVVTEDTSFEAFARLSLANDSDKLLERLICMQPTRRDAPWHKIRDAWNVRLWDIEPRCQVAGIVDDQTVTLDGAFGATIQWDAMEQVAFLKRPTVSRLVGKILLRGVPAYLIFGLAFTILGGVFLAEANSASDSSSGIGENPSGFSSGAAAAFLVPGLLFLIPSAIITLLIPVMLLNIYQGKFWSVQAHFIGLEGIPNDIGKIERILFGFNHGRLKWSVAGSPLSRNGPSENGERVGRPPVSSADSHDGSYDKGLQSGPEKETVFTLIDTYAMTATAFRAARPPTAVIVCGHEGGMQRAILCSYDWQEGTFVREAVIRVKTLVLDRMFRVDRFRFALNRKAHRPAKSVGSSADAARNGQMHQRDRFWDRWKIDLCLLPFMFLVYGVYILDGSLRGRHPLVGRELYHVAFLLLQPLNFVLFRKVHMGNLVGVAALIKGIIAVVTNFVHGNSAGLAFDFIYGLTDGILAPAFVYLTGLWYDGATGRMLRIVLWASGELFLSSLPNVNNNDINPLALSWAIICILLSGYAFSFLGTPEQALWLWESQRSISSSARPWHRHETPSKILALFKNVQTYFFIATFLFVAAFDSCNLGYIPSGLLQLPEVTLLWVFPLILVLFLGVFFTKFRYSQLPISIIIVSLSFAGKIKLAQLGEDIYYDNSADGLFFLQQISSFAVYLTWALLLTDMVDSQAFLGTLCIAFVSYGLGKTVVGAVLASANSRELGFIADAPHVPGFKVMLILFFALSIIALLSWSVYRVWNGRNGRGRNASTAGVYHQQVDEQPFDHDGDNSYRSPLSRASKQSQGGMESYDTPDRPYVGGRGSV

SEQ ID NO: 11263 - DNA, 4365 bp, Muscodor strobelii
  misc_feature: SGI EST ID NO. CUFF.26743.0
  misc_feature: Variant of the nucleotide sequence at SEQ ID NO 11261
gtcaagtcctagcatgtgaaggaaaaaactgagaaatcgcgattgtgctctacgtttcatcttcaactttcatttttgcaaaagcgacggccgttgtgacagtcgcatcgaatctccttggcgcttctgctgactggcagttccctgttacactgcgttcccatcgatcaatccacacgtggtagcttatgccaagagatctgcccctcttcagacatgaccctgcgccatcgcgacgccttcggccgcgtcaagtatgtcgaccagacgaaggctggtcatgagcattatctgcggccgcatgatggaagactagttcccctgcgagtccaaggaacggataacgcgtacggatatgggcaaaggacgtgggagcggaacggccgtcctcggtcgcgggtgtctgccattttgcatcttgctcactggacatacgattcagtcctagttgaaggaacagaagagcgtcgctataattctagtaccattcctagcatcgcattcaaatggattccctcttgtctcacacttgccgttctcctcttgataccccaaaacttggaaggggtcttcaaaaatcagggcttctatgatccggtgcaatatcaagattggcgatatccaaaagtatccaggaatcgtagagaaggcgagctcggatcgtcttcggacaaagatgccgaagaaaatgaaccgctcttggaaagcgacattgagatgaagcctcaactcccacctgtgctcccaatgatcgatgagaggatagacgaggactttgatgatttgccagcccggcactttcggccgagatatctgtgttttctccaagatgggccacgcggcccagacacagagtatgccaggtacaaggttacggattggattcaagaccacggcgactttgccagtaccgactttgttcttgtctcctatacaaggcaccactttctagtcagcgctgatcagaaatggagaaataagcccgaacctgatgccgagacgaaggcgcaatacgaacagcaggcacatgaagatcgtggaatggtacttgcatatggcatggaagctgcgcgggccgctggcaaacgagctttttggattgattttgaatgcatcagagacaaagacactgacggtgaggtgcggggacacgtgaagaatgaggatgtctatcgtataagtgacatcgtccgagccgcccattcagttgttgtgctcgtaggaccaccacacgacagcagaccaccaggtcagccccagcagaatacttatagtccatcggccatgacagaatggctacaagactggggttcacggctctggacactgcccgagattctcctttgttccccagagcggcgtatcaaactctacgctgttggcggtccgaatcctccggaagaaatcgctaagcgaaacatagctgcgcggtgcgtttggtcggatgcgaaattggtgcgaaacctagtcgatcattacgagtcgtcaatacatttgacgccgctcgagctcgtgagcattgcgctggaatgtttctcatcgcgacagacagaccagttcagcgggggcgacatcgcgtatgcactcatgggccttctacgaaggcgaccagctgtagtcacggaggatacgagttttgaagcgttcgcccgactttctcttgcaaacgacagtgataaactcctcgagcgactgatttgcatgcaacccactcgtcgcgacgctccttggcacaagattcgcgatgcgtggaacgtcagactgtgggatattgaaccacggtgccaagtcgctggtattgtcgacgatcaaactgttacattagatggtgcatttggagctacgatccagtgggatgccatggagcaggttgcttttctcaaacgccctaccgtaagtcgcttagtaggcaagattttacttcgcggtgtaccggcctacttgatatttggcctggcttttactattctcgggggcgtttttctggcggaggcaaattctgcttcagactcgagcagcggcattggtgagaacccctctggattctcatctggtgcagcagcagcttttctagtccccggtctactatttctcataccctcggctatcatcacgctcttaattccagtcatgctgttgaacatataccaagggaaattctggtccgtacaagcacatttcataggtctggagggtattccaaatgatattggcaagatcgaacggatcctctttgggtttaatcacggccggctcaaatggagtgttgcgggctcgccactatctcgcaatggaccgtctgagaatggagaacgtgtcgggcgcccacccgtaagttcagctgattctcacgatggctcttatgataagggacttcagtctggacctgaaaaagagacggtcttcactttgatagatacgtatgctatgactgctacagcattccgcgccgccaggcctccaactgcagtcatcgtttgcggtcatgaaggcggcatgcaacgtgctattttatgctcctacgactggcaggaaggcacttttgtccgcgaagccgttattcgcgtcaagacattagtcctggatcgtatgttccgagttgacaggttccgttttgcgctcaaccgaaaagcgcataggccagccaagtctgttgggtcatctgcagatgctgcccgcaatggccagatgcatcagcgcgacaggttctgggatcgatggaagatagatctttgtctgcttccattcatgttccttgtttacggagtatacattctggatggctctctaagaggccgtcacccattagttgggcgtgagctttaccatgttgccttcctactccttcagccattgaactttgtcttgttccgcaaagtccacatgggtaatcttgtgggtgtagcggcactgataaaaggcattatcgccgttgtaacaaacttcgtgcacggaaattctgcaggccttgcctttgactttatttatggccttaccgatggtatccttgcccctgccttcgtttacctaactggtctttggtatgacggcgcaacgggtcgcatgctcagaattgtcctttgggcttccggtgaactttttctctcgtctctgccgaatgtaaacaacaatgacataaatccactagcgttgtcctgggctatcatttgtatattattatcgggatatgcattctcgtttcttggaacgcctgaacaagccctttggctgtgggaaagccaaagatccatatcatcatcagcccgtccatggcatcgacatgaaacaccatccaagatccttgccctcttcaaaaatgtgcagacatatttctttatcgcgactttcctttttgtcgccgcgtttgactcttgtaacctcggctacatcccctctggtctgctgcaactaccagaagtcacgctactttgggttttccctctgattctagtcctctttcttggagtattcttcaccaagtttcgatattctcaattgccaatctcaatcatcatcgtgtctttatcgttcgccggcaagatcaaactcgctcagcttggagaggatatatattacgataattcagccgatgggctattcttcttgcagcagatcagcagctttgctgtgtatctcacatgggcattattactcaccgacatggtagattcccaagctttcctgggcactctatgcatagcgttcgtttcgtatgggctcggaaagactgttgtcggcgcagttctggctagcgcaaactctagagaattgggtttcatcgccgatgcacctcatgttccgggcttcaaagtcatgctcatactcttcttcgccttatcaattattgctcttctatcttggtcggtgtatcgcgtgtggaatggacggaatggacgtggaagaaatgcatcgacggcgggcgtgtatcaccagcaagtcgacgagcaaccttttgaccatgatggcgataatagctatcgttctccgctatcaagagcatcaaagcagagccaaggaggtatggagagctatgacactccggatcggccttatgtgggcggacgtggctcggtctaggtaacaaacacgcagggcgcaagagcgaaatgattgttttgtgttcgtgtattgcagcacttggatagtgtcttacacaaagataaaacaagttctatgatcgggttggaagccaaatgggtgcgacggcgtccggtttagtgatctaaccatatcaatctgtagccgctctattgtatttgatgatcattcgaatagttcatgattatactcaatagttgtcttcatgtttacgtatttggacatgtacagagcgatacaaaatgttctccgtgaagagtctcgtgg

SEQ ID NO: 11264 - DNA, 858 bp, Muscodor strobelii
  misc_feature: SGI cDNA ID NO. 563611
  misc_feature: Encodes the peptide sequence at SEQ ID NO 11265
atggtcgcagcatcatcatccaacactcctcaggttgcagccttggacagtggcctagcagcactccagaatctgaccatcaatgagactcaagaagaacagctccatggccttgtcggtactgctcaggcgattgctgcaatgatcgatgagctctatgagcttcctgttaatccgccttccatatatatcgatcttgaaggagtcaacctgtcccgtcatggtacgatctcgatcttacagatccatgttcgtactaacggccagaattatcttgtcgatgtcaagactctgggagagttggccttcacaacacagggcacgcgtacttcgactacactcaaagctatcttagagtcacctttggttccgaaggtcttctttgacatacgaaatgattctgatgctttatatagtcactatcaaatcaaagtgcaaggtgttcaagacctgcaattgatggaactggcgacaaggacgttccgcaagaacttcatcacaggactcaaaaagtgcatagagaaagatttacctatgacaagcattgagaagcttaactggatgaagacaaaggacgaaggcctggagcttttcgctcccgaaaaaggcggcacttatgaagtgttcgacgaacggccgcttcccgagaagatcaggatgtactgtgtccaggacgtgcattttcttccccgtctttgggacacgtacaattgtaagcttacacctagacggagagccaaagtggaagaagctacaaaggctcgagttgtgcagtcccaggccccatccttcaacggaaaagggcggcatatgatgctggcgcctgaaggatggggtcctaaaggacgtagtagctga

SEQ ID NO: 11265 - protein, 285 aa, Muscodor strobelii
  misc_feature: SGI Peptide ID NO. 563611
  misc_feature (39)..(241): Pfam Id: PF01612 Pfam Desc: 3'-5' exonuclease
  misc_feature (114)..(155): Pfam Id: PF01612 Pfam Desc: 3'-5' exonuclease
  misc_feature (38)..(278): NCBI GI: 170940093 Blast Desc: protein product [Podospora anserina]
  misc_feature (38)..(278): NCBI GI: 154315768 Blast Desc: BC1G_04456 [Botryotinia fuckeliana B05.10] gi|150846852|gb|EDN22045.1| BC1G_04456 [Botryotinia fuckeliana B05.10]
  misc_feature (38)..(278): NCBI GI: 156059756 Blast Desc: SS1G_03891 [Sclerotinia sclerotiorum 1980] gi|154701677|gb|EDO01416.1| SS1G_03891 [Sclerotinia sclerotiorum 1980]
  misc_feature (38)..(275): NCBI GI: 261196313 Blast Desc: 3'-5' exonuclease [Ajellomyces dermatitidis SLH14081] gi|239587693|gb|EEQ70336.1| 3'-5' exonuclease [Ajellomyces dermatitidis SLH14081] gi|239614653|gb|EEQ91640.1| 3'-5' ER-3]
  misc_feature (38)..(275): NCBI GI: 240280394 Blast Desc: 3'-5' exonuclease [Ajellomyces capsulatus H143]
  misc_feature (38)..(285): NCBI GI: 154277567 Blast Desc: [Ajellomyces capsulatus NAm1] gi|150413209|gb|EDN08592.1| [Ajellomyces capsulatus NAm1]
  misc_feature (52)..(275): NCBI GI: 225561048 Blast Desc: 3'-5' exonuclease [Ajellomyces capsulatus G186AR]
  misc_feature (37)..(275): NCBI GI: 226277937 Blast Desc: conserved [Paracoccidioides brasiliensis Pb01]
  misc_feature (38)..(285): NCBI GI: 226293213 Blast Desc: conserved [Paracoccidioides brasiliensis Pb18]
  misc_feature (38)..(285): NCBI GI: 225683831 Blast Desc: conserved [Paracoccidioides brasiliensis Pb03]
MVAASSSNTPQVAALDSGLAALQNLTINETQEEQLHGLVGTAQAIAAMIDELYELPVNPPSIYIDLEGVNLSRHGTISILQIHVRTNGQNYLVDVKTLGELAFTTQGTRTSTTLKAILESPLVPKVFFDIRNDSDALYSHYQIKVQGVQDLQLMELATRTFRKNFITGLKKCIEKDLPMTSIEKLNWMKTKDEGLELFAPEKGGTYEVFDERPLPEKIRMYCVQDVHFLPRLWDTYNCKLTPRRRAKVEEATKARVVQSQAPSFNGKGRHMMLAPEGWGPKGRSS

SEQ ID NO: 11266 - DNA, 436 bp, Muscodor strobelii
  misc_feature: SGI EST ID NO. CUFF.26739.0
  misc_feature: Variant of the nucleotide sequence at SEQ ID NO 11264
aaaaagtgcatagagaaagatttacctatgacaagcattgagaagcttaactggatgaagacaaaggacgaaggcctggagcttttcgctcccgaaaaaggcggcacttatgaagtgttcgacgaacggccgcttcccgagaagatcaggatgtactgtgtccaggacgtgcattttcttccccgtctttgggacacgtacaattgtaagcttacacctagacggagagccaaagtggaagaagctacaaaggctcgagttgtgcagtcccaggccccatccttcaacggaaaagggcggcatatgatgctggcgcctgaaggatggggtcctaaaggacgtagtagctgagagatcggcatactgttagcagcggtggatagaccacggcaattattagacgggcagctattttgtaaatctgagccaaatgatt

SEQ ID NO: 11267 - DNA, 1092 bp, Muscodor strobelii
  misc_feature: SGI cDNA ID NO. 563612
  misc_feature: Encodes the peptide sequence at SEQ ID NO 11268
atggctgatatcaaattcgaaggatggattggcgagtctccagattcggtcaacggaaagatggagtggaagagcttcgagcccaagaagtggactgaagacgatatcgatattgaggtgtcccattgcggtatctgcggttctgatcttcacgtgttaaagtcaggatggggcccatcaacatacccatgctgtgtcggacacgagattgtcggaaaagctgtgcgagtcggcaaaaatgtaacacacgttaaggttggcgatagagtcggtgtaggagcccaatctcgtacctgccagcagcctgactgcccggagtgctccaatggcaacgactcatactgctcacggctcatcgtcaacacctacaacagcaagtatcccaatgacgagggcaaatcgatgggtggatacgcaaactataaccgatcgaacaagcagtttgtcgttcaaatacccgaaggactgagctctgctgctgctgctcccatgctctgcggtggtgtcaccgtttactcaccgttgaagcgacgtggctgtggccccggaaagagtgtcggcattgttggtgttggtggtctcggccactttgctgtgcttttcgccaaagccctcggtgctgataaggtggttggtatctccagaaagctctcgaagaaggatgatgtcttgaaattgggtgctaccgactacattgccaccgacgacgagcctgactgggccaagaagcatcgcaaatcgttagacttgatcatctgcactatcaactcgagcactgcccctttcaaccaatatctcgggctccttaagtacggaggcgagttggtaaacgttggtgcttcggatggcggcatgctgcctccgatcagctcattcgttcttatgagtggaatcaaaatgagtggcagcgcgactggtgctccatgggagattaaggagatgttgcaactggcggcagacaagaatatccaaccttggattgaagagcgcccaatgaaggaggcaaatcaagccatcttggatatggaagcaggcaaggctcgatacagatatgttctagtgaatgagaactccggaccttctaggttgtag

SEQ ID NO: 11268 - protein, 363 aa, Muscodor strobelii
  misc_feature: SGI Peptide ID NO. 563612
  misc_feature (33)..(152): Pfam Id: PF08240 Pfam Desc: Alcohol dehydrogenase GroES-like domain
  misc_feature (182)..(320): Pfam Id: PF00107 Pfam Desc: Zinc-binding dehydrogenase
  misc_feature (2)..(355): NCBI GI: 189209606 Blast Desc: NADP-dependent alcohol dehydrogenase C [Pyrenophora tritici-repentis Pt-1C-BFP] gi|187977228|gb|EDU43854.1| NADP-dependent alcohol dehydrogenase C [Pyrenophora Pt-1C-BFP]
  misc_feature (1)..(356): NCBI GI: 261357706 Blast Desc: NADP-dependent alcohol dehydrogenase [Verticillium albo-atrum VaMs.102]
  misc_feature (2)..(356): NCBI GI: 261359158 Blast Desc: NADP-dependent alcohol dehydrogenase [Verticillium albo-atrum VaMs.102]
  misc_feature (2)..(356): NCBI GI: 256730493 Blast Desc: NECHADRAFT_65053 [Nectria haematococca mpVI 77-13-4]
  misc_feature (2)..(355): NCBI GI: 169626272 Blast Desc: SNOG_16422 [Phaeosphaeria nodorum SN15] gi|111055127|gb|EAT76247.1| SNOG_16422 [Phaeosphaeria nodorum SN15]
  misc_feature (2)..(358): NCBI GI: 39975215 Blast Desc: MGG_00246 [Magnaporthe grisea 70-15] gi|145018887|gb|EDK03166.1| MGG_00246 [Magnaporthe grisea 70-15]
  misc_feature (1)..(358): NCBI GI: 46109608 Blast Desc: FG01686.1 [Gibberella zeae PH-1]
  misc_feature (3)..(356): NCBI GI: 256722113 Blast Desc: NECHADRAFT_98203 [Nectria haematococca mpVI 77-13-4]
  misc_feature (3)..(357): NCBI GI: 67538370 Blast Desc: AN5355.2 [Aspergillus nidulans FGSC A4] gi|40743325|gb|EAA62515.1| AN5355.2 [Aspergillus nidulans FGSC A4] gi|259485202|tpe|CBF82047.1| TPA: zinc-binding alcohol FGSC
  misc_feature (3)..(357): NCBI GI: 115401866 Blast Desc: conserved [Aspergillus terreus NIH2624] gi|114190462|gb|EAU32162.1| conserved [Aspergillus terreus NIH2624]
  misc_feature (5)..(354): SWISSPROT Homolog: EC 1.1.1.2 Alcohol dehydrogenase (NADP(+))
MADIKFEGWIGESPDSVNGKMEWKSFEPKKWTEDDIDIEVSHCGICGSDLHVLKSGWGPSTYPCCVGHEIVGKAVRVGKNVTHVKVGDRVGVGAQSRTCQQPDCPECSNGNDSYCSRLIVNTYNSKYPNDEGKSMGGYANYNRSNKQFVVQIPEGLSSAAAAPMLCGGVTVYSPLKRRGCGPGKSVGIVGVGGLGHFAVLFAKALGADKVVGISRKLSKKDDVLKLGATDYIATDDEPDWAKKHRKSLDLIICTINSSTAPFNQYLGLLKYGGELVNVGASDGGMLPPISSFVLMSGIKMSGSATGAPWEIKEMLQLAADKNIQPWIEERPMKEANQAILDMEAGKARYRYVLVNENSGPSRL

SEQ ID NO: 11269 - DNA, 1734 bp, Muscodor strobelii
  misc_feature: SGI EST ID NO. CUFF.26745.0
  misc_feature: Variant of the nucleotide sequence at SEQ ID NO 11267
agactttgtctgggtaacgaacgagcccaatgagtgagagtcattgaacatgcggtgggctcgatcacacccacgtcatagcggtctaggctagtacacaagatactagggatgtaggaagaaatgagcctagctttgcaacctcccaagcccttaggacgaacatttaaagcagcatttgagattctccattcacaacacaacattcactagcgtcccactaatacatccccaatatggctgatatcaaattcgaaggatggattggcgagtctccagattcggtcaacggaaagatggagtggaagagcttcgagcccaagaagtggactgaagacgatatcgatattgaggtgtcccattgcggtatctgcggttctgatcttcacgtgttaaagtcaggatggggcccatcaacatacccatgctgtgtcggacacgagattgtcggaaaagctgtgcgagtcggcaaaaatgtaacacacgttaaggttggcgatagagtcggtgtaggagcccaatctcgtacctgccagcagcctgactgcccggagtgctccaatggcaacgactcatactgctcacggctcatcgtcaacacctacaacagcaagtatcccaatgacgagggcaaatcgatgggtggatacgcaaactataaccgatcgaacaagcagtttgtcgttcaaatacccgaaggactgagctctgctgctgctgctcccatgctctgcggtggtgtcaccgtttactcaccgttgaagcgacgtggctgtggccccggaaagagtgtcggcattgttggtgttggtggtctcggccactttgctgtgcttttcgccaaagccctcggtgctgataaggtggttggtatctccagaaagctctcgaagaaggatgatgtcttgaaattgggtgctaccgactacattgccaccgacgacgagcctgactgggccaagaagcatcgcaaatcgttagacttgatcatctgcactatcaactcgagcactgcccctttcaaccaatatctcgggctccttaagtacggaggcgagttggtaaacgttggtgcttcggatggcggcatgctgcctccgatcagctcattcgttcttatgagtggaatcaaaatgagtggcagcgcgactggtgctccatgggagattaaggagatgttgcaactggcggcagacaagaatatccaaccttggattgaagagcgcccaatgaaggaggcaaatcaagccatcttggatatggaagcaggcaaggctcgatacagatatgttctagtgaatgagaactccggaccttctaggttgtagaggagaaaaatctagattaggagcggataggaaccaggctgaataattgaaatctagatggacatcctcggtgttggtcatagatcagagatctcaatcaattattaaggttttaaaaacattgacgatagttgttctccaaaacaccccagagtctcgttctacatctcctccagcaataatcagtgtttcgggaatatttcaatgcggccacgcgaatcttctaggctaggaaatacccataccggatgatcggtctatttctactaaaatctgacttgcattcccgtctaatccgcagcacgagactaccgaggcgggtaacaggagtaatgatgatctaatttatgtagtgcggacactcgctgactacctacaactacttggtaatctcattctgaagccg

SEQ ID NO: 11270 - DNA, 240 bp, Muscodor strobelii
  misc_feature: SGI cDNA ID NO. 563613
  misc_feature: Encodes the peptide sequence at SEQ ID NO 11271
atgctgcctccgatcagctcattcgttcttatgagtggaatcaaaatgagtggcagcgcgactggtgctccatgggagattaaggagatgttgcaactggcggcagacaagaatatccaaccttggattgaagagcgcccaatgaaggaggcaaatcaagccatcttggatatggaagcaggcaaggctcgatacagatatgttctagtgaatgagaactccggaccttctaggttgtag

SEQ ID NO: 11271 - protein, 79 aa, Muscodor strobelii
  misc_feature: SGI Peptide ID NO. 563613
  misc_feature (2)..(71): NCBI GI: 189209606 Blast Desc: NADP-dependent alcohol dehydrogenase C [Pyrenophora tritici-repentis Pt-1C-BFP] gi|187977228|gb|EDU43854.1| NADP-dependent alcohol dehydrogenase C [Pyrenophora Pt-1C-BFP]
  misc_feature (2)..(72): NCBI GI: 256730493 Blast Desc: NECHADRAFT_65053 [Nectria haematococca mpVI 77-13-4]
  misc_feature (2)..(71): NCBI GI: 169626272 Blast Desc: SNOG_16422 [Phaeosphaeria nodorum SN15] gi|111055127|gb|EAT76247.1| SNOG_16422 [Phaeosphaeria nodorum SN15]
  misc_feature (2)..(72): NCBI GI: 261357706 Blast Desc: NADP-dependent alcohol dehydrogenase [Verticillium albo-atrum VaMs.102]
  misc_feature (1)..(74): NCBI GI: 46109608 Blast Desc: FG01686.1 [Gibberella zeae PH-1]
  misc_feature (2)..(72): NCBI GI: 256722113 Blast Desc: NECHADRAFT_98203 [Nectria haematococca mpVI 77-13-4]
  misc_feature (14)..(72): NCBI GI: 119483968 Blast Desc: zinc-binding alcohol dehydrogenase, [Neosartorya fischeri NRRL 181] gi|119410043|gb|EAW19990.1| zinc-binding alcohol dehydrogenase, [Neosartorya fischeri NRRL 181]
  misc_feature (2)..(72): NCBI GI: 261359158 Blast Desc: NADP-dependent alcohol dehydrogenase [Verticillium albo-atrum VaMs.102]
  misc_feature (14)..(72): NCBI GI: 121714913 Blast Desc: zinc-binding alcohol dehydrogenase, [Aspergillus clavatus NRRL 1] gi|119403222|gb|EAW13640.1| zinc-binding alcohol dehydrogenase, [Aspergillus clavatus NRRL 1]
  misc_feature (9)..(73): NCBI GI: 212546077 Blast Desc: zinc-binding alcohol dehydrogenase, [Penicillium marneffei ATCC 18224] gi|210064712|gb|EEA18807.1| zinc-binding alcohol dehydrogenase, [Penicillium marneffei ATCC 18224]
  misc_feature (11)..(71): SWISSPROT Homolog: EC 1.1.1.2 Alcohol dehydrogenase (NADP(+))
MLPPISSFVLMSGIKMSGSATGAPWEIKEMLQLAADKNIQPWIEERPMKEANQAILDMEAGKARYRYVLVNENSGPSRL

SEQ ID NO: 11272 - DNA, 1734 bp, Muscodor strobelii; identical to SEQ ID NO: 11269
  misc_feature: SGI EST ID NO. CUFF.26745.0
  misc_feature: Variant of the nucleotide sequence at SEQ ID NO 11270

SEQ ID NO: 11273 - DNA, 957 bp, Muscodor strobelii
  misc_feature: SGI cDNA ID NO. 563614
  misc_feature: Reduced expression when VOC is produced
  misc_feature: Encodes the peptide sequence at SEQ ID NO 11274
atgctgcgcgaagtcaagcccaagaacgcccggagcaagcgggctctggataagcgagcacccaaaactgtcgagaacccaaagtcaactctctttcttcgcggaacaacatgtagtcagatcactcaggatgcgctcgcagaccttcattccctcagacaaccacttgccaagaaatttacgaagaagaatgacattcaccccttcgaggacccttcatccctaattttcttctccgagaagaacgataccagcttgctagtatttggctcgagctcgaagaagcgccccaacaccctcacattcgctcgcacctatgccgtcaaccagatcctcgacatgatcgagctccacatcatacctgagactttccggacactggcccagttcaagtcacgcaagttcgctatcggactcaggcccatgatgctcttctctggcaccgcctgggatagccctgtggcgaacgagtacacgataataaagagcatcctcaccgacatgttcaagggggatacgagcagcgaccagatcgatgtcgaaggcttacagtacattgtgtctgtggcagccgatgaatcagccggcgatgatgtcaagcctaccgtgcatctccgtgtatatctgctcgagaccaagcgcagtggacagaagctaccgcgtgttgagctagaagagatgggacccagaattgatttccgtgtcggtcgcagccagcaacctgatgagacgatcatgaaggaggctctgaagaaagccaagaccggtgaggagaagacaaagaagaacatttcgacagatatcatgggcgacaagctgggcagaatccatctcggcaaggtggacttgagtggtctacagacgaggaagatgaagggcttgaagcgaaatcgcgatctcgatggtgacgaggaaatgggcgatgaggacgacacgcagaaacgagcgaaaaaatga

SEQ ID NO: 11274 - protein, 318 aa, Muscodor strobelii
  misc_feature: SGI Peptide ID NO. 563614
  misc_feature (31)..(238): Pfam Id: PF04427 Pfam Desc: Brix domain
  misc_feature (1)..(298): NCBI GI: 46108586 Blast Desc: FG01175.1 [Gibberella zeae PH-1]
  misc_feature (1)..(294): NCBI GI: 256735102 Blast Desc: [Nectria haematococca mpVI 77-13-4]
  misc_feature (1)..(303): NCBI GI: 39969543 Blast Desc: ribosome biogenesis protein, [Magnaporthe grisea 70-15] gi|145021664|gb|EDK05793.1| ribosome biogenesis protein, [Magnaporthe grisea 70-15]
  misc_feature (1)..(303): NCBI GI: 59803082 Blast Desc: Brix domain-containing protein-like protein [Magnaporthe grisea]
  misc_feature (1)..(312): NCBI GI: 116180598 Blast Desc: CHGG_00927 [Chaetomium globosum CBS 148.51] gi|88185224|gb|EAQ92692.1| CHGG_00927 [Chaetomium globosum CBS 148.51]
  misc_feature (1)..(300): NCBI GI: 156050311 Blast Desc: SS1G_07742 [Sclerotinia sclerotiorum 1980] gi|154692143|gb|EDN91881.1| SS1G_07742 [Sclerotinia sclerotiorum 1980]
  misc_feature (1)..(310): NCBI GI: 85111027 Blast Desc: NCU08595 [Neurospora crassa OR74A] gi|28925464|gb|EAA34504.1| conserved [Neurospora crassa OR74A]
  misc_feature (6)..(317): NCBI GI: 171687597 Blast Desc: protein product [Podospora anserina] gi|170943760|emb|CAP69412.1| protein product [Podospora anserina]
  misc_feature (1)..(313): NCBI GI: 169602197 Blast Desc: SNOG_04093 [Phaeosphaeria nodorum SN15] gi|160706119|gb|EAT87853.2| SNOG_04093 [Phaeosphaeria nodorum SN15]
  misc_feature (1)..(310): NCBI GI: 189204143 Blast Desc: conserved [Pyrenophora tritici-repentis Pt-1C-BFP] gi|187985506|gb|EDU50994.1| conserved [Pyrenophora tritici-repentis Pt-1C-BFP]
  misc_feature: Useful for introducing or modulating the production of volatile compounds
MLREVKPKNARSKRALDKRAPKTVENPKSTLFLRGTTCSQITQDALADLHSLRQPLAKKFTKKNDIHPFEDPSSLIFFSEKNDTSLLVFGSSSKKRPNTLTFARTYAVNQILDMIELHIIPETFRTLAQFKSRKFAIGLRPMMLFSGTAWDSPVANEYTIIKSILTDMFKGDTSSDQIDVEGLQYIVSVAADESAGDDVKPTVHLRVYLLETKRSGQKLPRVELEEMGPRIDFRVGRSQQPDETIMKEALKKAKTGEEKTKKNISTDIMGDKLGRIHLGKVDLSGLQTRKMKGLKRNRDLDGDEEMGDEDDTQKRAKK

SEQ ID NO: 11275 - DNA, 2339 bp, Muscodor strobelii
  misc_feature: SGI EST ID NO. CUFF.27607.0
  misc_feature: Variant of the nucleotide sequence at SEQ ID NO 11273
cttcaatcgccgcgtcgacggctgttgaagggtattgagtgctgcgatcttcacaaaacaacgtttcttatttcgtcgtactgctccaagatgctgcgcgaagtcaagcccaagaacgcccggagcaagcgggctctggataagcgagcacccaaaactgtcgagaacccaaagtcaactctctttcttcgcggaacaacatgtagtcagatcactcaggatgcgctcgcagaccttcattccctcagacaaccacttgccaagaaatttacgaagaagaatgacattcaccccttcgaggacccttcatccctaattttcttctccgagaagaacgataccagcttgctagtatttggctcgagctcgaagaagcgccccaacaccctcacattcgctcgcacctatgccgtcaaccagatcctcgacatgatcgagctccacatcatacctgagactttccggacactggcccagttcaagtcacgcaagttcgctatcggactcaggcccatgatgctcttctctggcaccgcctgggatagccctgtggcgaacgagtacacgataataaagagcatcctcaccgacatgttcaagggggatacgagcagcgaccagatcgatgtcgaaggcttacagtacattgtgtctgtggcagccgatgaatcagccggcgatgatgtcaagcctaccgtgcatctccgtgtatatctgctcgagaccaagcgcagtggacagaagctaccgcgtgttgagctagaagagatgggacccagaattgatttccgtgtcggtcgcagccagcaacctgatgagacgatcatgaaggaggctctgaagaaagccaagaccggtgaggagaagacaaagaagaacatttcgacagatatcatgggcgacaagctgggcagaatccatctcggcaaggtggacttgagtggtctacagacgaggaagatgaagggcttgaagcgaaatcgcgatctcgatggtgacgaggaaatgggcgatgaggacgacacgcagaaacgagcgaaaaaatgaccaattgatcaatacgatgcggtaacgaagtcatgaagatactacctagttaaatataccggtcgatcactctacgaacgatcatcacacagcgttcatctcacgcatgacggcatttcacacattgacgagggttttactgtggactggtttgaatgattgtttcaacatctagcggtcatttatcatccgtcatacatctagaattccgtcccgccgtcccaaacttatacgatatatcagtgtcgttccatcttaagaggccgcggccactggcttgcccctgttctccaccaggatctgggagtccttgttcaactccttgtattccctgatcaatcgtccggtggccttcttgccttcgtggtttccagcctcccactcctcgggagggaagagctcgaagaagccgagcttgtcgagcatgggaatcgacagtctcaaggcgtcctccttctccttaatctctacggggtcgcccttggcggcggcagcagcgtatcctcgaatgttgatcaagagggaactgttttttgtgttggtctccgttagggacgaattaggttgggaatcgggggcgtgatcttacccgaaagttcctgtctgcaccgagctaccgtcggggagtctgacttcggggaacttggcacctccgaaggacttgttcaccgtgttgcccagatcggggccgtatctgttgtcgttctgggaagccattttcgtggttgcgtacgttctagcgggttgctgttggatctttggtaggcttctcgttactgctcgtaggttggcgactctaaatagactcatattcctgctgtttcggtaggatcttactgcggctgatattgcatgcgatctcgattcctttatacagagctgaaatccacgcactccacgtcagatgattccgtcgatattctatgtcgcccctagccttgtagcaagtgggcccacatgtgtggtggggatcatccgcggaacgtccggaagaggattccatgcccattctacgtaattgcaatggtacgaaatcttctaaacatctcagaatatcgtcatgactcgataatgagtcgataatgttgagattctttggttgttgtggtttgaacatcgcggatatggacctttgacgatgatcgtggagcttgctgtcttgctgtgttgctatccgcggagaatccatgtatctagctagtttcggggctccacgacggtgctacgggcaagtcgaaaactcgaaagcaagtgcagaaaaatgagccctaattcgtcgtaccgagtcgtgc

SEQ ID NO: 11276 - DNA, 399 bp, Muscodor strobelii
  misc_feature: SGI cDNA ID NO. 563615
  misc_feature: Encodes the peptide sequence at SEQ ID NO 11277
atggcttcccagaacgacaacagatacggccccgatctgggcaacacggtgaacaagtccttcggaggtgccaagttccccgaagtcagactccccgacggtagctcggtgcagacaggaactttcggttccctcttgatcaacattcgaggatacgctgctgccgccgccaagggcgaccccgtagagattaaggagaaggaggacgccttgagactgtcgattcccatgctcgacaagctcggcttcttcgagctcttccctcccgaggagtgggaggctggaaaccacgaaggcaagaaggccaccggacgattgatcagggaatacaaggagttgaacaaggactcccagatcctggtggagaacaggggcaagccagtggccgcggcctcttaa

SEQ ID NO: 11277 - protein, 132 aa, Muscodor strobelii
  misc_feature: SGI Peptide ID NO. 563615
  misc_feature (23)..(106): NCBI GI: 34499087 Blast Desc: CV_3632 [Chromobacterium violaceum ATCC 12472] gi|34104937|gb|AAQ61294.1| CV_3632 [Chromobacterium violaceum ATCC 12472]
  misc_feature (23)..(110): NCBI GI: 188501655 Blast Desc: [Adineta vaga]
  misc_feature (23)..(112): NCBI GI: 260778817 Blast Desc: VIC_004223 [Vibrio coralliilyticus ATCC BAA-450] gi|260604981|gb|EEX31276.1| VIC_004223 [Vibrio coralliilyticus ATCC BAA-450]
  misc_feature (23)..(110): NCBI GI: 146306718 Blast Desc: Pmen_1687 [Pseudomonas mendocina ymp] gi|145574919|gb|ABP84451.1| Pmen_1687 [Pseudomonas mendocina ymp]
  misc_feature (23)..(110): NCBI GI: 260550828 Blast Desc: conserved [Acinetobacter sp. RUH2624] gi|260406138|gb|EEW99623.1| conserved [Acinetobacter sp. RUH2624]
  misc_feature (23)..(110): NCBI GI: 262280344 Blast Desc: conserved [Acinetobacter calcoaceticus RUH2202] gi|262258122|gb|EEY76856.1| conserved [Acinetobacter calcoaceticus RUH2202]
  misc_feature (23)..(110): NCBI GI: 184159715 Blast Desc: ACICU_03397 [Acinetobacter baumannii ACICU] gi|260556911|ref|ZP_05829128.1| conserved [Acinetobacter baumannii ATCC 19606] gi|183211309|gb|ACC58707.1| ACICU_03397
  misc_feature (23)..(110): NCBI GI: 169794478 Blast Desc: ABAYE0286 [Acinetobacter baumannii AYE] gi|213158950|ref|YP_002320948.1| AB57_3651 [Acinetobacter baumannii AB0057] gi|169147405|emb|CAM85266.1| conserved AB0057]
  misc_feature (23)..(110): NCBI GI: 239501970 Blast Desc: AbauAB_06615 [Acinetobacter baumannii AB900]
  misc_feature (23)..(110): NCBI GI: 215482067 Blast Desc: ABBFA_000316 [Acinetobacter baumannii AB307-0294] gi|213988907|gb|ACJ59206.1| ABBFA_000316 [Acinetobacter baumannii AB307-0294]
MASQNDNRYGPDLGNTVNKSFGGAKFPEVRLPDGSSVQTGTFGSLLINIRGYAAAAAKGDPVEIKEKEDALRLSIPMLDKLGFFELFPPEEWEAGNHEGKKATGRLIREYKELNKDSQILVENRGKPVAAAS

SEQ ID NO: 11278 - DNA, 2081 bp, Muscodor strobelii
  misc_feature: SGI EST ID NO. CUFF.27608.1
  misc_feature: Variant of the nucleotide sequence at SEQ ID NO 11276
gcacgactcggtacgacgaattagggctcatttttctgcacttgctttcgagttttcgacttgcccgtagcaccgtcgtggagccccgaaactagctagatacatggattctccgcggatagcaacacagcaagacagcaagctccacgatcatcgtcaaaggtccatatccgcgatgttcaaaccacaacaaccaaagaatctcaacattatcgactcattatcgagtcatgacgatattctgagatgtttagaagatttcgtaccattgcaattacgtagaatgggcatggaatcctcttccggacgttccgcggatgatccccaccacacatgtgggcccacttgctacaaggctaggggcgacatagaatatcgacggaatcatctgacgtggagtgcgtggatttcagctctgtataaaggaatcgagatcgcatgcaatatcagccgcagtaagatcctaccgaaacagcaggaatatgagtctatttagagtcgccaacctacgagcagtaacgagaagcctaccaaagatccaacagcaacccgctagaacgtacgcaaccacgaaaatggcttcccagaacgacaacagatacggccccgatctgggcaacacggtgaacaagtccttcggaggtgccaagttccccgaagtcagactccccgacggtagctcggtgcagacaggaactttcggttccctcttgatcaacattcgaggatacgctgctgccgccgccaagggcgaccccgtagagattaaggagaaggaggacgccttgagactgtcgattcccatgctcgacaagctcggcttcttcgagctcttccctcccgaggagtgggaggctggaaaccacgaaggcaagaaggccaccggacgattgatcagggaatacaaggagttgaacaaggactcccagatcctggtggagaacaggggcaagccagtggccgcggcctcttaagatggaacgacactgatatatcgtataagtttgggacggcgggacggaattctagatgtatgacggatgataaatgaccgctagatgttgaaacaatcattcaaaccagtccacagtaaaaccctcgtcaatgtgtgaaatgccgtcatgcgtgagatgaacgctgtgtgatgatcgttcgtagagtgatcgaccggtatatttaactaggtagtatcttcatgacttcgttaccgcatcgtattgatcaattggtcattttttcgctcgtttctgcgtgtcgtcctcatcgcccatttcctcgtcaccatcgagatcgcgatttcgcttcaagcccttcatcttcctcgtctgtagaccactcaagtccaccttgccgagatggattctgcccagcttgtcgcccatgatatctgtcgaaatgttcttctttgtcttctcctcaccggtcttggctttcttcagagcctccttcatgatcgtctcatcaggttgctggctgcgaccgacacggaaatcaattctctgttaagtcaaattcagtgcgctgatgacagaaacgtgtgatacatcaatgtgacttacgggtcccatctcttctagctcaacacgcggtagcttctgtccactgcgcttggtctcgagcagatatacacggagatgcacggtaggcttgacatcatcgccggctgattcatcggctgccacagacacaatgtactgtaagccttcgacatcgatctggtcgctgctcgtatcccccttgaacatgtcggtgaggatgctctttattatcgtgtactcgttcgccacagggctatcccaggcggtgccagagaagagcatcatgggcctgagtccgatagcgaacttgcgtgacttgaactgggccagtgtccggaaagtctcaggtatgatgtggagctcgatcatgtcgaggatctggttgacggcataggtgcgagcgaatgtgagggtgttggggcgcttcttcgagctcgagccaaatactagcaagctggtatcgttcttctcggagaagaaaattagggatgaagggtcctcgaaggggtgaatgtcattcttcttcgtaaatttcttggcaag

SEQ ID NO: 11279 - DNA, 1587 bp, Muscodor strobelii
  misc_feature: SGI cDNA ID NO. 563616
  misc_feature: Encodes the peptide sequence at SEQ ID NO 11280
atggcttccttcagcaaaatcctcatcctcggtgccctaggcaccttggccgcaggtcaaaccgccatcacggtcaacactgccaccaagtaccaacagatcgacggatttggattttcacaggcattcggtcgagcaaccgaattcaagaatgcgccagctgctacgcagaaatccgcgctggactacctctttagcactacaacaggcgcaggattctcgatcatccgtaatcgcatcggctccggaggtagtggtgacagcatagagcctactagtcccggttcgccttcgtcaacaccaacgtatgtgtgggataacaatgattcgggacaggtatggtttagccagcaagccattagctatggcgtcaagacgatttatgcggatgcgtggtcggcgccaggatttatgaagacgagtggctctgattcatcaccgggctacctatgtggttcgactggtcacacctgttcgtcaggaaactggcagcaagcctatgcgaacttcctcgtgaagtatgttcagtattacgcccaagccggcataaccgtaacgcacttaggcttcctcaacgaaccagactaccaagtcagctactcacaaatgcagatcagctccaacgcgcaggaagctatctcattcatccccatcctagacgccacagtccaagcagccggtctctcgacgaagctcacatgctgcgatgccgttggctggggttcgactaacacctatgctacagcgctggtcaatgcaggcacgacaacacatttggacgtgataacttctcattcatacagcgcagacgcgactacgcccctagatcaaacaaacttgcctaagtggaatactgagggcggtcccagcactgctttcacaaccacttggtatagctccggaggcactaatgaaggattcacgtgggcaaataagttagccgtagctatggtcaacgcaaaactgtctgcgtatctgttttgggagggcttcgagatcaagcaaacgcagtccggctcccatctcctcgacgcaacggacggcacaaacgtgacgccatcgggcatcttctgggcattcgccatgtggtctcgctatattcgtcctggagcagttcgcatcggaacatccggaacgcttagcagcacgataatcggcgctttccaaaacacagacggttcgattgtcgtcgttttcaccaacagcgggtcgtcaagtcagtcggccaaggtctccttcagcggcgtgacgccgaccgccgcgtctgcatgggtgacgaaccaagggagcacttttgcgagcacgtcggtgaatttgtcgggaggcgcagtgacggtgtctgtcccggcgcatggtgtcgtgactgtcaagctgacgacgggcggttctggaaccggatcgactacgactcagaccacgatttcgacgacgactcgtacgactacttcggcttctagtactacgacgtcagcaagcgggtgttcagccctatatggtcaatgtggcggaacaggatggaccggggcgacatgttgctctagcggaaaatgcacagtttccaacacctattactcgcagtgtttgtag

SEQ ID NO: 11280 - protein, 528 aa, Muscodor strobelii
  misc_feature: SGI Peptide ID NO. 563616
  misc_feature (497)..(524): Pfam Id: PF00734 Pfam Desc: Fungal cellulose binding domain
  misc_feature (357)..(404): Pfam Id: PF02055 Pfam Desc: O-Glycosyl hydrolase family 30
  misc_feature (5)..(458): NCBI GI: 169854329 Blast Desc: CC1G_01516 [Coprinopsis cinerea okayama7#130] gi|116504974|gb|EAU87869.1| CC1G_01516 [Coprinopsis cinerea okayama7#130]
  misc_feature (7)..(528): NCBI GI: 121715874 Blast Desc: cellulose hydrolase, [Aspergillus clavatus NRRL 1] gi|119403703|gb|EAW14120.1| cellulose hydrolase, [Aspergillus clavatus NRRL 1]
  misc_feature (21)..(458): NCBI GI: 115388667 Blast Desc: conserved [Aspergillus terreus NIH2624] gi|114195923|gb|EAU37623.1| conserved [Aspergillus terreus NIH2624]
  misc_feature (7)..(460): NCBI GI: 212527120 Blast Desc: glucosylceramidase, [Penicillium marneffei ATCC 18224] gi|210073115|gb|EEA27202.1| glucosylceramidase, [Penicillium marneffei ATCC 18224]
  misc_feature (17)..(460): NCBI GI: 242782678 Blast Desc: glucosylceramidase, [Talaromyces stipitatus ATCC 10500] gi|218720195|gb|EED19614.1| glucosylceramidase, [Talaromyces stipitatus ATCC 10500]
  misc_feature (9)..(476): NCBI GI: 242791275 Blast Desc: conserved [Talaromyces stipitatus ATCC 10500] gi|218718313|gb|EED17733.1| conserved [Talaromyces stipitatus ATCC 10500]
  misc_feature (23)..(455): NCBI GI: 116207174 Blast Desc: CHGG_02880 [Chaetomium globosum CBS 148.51] gi|88183477|gb|EAQ90945.1| CHGG_02880 [Chaetomium globosum CBS 148.51]
  misc_feature (1)..(458): NCBI GI: 116200289 Blast Desc: CHGG_08300 [Chaetomium globosum CBS 148.51] gi|88179579|gb|EAQ87047.1| CHGG_08300 [Chaetomium globosum CBS 148.51]
  misc_feature (23)..(458): NCBI GI: 28629056 Blast Desc: AF487263_8 endo-exoxylanase [Leptosphaeria maculans]
  misc_feature (23)..(463): NCBI GI: 171679950 Blast Desc: protein product [Podospora anserina] gi|170939601|emb|CAP64828.1| protein product [Podospora anserina]
  misc_feature (107)..(455): SWISSPROT Homolog: EC 3.2.1.136 Glucuronoarabinoxylan endo-1,4-beta-xylanase
MASFSKILILGALGTLAAGQTAITVNTATKYQQIDGFGFSQAFGRATEFKNAPAATQKSALDYLFSTTTGAGFSIIRNRIGSGGSGDSIEPTSPGSPSSTPTYVWDNNDSGQVWFSQQAISYGVKTIYADAWSAPGFMKTSGSDSSPGYLCGSTGHTCSSGNWQQAYANFLVKYVQYYAQAGITVTHLGFLNEPDYQVSYSQMQISSNAQEAISFIPILDATVQAAGLSTKLTCCDAVGWGSTNTYATALVNAGTTTHLDVITSHSYSADATTPLDQTNLPKWNTEGGPSTAFTTTWYSSGGTNEGFTWANKLAVAMVNAKLSAYLFWEGFEIKQTQSGSHLLDATDGTNVTPSGIFWAFAMWSRYIRPGAVRIGTSGTLSSTIIGAFQNTDGSIVVVFTNSGSSSQSAKVSFSGVTPTAASAWVTNQGSTFASTSVNLSGGAVTVSVPAHGVVTVKLTTGGSGTGSTTTQTTISTTTRTTTSASSTTTSASGCSALYGQCGGTGWTGATCCSSGKCTVSNTYYSQCL

SEQ ID NO: 11281 - DNA, 2774 bp, Muscodor strobelii
  misc_feature: SGI EST ID NO. CUFF.26749.1
  misc_feature: Variant of the nucleotide sequence at SEQ ID NO 11279
aacctccattactgtactcttagagacatcgttagcccatcgcccttctctttagtcttggcgcataaatgcccaacaaccgcgagaggatccaaattcgacttaagtgtcttcgccgacgcaagccaacccaagtacccggtggctttccgcagccgagccaaacagcaacgggtccgactcgggctaccatccgggctcaagcggggtctgacagcctcgacgaaactcctccaatcgggttgttttcacatcacatcacggaagcacacccaaggcacaccgattaggacgacatcgagagaacggcaaataccctggtaacttctattcttatgccaatagggtgcgaagtcccccgactacccgcgttttctcgcaaaatgagggttccagaccagacatcacggttctatgggtcggatgctcaagccggctgaacatattcgagtgcagacggaaccaccatgccgccttacaaacgcgccaaccatgttgcaatgcaaggaacaagattagcgagcaaatagcattttgtatactaatctggggagctctgaactacatatgtaggccttggccgccgatcatacctcatgctccaaacatctagcatcgcttggggtacaatatggcttccttcagcaaaatcctcatcctcggtgccctaggcaccttggccgcaggtcaaaccgccatcacggtcaacactgccaccaagtaccaacagatcgacggatttggattttcacaggcattcggtcgagcaaccgaattcaagaatgcgccagctgctacgcagaaatccgcgctggactacctctttagcactacaacaggcgcaggattctcgatcatccgtaatcgcatcggctccggaggtagtggtgacagcatagagcctactagtcccggttcgccttcgtcaacaccaacgtatgtgtgggataacaatgattcgggacaggtatggtttagccagcaagccattagctatggcgtcaagacgatttatgcggatgcgtggtcggcgccaggatttatgaagacgagtggctctgattcatcaccggggttagtaaatatgtgaaaatgcatgcctaagggtttgactcacaatattcagctacctatgtggttcgactggtcacacctgttcgtcaggaaactggcagcaagcctatgcgaacttcctcgtgaagtatgttcagtattacggtacgtatcaagcatcccgagttggctaagacacatttacctattagaaaaatcggcattttagatttagaatagagtaatagaaggtcctaactaactcgttatttcgcctgcagcccaagccggcataaccgtaacgcacttaggcttcctcaacgaaccagactaccaagtcagctactcacaaatgcagatcagctccaacgcgcaggaagctatctcattcatccccatcctagacgccacagtccaagcagccggtctctcgacgaagctcacatgctgcgatgccgttggctggggttcgactaacacctatgctacagcgctggtcaatgcaggcacgacaacacatttggacgtgataacttctcattcatacagcgcagacgcgactacgcccctagatcaaacaaacttgcctaagtggaatactgagggcggtcccagcactgctttcacaaccacttggtatagctccggaggcactaatgaaggattcacgtgggcaaataagttagccgtagctatggtcaacgcaaaactgtctgcgtatctgttttgggagggcttcgagatcaagcaaacgcagtccggctcccatctcctcgacgcaacggacggcacaaacgtgacgccatcgggcatcttctgggcattcgccatgtggtctcgctatattcgtcctggagcagttcgcatcggaacatccggaacgcttagcagcacgataatcggcgctttccaaaacacagacggttcgattgtcgtcgttttcaccaacagcgggtcgtcaagtcagtcggccaaggtctccttcagcggcgtgacgccgaccgccgcgtctgcatgggtgacgaaccaagggagcacttttgcgagcacgtcggtgaatttgtcgggaggcgcagtgacggtgtctgtcccggcgcatggtgtcgtgactgtcaagctgacgacgggcggttctggaaccggatcgactacgactcagaccacgatttcgacgacgactcgtacgactacttcggcttctagtactacgacgtcagcaagcgggtgttcagccctatatggtcaatgtggcggaacaggatggaccggggcgacatgttgctctagcggaaaatgcacagtttccaacacctattactcgcagtgtttgtagacggtaatgaatcgaattatcgaaatatcagtttgacagcaagtcgttaatgcaaagaaaccgtgccgcatgcagatgatatcagtagttattcatacttctaccaaaattatatatctccgcggtgtgtccaggtccaggtcctcctaggagtttaagtgtgctccaatcacaatgcttaccaaacaaggaaatcggtcagacagaggatagagagagtaggagctcgagaagacatagaactgtggcgtcagctctcgatagctaggttattatcgcagaccgaatagactgtctggttaatagttaatccgtatacgctatagaatggtcgagatgcaagtcggacactcgaggaccggactctggtcataagtaaaagtaatta

SEQ ID NO: 11282 - DNA, 3621 bp, Muscodor strobelii
  misc_feature: SGI cDNA ID NO. 563617
  misc_feature: Encodes the peptide sequence at SEQ ID NO 11283
atgacaaaaccaactctgacttcagcggtttcaccagccgtcgagtcaaagcagctagcaccgcagtccgccccccagtctcccttacattcctcccccgaaacacctcacccgccagcctcaactgcccgatccctctcctcctctctgcgccgctcttggagcgacaagagtctgccaagtctcccagcctacgccgtgcccgccatcgactttgacaccgataccgaaatcgacacccgtcttggtcccagctccgcgcccgcactccgagatcccaatgagaagctcgcggtctcgcccagtcgtcaatccgtaggcggctcgcggctcacctctgcaggaatggggaagaggaggtcgatcctgagtcgtccgcagtcgtggctaccatcctcccgatcttctggcgacttggacaggctggcccgagaagagtcggagagtatggcgcaagtggaaggaagcggtccatatcttgcaccgaagtcgagcgtgggagaccgatcgaggaactcatccccttccttggtatctctggcaaggcgatcatggctcggaccatcccgatcaccgtcgccagacacgcgacaggaggacccaacgaagcccgccgaggttcgaccaggccgtgaacgtgctcccagcaacagctcgattatgaagctccgaaaggcctcactcgttcgtcggaactcatcttctagtgaaagcagtcgatccagcgaatccacgagcaagatcggaggatatctaaacaagatcaaggcaaagccacagagtggtctcgccaagggtaaggctcagcatgatctcgatagtccggcctcttcgacgacaagccttgcaccgccatctacggatacacgccaatcgcatgcttccgagacgagtaacagcacatttcccgacgacatgcacaatgccgcaaaagctccacatgctcgagaccccttatggaccaactttaaagccctcgagactgagttccagaaattccagctcaaaacgacgcctctgaaaatgaacctggtgcgtagtgttctgatgccatttttgcgaaactttgccagccactcctcaaacaccaatctacaccacgaagacctggagcgcagggtgattattctgaacaagtggtggactggacttctggagatgctccatgtgcaaacccacccacccgtgtccggtgtggaccgacctaccttgcttgatgctattactgccatcatgatgcgagcagaatggcggcaatgctctcctaccttccggccatttctcgagcgaaacctccaagatcgagtgcacaggaagtcgaccgctacgttgaccttgactacctcggctgagaaggcaggctctgtacactctactgattcggcatatctggttgagtcgacgggacacaatgttaggaacatgttcacgaccaacctggttgcgcaaatggcgatcgttatcgagaagctgtctttgcgacatgtccctaacagcgttgtcaattttgcaggcaaagcatgtgcctatgctttcttctttgcccccggcgtagccgatgtgctggtccgcttgtggtcgttgacaccagacttgctgcgccgggttgcggatggaatgcagcttcctcgacaaagtaaaggcgaaagcgatgatattgtcgccctcttcccgcctaacatggatcaactaggctggacctcggtgaagcaaatgtctgaggcactacggaaggccgcgcaaccacctgtggccttgactagactctcatgggacggaccttgggttgcaagatggaatggtcgcgatagtgatatgttcttcatcttttgcaagtactattacattctcgccgacagcttcataccgccgggactgcccctcgtggaacaagcgcgcgcgccggctttcgttcttgtcaatgcacaggtactatctgttctccattcgactatcaatcgccaagcgactgcagcatcgatggccgcaccactcgttcccgacgcgttttatgatggagatgccgcagctctcgcattgcaagttgcaccgagtaataataacatcttgaaagggatgagcgagaatagactcatcgtcctgttgaaagacatgttgtcgggtggttctggtgccagatacgaagacgcgagacacacatttgccgaggcttttatggccaccatgaaggcagctgcgaagcggacctcacagtttaaccaaagcgcctgcttcacgctttgtgattttttggaggagtcccttttagcctaccatgaatcgatggaaaacgcgccggtggactggcctttctggtttgaggtctgtgagaaaatactcgattcgaatcatacgatatccgagattcgggttctgtcgctactcttcgccttgtgggacacgattgcaagtgacccggtccgaaagggtcgcgtgtgtacggaatggcttctcaccgaaaagactttcgacaagttcttcaatcattggtgcccgatgactcgagcctacttcatgcgactgttatgctggaggatatgtcgagactctggaatggcggttgagtctgacactaaaatatatcttctcgtcttcgatcgactgaaaacagtctgggcccactacctttggctcaagcagaatcacgaagagagaggaatatgcccaccatccacggcaccatgctttccgacaccaggtaaacgcttcatgatcattcggactgaggtgccgactcttcaacaaggccttatgattgggggatttgactcatcgcctacgtccctcaaacaagatatgggtggaagtcctgcgaccgattttgactccatcgcaacctcaccgacagagagtgtcaccccaaagaagaaatggggtttgcttggaaaagtatttccattcagttctggccatgaaagtaccaatgacctcgaaactctaagacgggagacggctgcttctagagcgggcacgacgtctccaatgaaagtctcctcaggagttcccggatctgcaggctctgatacggacagtactggctcgtcgcctacatacgaagccacacaatatgtcttcaagtttctgctttcttggaatcccgtaggtaccatgccacctccaaatcgcagccttattagaccccggcttccgattccagcacagtcttgggtttctggtatgggcttgagcggtactcgaccgccctcggcaggtcgacctaaaccgacgcgtgctatttctggtagtctttacaccggtctcatcgaagctgccaagaatgctgactcaccggatcttccgtcctcgcccacttctactactccgacaccgcacactcgtcgtacgagcattgcacccttgacccctacagagtctaatgacgatgatatccctttgcgcgatactataggtctcgccaaagagaatctcattgcccccgttaaacctaccggcatatatgcctcaaccgtcaagtattctggaagggctctggctgagtggggaatggtagtttccgagtgcaatagtttcatcgatcgaaggcgagaagaaggtgttcttggtctcaatgacgttgaagtcccgacgctaggagttgagacttggcggaaaatgccatga

SEQ ID NO: 11283 - protein, 1206 aa, Muscodor strobelii
  misc_feature: SGI Peptide ID NO. 563617
  misc_feature (724)..(847): Pfam Id: PF08578 Pfam Desc: Domain of function (DUF1765)
  misc_feature (8)..(1200): NCBI GI: 116180592 Blast Desc: CHGG_00924 [Chaetomium globosum CBS 148.51] gi|88185221|gb|EAQ92689.1| CHGG_00924 [Chaetomium globosum CBS 148.51]
  misc_feature (59)..(1205): NCBI GI: 46108524 Blast Desc: FG01144.1 [Gibberella zeae PH-1]
  misc_feature (58)..(1205): NCBI GI: 256735114 Blast Desc: NECHADRAFT_31438 [Nectria haematococca mpVI 77-13-4]
  misc_feature (100)..(1200): NCBI GI: 85111031 Blast Desc: NCU08597 [Neurospora crassa OR74A] gi|28925466|gb|EAA34506.1| [Neurospora crassa OR74A]
  misc_feature (313)..(1200): NCBI GI: 171687607 Blast Desc: protein product [Podospora anserina] gi|170943765|emb|CAP69417.1| protein product [Podospora anserina]
  misc_feature (52)..(1200): NCBI GI: 261357617 Blast Desc: conserved [Verticillium albo-atrum VaMs.102]
  misc_feature (241)..(1204): NCBI GI: 145614774 Blast Desc: MGG_10379 [Magnaporthe grisea 70-15] gi|145021660|gb|EDK05789.1| MGG_10379 [Magnaporthe grisea 70-15]
  misc_feature (116)..(1059): NCBI GI: 154314915 Blast Desc: BC1G_04799 [Botryotinia fuckeliana B05.10] gi|150848337|gb|EDN23530.1| BC1G_04799 [Botryotinia fuckeliana B05.10]
  misc_feature (312)..(1204): NCBI GI: 145232715 Blast Desc: An02g06280 [Aspergillus niger] gi|134056684|emb|CAK37677.1| protein product [Aspergillus niger]
  misc_feature (314)..(1204): NCBI GI: 255942451 Blast Desc: Pc18g01500 [Penicillium chrysogenum Wisconsin 54-1255] gi|211586727|emb|CAP94374.1| Pc18g01500 [Penicillium chrysogenum Wisconsin 54-1255]
MTKPTLTSAVSPAVESKQLAPQSAPQSPLHSSPETPHPPASTARSLSSSLRRSWSDKSLPSLPAYAVPAIDFDTDTEIDTRLGPSSAPALRDPNEKLAVSPSRQSVGGSRLTSAGMGKRRSILSRPQSWLPSSRSSGDLDRLAREESESMAQVEGSGPYLAPKSSVGDRSRNSSPSLVSLARRSWLGPSRSPSPDTRQEDPTKPAEVRPGRERAPSNSSIMKLRKASLVRRNSSSSESSRSSESTSKIGGYLNKIKAKPQSGLAKGKAQHDLDSPASSTTSLAPPSTDTRQSHASETSNSTFPDDMHNAAKAPHARDPLWTNFKALETEFQKFQLKTTPLKMNLVRSVLMPFLRNFASHSSNTNLHHEDLERRVIILNKWWTGLLEMLHVQTHPPVSGVDRPTLLDAITAIMMRAEWRQCSPTFRPFLERNLQDRVHRKSTATLTLTTSAEKAGSVHSTDSAYLVESTGHNVRNMFTTNLVAQMAIVIEKLSLRHVPNSVVNFAGKACAYAFFFAPGVADVLVRLWSLTPDLLRRVADGMQLPRQSKGESDDIVALFPPNMDQLGWTSVKQMSEALRKAAQPPVALTRLSWDGPWVARWNGRDSDMFFIFCKYYYILADSFIPPGLPLVEQARAPAFVLVNAQVLSVLHSTINRQATAASMAAPLVPDAFYDGDAAALALQVAPSNNNILKGMSENRLIVLLKDMLSGGSGARYEDARHTFAEAFMATMKAAAKRTSQFNQSACFTLCDFLEESLLAYHESMENAPVDWPFWFEVCEKILDSNHTISEIRVLSLLFALWDTIASDPVRKGRVCTEWLLTEKTFDKFFNHWCPMTRAYFMRLLCWRICRDSGMAVESDTKIYLLVFDRLKTVWAHYLWLKQNHEERGICPPSTAPCFPTPGKRFMIIRTEVPTLQQGLMIGGFDSSPTSLKQDMGGSPATDFDSIATSPTESVTPKKKWGLLGKVFPFSSGHESTNDLETLRRETAASRAGTTSPMKVSSGVPGSAGSDTDSTGSSPTYEATQYVFKFLLSWNPVGTMPPPNRSLIRPRLPIPAQSWVSGMGLSGTRPPSAGRPKPTRAISGSLYTGLIEAAKNADSPDLPSSPTSTTPTPHTRRTSIAPLTPTESNDDDIPLRDTIGLAKENLIAPVKPTGIYASTVKYSGRALAEWGMVVSECNSFIDRRREEGVLGLNDVEVPTLGVETWRKMP

SEQ ID NO: 11284 - DNA, 5154 bp, Muscodor strobelii
  misc_feature: SGI EST ID NO. CUFF.26758.0
  misc_feature: Variant of the nucleotide sequence at SEQ ID NO 11282
agaaacagcccgattggcaggatttctgatgttcctgtcctatgcagcgatatccccagcaggccgctggtccccgaaacattagagacgcagggcttgcaggcattgtccgtgcagctcgtcccaacgggactcttgagtcttggcttttcgatttgattgaggcgtagtagagcacatcgacgtagtaatgtaccagttatagccaaccaagtagtgaaagatacacctgaattcaatagctcaaaggggagaaatccaatgtcgtctcaactgactcccgctcctttctctgtctcctctttccgaccacacaccgcatactgcacacactcgttcaacatttcatctcgacgtccccttatttctttctgtttgggttctatgagcattgagcattacggcgtcgtttagcattgaggcctcttcatttcctcatttcctcatttgtcattcgactactttcccacgttattcggcactcgctttgggcagtaaacggttagacactcggcgctattggtcttctagccaggcgcaagcggggagcaagattgcatgaccgccgcaagacccaaccttgtcacgatagttttgttataggtagccggaattgattcttttggttcgatccgttggctctgctagctctgctggctatcccttcagcccggttccaactttgaattgcgtctataatactccagaacacactagccctgcgaatatcctcctgacccacgtttacccaagcccatcatcaccttgctgtcgcctgtgtcttgtgtgtctggagtcctgcttgctggtctcggcgccgagcactgcgtcgcagctcttgcagttcttgcagcagagacttcccgtcgagtcaaagcagctagcaccgcagtccgccccccagtctcccttacattcctcccccgaaacacctcacccgccagcctcaactgcccgatccctctcctcctctctgcgccgctcttggagcgacaagagtctgccaagtctcccagcctacgccgtgcccgccatcgactttgacaccgataccgaaatcgacacccgtcttggtcccagctccgcgcccgcactccgagatcccaatgagaagctcgcggtctcgcccagtcgtcaatccgtaggcggctcgcggctcacctctgcaggaatggggaagaggaggtcgatcctgagtcgtccgcagtcgtggctaccatcctcccgatcttctggcgacttggacaggctggcccgagaagagtcggagagtatggcgcaagtggaaggaagcggtccatatcttgcaccgaagtcgagcgtgggagaccgatcgaggaactcatccccttccttggtatctctggcaaggcgatcatggctcggaccatcccgatcaccgtcgccagacacgcgacaggaggacccaacgaagcccgccgaggttcgaccaggccgtgaacgtgctcccagcaacagctcgattatgaagctccgaaaggcctcactcgttcgtcggaactcatcttctagtgaaagcagtcgatccagcgaatccacgagcaagatcggaggatatctaaacaagatcaaggcaaagccacagagtggtctcgccaagggtaaggctcagcatgatctcgatagtccggcctcttcgacgacaagccttgcaccgccatctacggatacacgccaatcgcatgcttccgagacgagtaacagcacatttcccgacgacatgcacaatgccgcaaaagctccacatgctcgagaccccttatggaccaactttaaagccctcgagactgagttccagaaattccagctcaaaacgacgcctctgaaaatgaacctggtgcgtagtgttctgatgccatttttgcgaaactttgccagccactcctcaaacaccaatctacaccacgaagacctggagcgcagggtgattattctgaacaagtggtggactggacttctggagatgctccatgtgcaaacccacccacccgtgtccggtgtggaccgacctaccttgcttgatgctattactgccatcatgatgcgagcagaatggcggcaatgctctcctaccttccggccatttctcgagcgaaacctccaagatcgagtgcacaggaagtcgaccgctacgttgaccttgactacctcggctgagaaggcaggctctgtacactctactgattcggcatatctggttgagtcgacgggacacaatgttaggaacatgttcacgaccaacctggttgcgcaaatggcgatcgttatcgagaagctgtctttgcgacatgtccctaacagcgttgtcaattttgcaggcaaagcatgtgcctatgctttcttctttgcccccggcgtagccgatgtgctggtccgcttgtggtcgttgacaccagacttgctgcgccgggttgcggatggaatgcagcttcctcgacaaagtaaaggcgaaagcgatgatattgtcgccctcttcccgcctaacatggatcaactaggctggacctcggtgaagcaaatgtctgaggcactacggaaggccgcgcaaccacctgtggccttgactagactctcatgggacggaccttgggttgcaagatggaatggtcgcgatagtgatatgttcttcatcttttgcaagtactattacattctcgccgacagcttcataccgccgggactgcccctcgtggaacaagcgcgcgcgccggctttcgttcttgtcaatgcacaggtactatctgttctccattcgactatcaatcgccaagcgactgcagcatcgatggccgcaccactcgttcccgacgcgttttatgatggagatgccgcagctctcgcattgcaagttgcaccgagtaataataacatcttgaaagggatgagcgagaatagactcatcgtcctgttgaaagacatgttgtcgggtggttctggtgccagatacgaagacgcgagacacacatttgccgaggcttttatggccaccatgaaggcagctgcgaagcggacctcacagtttaaccaaagcgcctgcttcacgctttgtgattttttggaggagtcccttttagcctaccatgaatcgatggaaaacgcgccggtggactggcctttctggtttgaggtctgtgagaaaatactcgattcgaatcatacgatatccgagattcgggttctgtcgctactcttcgccttgtgggacacgattgcaagtgacccggtccgaaagggtcgcgtgtgtacggaatggcttctcaccgaaaagactttcgacaagttcttcaatcattggtgcccgatgactcgagcctacttcatgcgactgttatgctggaggatatgtcgagactctggaatggcggttgagtctgacactaaaatatatcttctcgtcttcgatcgactgaaaacagtctgggcccactacctttggctcaagcagaatcacgaagagagaggaatatgcccaccatccacggcaccatgctttccgacaccaggtaaacgcttcatgatcattcggactgaggtgccgactcttcaacaaggccttatgattgggggatttgactcatcgcctacgtccctcaaacaagatatgggtggaagtcctgcgaccgattttgactccatcgcaacctcaccgacagagagtgtcaccccaaagaagaaatggggtttgcttggaaaagtatttccattcagttctggccatgaaagtaccaatgacctcgaaactctaagacgggagacggctgcttctagagcgggcacgacgtctccaatgaaagtctcctcaggagttcccggatctgcaggctctgatacggacagtactggctcgtcgcctacatacgaagccacacaatatgtcttcaagtttctgctttcttggaatcccgtaggtaccatgccacctccaaatcgcagccttattagaccccggcttccgattccagcacagtcttgggtttctggtatgggcttgagcggtactcgaccgccctcggcaggtcgacctaaaccgacgcgtgctatttctggtagtctttacaccggtctcatcgaagctgccaagaatgctgactcaccggatcttccgtcctcgcccacttctactactccgacaccgcacactcgtcgtacgagcattgcacccttgacccctacagagtctaatgacgatgatatccctttgcgcgatactataggtctcgccaaagagaatctcattgcccccgttaaacctaccggcatatatgcctcaaccgtcaagtattctggaagggctctggctgagtggggaatggtagtttccgagtgcaatagtttcatcgatcgaaggcgagaagaaggtgttcttggtctcaatgacgttgaagtcccgacgctaggagttgagacttggcggaaaatgccatgagcagacttcatgattgaaataagcaatcgaggtcgagtgaatcatttgatcgaaaagtcctgacgaaattaacggcacatacggtccgctcgcaagacctggtttttgcctcccgtgtcttattctgtgctggacacaaaatggaccattccattctacgcacaccttatcatccctcttaacaagtatctctatgatgctcaaggggctcggcattctcatatatacgtcggttcatcgcactttgctcttcagcttctagcacacttttcaggcgccccggaaggagtttggctatgacttagggcacatagacccgatgctatatcacaaacagatgaaatatgcatctcctggattcgaattaccgcttttttctctcgctggtgccccgcgatattcaggggctggactcgtagctggttgaagctcgattgactctgttggcgttgcaaacttggaccagctgtttgccatataaaacgaggtctgagactcgatcgtttttcgtttctggacaggagggttgagagaaggaaaaattatataccccgcggatgttggctgcgtcagggagagccaccatgttgcactgtactattgctattgtactatacccctcgaaactggatgcgaattctgagacttgatagctggttctatggactggcttctggtctgtttcgagtttgatgacacacttttat

SEQ ID NO: 11285 - DNA, 1095 bp, Muscodor strobelii
  misc_feature: SGI cDNA ID NO. 563618
  misc_feature: Encodes the peptide sequence at SEQ ID NO 11286
atgacagcatcgttcacgtcaatccccaccctcgacctctcactcgcttcctcccccaccacccttccaaccctcctcacagacctacgacacgccctcatagacataggcttcctctacataaaaaaccacggcgttcccacctcagtaataacagatctcataaacatactaccaaccctcttcaatctcaccccctcagaaaaacgcgccgtagcactagagaactcaccccatttcctcgggtacagcggcgtcggcagcgagaacaccggcgggaaagtcgatctgcgcgaacaatacgagttcgcaacagagctaatcgcaacatggcatgagggtcagccgctctacgaacgactgcgaggtcctaatcaatggccaaagaactcccccaacatacgcacaatcatagaaacttacctaacctctctcacaactctaagcacacacttcctaaccctagtatccctctccctgtccctccctcctcacacattccagtcttacctctcagatcaacaccgactcaaactcgtgcactatccctcctcccctactcagtcatcaaaccaaggcgtaggcccacacaaagactcctcaggctggtggacattcctactccaagcctctccctcagcgcgcggtcaacaagtcctcaacaaatccggctcttggatcgacgtaccgcccatcccaggaacattcgtagtgaacatcggccaagcattcgaggtcgtcacatccggtctatgtcgcgcgacaacacatcgcgtgctctcgacacaaaccgagcggtatagtgtgccgtttttccagggggtgaggagggatctgacgaaggatgaggcgattaacacactgaaggaccatttcgatgagttcagacggaagagtgagaaggaggaagagggaagtggaaatggagagagggagtccgacgagggaagacagatcgattcaccgttcttgaaggggaagtacgacacgtggggtgagtcccagctcaggactaaagtgcggagtcatcgtgagaatggaaagaaattctatgcggaggtgtatgagctatatgtcaatgatgatgtttcgtag

SEQ ID NO: 11286 - protein, 364 aa, Muscodor strobelii
  misc_feature: SGI Peptide ID NO. 563618
  misc_feature (173)..(275): Pfam Id: PF03171 Pfam Desc: 2OG-Fe(II) oxygenase superfamily
  misc_feature (2)..(362): NCBI GI: 240110355 Blast Desc: hyoscyamine 6-dioxygenase, [Coccidioides posadasii C735 delta SOWgp]
  misc_feature (4)..(361): NCBI GI: 240279852 Blast Desc: conserved [Ajellomyces capsulatus H143]
  misc_feature (4)..(361): NCBI GI: 261361240 Blast Desc: conserved [Verticillium albo-atrum VaMs.102]
  misc_feature (5)..(361): NCBI GI: 256730483 Blast Desc: NECHADRAFT_30339 [Nectria haematococca mpVI 77-13-4]
  misc_feature (5)..(362): NCBI GI: 225683133 Blast Desc: 2OG-Fe(II) oxygenase [Paracoccidioides brasiliensis Pb03]
  misc_feature (4)..(362): NCBI GI: 225563032 Blast Desc: conserved [Ajellomyces capsulatus G186AR]
  misc_feature (1)..(362): NCBI GI: 239609185 Blast Desc: oxidoreductase [Ajellomyces dermatitidis ER-3]
  misc_feature (4)..(362): NCBI GI: 226288399 Blast Desc: conserved [Paracoccidioides brasiliensis Pb18]
  misc_feature (7)..(362): NCBI GI: 119180487 Blast Desc: CIMG_08872 [Coccidioides immitis RS]
  misc_feature (1)..(362): NCBI GI: 261188989 Blast Desc: oxidoreductase [Ajellomyces dermatitidis SLH14081] gi|239591911|gb|EEQ74492.1| oxidoreductase [Ajellomyces dermatitidis SLH14081]
  misc_feature (35)..(272): SWISSPROT Homolog: EC 1.14.11.24 2'-deoxymugineic-acid 2'-dioxygenase
MTASFTSIPTLDLSLASSPTTLPTLLTDLRHALIDIGFLYIKNHGVPTSVITDLINILPTLFNLTPSEKRAVALENSPHFLGYSGVGSENTGGKVDLREQYEFATELIATWHEGQPLYERLRGPNQWPKNSPNIRTIIETYLTSLTTLSTHFLTLVSLSLSLPPHTFQSYLSDQHRLKLVHYPSSPTQSSNQGVGPHKDSSGWWTFLLQASPSARGQQVLNKSGSWIDVPPIPGTFVVNIGQAFEVVTSGLCRATTHRVLSTQTERYSVPFFQGVRRDLTKDEAINTLKDHFDEFRRKSEKEEEGSGNGERESDEGRQIDSPFLKGKYDTWGESQLRTKVRSHRENGKKFYAEVYELYVNDDVS

SEQ ID NO: 11287 - DNA, 1448 bp, Muscodor strobelii
  misc_feature: SGI EST ID NO. CUFF.26761.0
  misc_feature: Variant of the nucleotide sequence at SEQ ID NO 11285
cacgaactaacagactcgggccgctcctcatgacaattgcgtgatcgccgttcgcggacaccacttatataaaatcatagactcaagattccgcggcttaatacatataatcacaacacgatgtgcaacttatagcaacctacaacgccgcgaaaatgacagcatcgttcacgtcaatccccaccctcgacctctcactcgcttcctcccccaccacccttccaaccctcctcacagacctacgacacgccctcatagacataggcttcctctacataaaaaaccacggcgttcccacctcagtaataacagatctcataaacatactaccaaccctcttcaatctcaccccctcagaaaaacgcgccgtagcactagagaactcaccccatttcctcgggtacagcggcgtcggcagcgagaacaccggcgggaaagtcgatctgcgcgaacaatacgagttcgcaacagagctaatcgcaacatggcatgagggtcagccgctctacgaacgactgcgaggtcctaatcaatggccaaagaactcccccaacatacgcacaatcatagaaacttacctaacctctctcacaactctaagcacacacttcctaaccctagtatccctctccctgtccctccctcctcacacattccagtcttacctctcagatcaacaccgactcaaactcgtgcactatccctcctcccctactcagtcatcaaaccaaggcgtaggcccacacaaagactcctcaggctggtggacattcctactccaagcctctccctcagcgcgcggtcaacaagtcctcaacaaatccggctcttggatcgacgtaccgcccatcccaggaacattcgtagtgaacatcggccaagcattcgaggtcgtcacatccggtctatgtcgcgcgacaacacatcgcgtgctctcgacacaaaccgagcggtatagtgtgccgtttttccagggggtgaggagggatctgacgaaggatgaggcgattaacacactgaaggaccatttcgatgagttcagacggaagagtgagaaggaggaagagggaagtggaaatggagagagggagtccgacgagggaagacagatcgattcaccgttcttgaaggggaagtacgacacgtggggtgagtcccagctcaggactaaagtgcggagtcatcgtgagaatggaaagaaattctatgcggaggtgtatgagctatatgtcaatgatgatgtttcgtagaagccaaggtttctctcaaattagtagacattttgatcaagtgtcgcaactaggagccgccgagcagcataacgaattcgacttaggtacaggtacatggtctcggtgttgacattaatattgaggctctcgatttcggtttaatgcttgactattacaatgcagtcaatatattgtcccattagcgctctattaccc

SEQ ID NO: 11288 - DNA, 1470 bp, Muscodor strobelii
  misc_feature: SGI cDNA ID NO. 563619
  misc_feature: Encodes the peptide sequence at SEQ ID NO 11289
atgtattcttctgaaagaccacttacgagccccgctcgtgtctctagtgacgccgttgtacctctcggcttttatgatgacacgaccatattccgcatcttcgttctggggagtatgttcgttttcaacgacgtacttgatccacagaaacttcgaagctctcttgagcggttggcgcagcgggatggttggaaaagaatcggtgccaggttgaggaagaatgaaaatggagctctagagcatcatattcctgccgagttcagcgaaaaacgacctgctatcactttcacgcatgttcagcactccatgagtagtaaagatcaccccgttgcctcgctgcttcctcttccaggtagctccgtagggacgagtcctgctattgtaatatcggacactgagaggtttgccgaattatacgaaggaccagggattcccaggggacttgatgatttccttcttacggatcgaccagccatcaacttgcatattgtctcattcaacgatattacagttatgacattacaccggtcgcacacaactttcgacggccaggggcagaaagactttcttgaggcatggtcattgatgatgcagggtcgagaagatgaaatacctacgcctcttgatctgaatcaagatccgttgagtgatctcggaactcgccctagtgagccacacgtgcttgaatcttcgcaattgaagatgctgcaaggcgacagcacagctacaaatagagcccctgaagaagagacagctgatgcgccgccggcgaaggatgtcagcgccatggtccgtataccaggtgacttcgtggaaaagctacgctctaaggctctcgagagccttgcaggaagcgccgaaggaggcgaaaagccttttgttagcgaaggcgatgttctcgttgcttggtgggcaagattggcagccaagtctaatttaggtgatgggccggataagacgatgcgcctcactgttgttaatggatggcgctatccgttgtctaaagatctactccccgctggaaagccatttcttggaaatgcaatgggattcgttaccactctggaacctgcaagtgatattataaataagccgctggagtggacagcatcgcgagtccggcagaatatcatgaatcagggaacccgcgaacagctcgaggcatattgcgcgatgatgagggagtcaaaagacaggttgtatcctgtgtttggcgatgcgtcggcttattcgatcaacttctcgaactggaccaaggtgaactacttcaacctcgatttctctgctgctgctgtcaagcctcgggacacaccatgtacccctttttatctccagcaggctcagtacccacttcgatatcccgagggattctatatcggcggaaaggacgcaaatggagactattggatttgggggtatagggctgagaagcattgggaagccactgagaggttattagcagacgcatag

SEQ ID NO: 11289 - protein, 489 aa, Muscodor strobelii
  misc_feature: SGI Peptide ID NO. 563619
  misc_feature (9)..(486): NCBI GI: 119499624 Blast Desc: NFIA_101560 [Neosartorya fischeri NRRL 181] gi|119414734|gb|EAW24672.1| conserved [Neosartorya fischeri NRRL 181]
  misc_feature (9)..(486): NCBI GI: 256728735 Blast Desc: NECHADRAFT_50656 [Nectria haematococca mpVI 77-13-4]
  misc_feature (6)..(486): NCBI GI: 212529410 Blast Desc: conserved [Penicillium marneffei ATCC 18224] gi|210074260|gb|EEA28347.1| conserved [Penicillium marneffei ATCC 18224]
  misc_feature (10)..(486): NCBI GI: 46120438 Blast Desc: FG04866.1 [Gibberella zeae PH-1]
  misc_feature (9)..(431): NCBI GI: 256726591 Blast Desc: NECHADRAFT_93122 [Nectria haematococca mpVI 77-13-4]
  misc_feature (14)..(487): NCBI GI: 171688922 Blast Desc: protein product [Podospora anserina] gi|170944423|emb|CAP70534.1| protein product [Podospora anserina]
  misc_feature (9)..(486): NCBI GI: 256730272 Blast Desc: NECHADRAFT_94949 [Nectria haematococca mpVI 77-13-4]
  misc_feature (17)..(486): NCBI GI: 67904636 Blast Desc: AN9305.2 [Aspergillus nidulans FGSC A4] gi|40747216|gb|EAA66372.1| AN9305.2 [Aspergillus nidulans FGSC A4] gi|259488140|tpe|CBF87369.1| TPA: LysR family regulatory FGSC
  misc_feature (11)..(487): NCBI GI: 145240011 Blast Desc: An08g05350 [Aspergillus niger] gi|134077166|emb|CAK45507.1| protein product [Aspergillus niger]
  misc_feature (2)..(487): NCBI GI: 238501072 Blast Desc: LysR family regulatory protein, [Aspergillus flavus NRRL3357] gi|220692007|gb|EED48354.1| LysR family regulatory protein, [Aspergillus flavus NRRL3357]
MYSSERPLTSPARVSSDAVVPLGFYDDTTIFRIFVLGSMFVFNDVLDPQKLRSSLERLAQRDGWKRIGARLRKNENGALEHHIPAEFSEKRPAITFTHVQHSMSSKDHPVASLLPLPGSSVGTSPAIVISDTERFAELYEGPGIPRGLDDFLLTDRPAINLHIVSFNDITVMTLHRSHTTFDGQGQKDFLEAWSLMMQGREDEIPTPLDLNQDPLSDLGTRPSEPHVLESSQLKMLQGDSTATNRAPEEETADAPPAKDVSAMVRIPGDFVEKLRSKALESLAGSAEGGEKPFVSEGDVLVAWWARLAAKSNLGDGPDKTMRLTVVNGWRYPLSKDLLPAGKPFLGNAMGFVTTLEPASDIINKPLEWTASRVRQNIMNQGTREQLEAYCAMMRESKDRLYPVFGDASAYSINFSNWTKVNYFNLDFSAAAVKPRDTPCTPFYLQQAQYPLRYPEGFYIGGKDANGDYWIWGYRAEKHWEATERLLADA

SEQ ID NO: 11290 - DNA, 1548 bp, Muscodor strobelii
  misc_feature: SGI EST ID NO. CUFF.26779.0
  misc_feature: Variant of the nucleotide sequence at SEQ ID NO 11288
cgtgtctctagtgacgccgttgtacctctcggcttttatgatgacacgaccatattccgcatcttcgttctggggagtatgttcgttttcaacgacgtacttgatccacagaaacttcgaagctctcttgagcggttggcgcagcgggatggttggaaaagaatcggtgccaggttgaggaagaatgaaaatggagctctagagcatcatattcctgccgagttcagcgaaaaacgacctgctatcactttcacgcatgttcagcactccatgagtagtaaagatcaccccgttgcctcgctgcttcctcttccaggtagctccgtagggacgagtcctgctattgtaatatcggacactgagaggtttgccgaattatacgaaggaccagggattcccaggggacttgatgatttccttcttacggatcgaccagccatcaacttgcatattgtctcattcaacgatattacagttatgacattacaccggtcgcacacaactttcgacggccaggggcagaaagactttcttgaggcatggtcattgatgatgcagggtcgagaagatgaaatacctacgcctcttgatctgaatcaagatccgttgagtgatctcggaactcgccctagtgagccacacgtgcttgaatcttcgcaattgaagatgctgcaaggcgacagcacagctacaaatagagcccctgaagaagagacagctgatgcgccgccggcgaaggatgtcagcgccatggtccgtataccaggtgacttcgtggaaaagctacgctctaaggctctcgagagccttgcaggaagcgccgaaggaggcgaaaagccttttgttagcgaaggcgatgttctcgttgcttggtgggcaagattggcagccaagtctaatttaggtgatgggccggataagacgatgcgcctcactgttgttaatggatggcgctatccgttgtctaaagatctactccccgctggaaagccatttcttggaaatgcaatgggattcgttaccactctggaacctgcaagtgatattataaataagccgctggagtggacagcatcgcgagtccggcagaatatcatgaatcagggaacccgcgaacagctcgaggcatattgcgcgatgatgagggagtcaaaagacaggttgtatcctgtgtttggcgatgcgtcggcttattcgatcaacttctcgaactggaccaaggtgaactacttcaacctcgatttctctgctgctgctgtcaagcctcgggacacaccatgtacccctttttatctccagcaggctcagtacccacttcgatatcccgagggattctatatcggcggaaaggacgcaaatggagactattggatttgggggtatagggctgagaagcattgggaagccactgagaggttattagcagacgcatagaaaatagcattgcaatgttagcaattgcgtatatacacaaggcttgggtttgcgattcgataaccaattcgctctcggctttagtgacgtatcgacttccatatagcacgggcg

SEQ ID NO: 11291 - DNA, 2559 bp, Muscodor strobelii
  misc_feature: SGI cDNA ID NO. 563620
  misc_feature: Encodes the peptide sequence at SEQ ID NO 11292
atgtccgacggtttaggcattggtagactacaagcggcgctcgcggccgtcacgaatgaggccacagtcgccgcagctaacctgaatttcgatttcaccttagtaaaatgcgaagcgcccaaggcataccaaccaatcggccagttaatttcgtcgtcacgtaaagcggaagcagaagatggctctttacacataactgcgagaagacttggggcattgttcgatggcgtctgcccaaatgttcctcatttgctcaacgcctttggtgttagagccaccgagattacaaggaaggcggcaggacgttcccaattggatattaatacaagttggattttctcagagtacgcaggtatcgattcaacatccctctgggcggcggcaacttctagcaaagcagctctaccagtctatcttcttgcatgcatgcttgcacgggcctggggcaatgcagacgccacctccttgtgggttgaagttgtagccgagagaaggcgagcaatcggagaaagctaccacaataacgaggagataccaatcaacattgcaacagctgctgtacaagctgaaatcgctcgagaacagcttgcccgatgggacgccagcgctcgtgcttggctccaaacggcagacactgccatgacaagacacatgaaaaaattcttactgatagcgaacaacatcagcatcccggttaataccacaaaccgtacatttgaaagcataatccgggcgtggacttcagctctagaatcattgaataagctcattgccggagagcctctagctatccaagatggcgcaccgcttctcggggtatctgcatggcatttatatcccaatatgattattttcagtgaaaaagacggaagtaaatctgtcgatatggatgatgctttgatccataccgctggaatcatgtcactgggatttcctgactccaactctcatgcgcctcctggtgtgcattggtcgctgtcgcttgcccaccataagttttacggacgagctattcggaaaaattctctgcttaatactgatgaaagtaggttgacgtttagcgaactcaaagttgttattctcggcgtcattctacacaaatggagaattcctcaggccgagtctttagaaacactcaggttcctccacgagttcttctcatgcctgccacacgatgcgagaaaacgcacagaattgtggatagatgtgctgcacactgccgtaaagagcgttttcgaagatgagtctcaagcggctccattaatatccttagggcgaagacgcggatcctttttcccctcgcccgcaacattcatcgaaccttccttgtttggccttacagacctaaatactcttttgaatcttttgcatacacctaattctcagatagagttattaagaagacttgcaaggcgcatcgaaaatttcgaacacacggaagcctacattctatgccgtcgtgggtttgtatattgtctcgccactgtgtttcccgtctcagtccaagccacgagacccgagctacaggcaacgattgatgacccgagaataggttcttgttatgttagatggtcgaataccgaggatctcttcggctctgactcgccctctgaaagaatttttcgtatgcacggctcggctgacggctcggctgacggctcggcttttacctttttgagaacattcatcatgttcgaacagtcaagaaagaagttcacctacctatttggagatgcagattgcgccgcagtatttgtacccgatacgactcttgagacactctcagtgccccaaattacggtaccgtccctgacttgtcctgatatcatgtggtgtcttgcacacgacctcctccagccgcaggatctcatctcttttttcgatgatatggatagtcatatcgtcataaacttgatgaaatttgggtttgcatctatggtctacgagaatctaactagagaaggcgctacgatatcctctcgaattctaacacaaccctttccgaccatggaatcccttcggacccgcctgcacaatgagcaatcactcactgaaagggatgtgataaacgccaggttaaaaaacgcgcgacagcatatcatacccgcactggcagtgattgcatactttgaaactggaatggacgtcataaagagcgaccggctcaatacgaatgatattctcggtctatcttccggtgattccatctatgttccatctaagatgcttcatgacccgggaatctacttcccgcccttcaagtttagtagattacacggcaatcttggcatgccaggcatgtcattgataacaagtccccggcagcctgaggccagggatatcgattttgcatctttcaggcgagtgattgatgaattcgatggcaaagcgatggatagcttcaaaagcacatccgtacacctctctttcacagagtggactgcgccaatgtatcgaagtagtgcggttggcgagcggggctcgcaagccactcatagagaagcagtggtgtccaaacatgggaccaaatacttgactgcccaggtggaattgcaataa

SEQ ID NO: 11292 - protein, 852 aa, Muscodor strobelii
  misc_feature: SGI Peptide ID NO. 563620
  misc_feature (7)..(851): NCBI GI: 145609608 Blast Desc: MGG_09129 [Magnaporthe grisea 70-15] gi|145017020|gb|EDK01383.1| MGG_09129 [Magnaporthe grisea 70-15]
  misc_feature (7)..(851): NCBI GI: 149210921 Blast Desc: MGCH7_ch7g933 [Magnaporthe grisea 70-15] gi|86196888|gb|EAQ71526.1| MGCH7_ch7g933 [Magnaporthe grisea 70-15]
  misc_feature (5)..(838): NCBI GI: 169605903 Blast Desc: SNOG_05984 [Phaeosphaeria nodorum SN15] gi|111065928|gb|EAT87048.1| SNOG_05984 [Phaeosphaeria nodorum SN15]
  misc_feature (7)..(851): NCBI GI: 46137867 Blast Desc: FG10449.1 [Gibberella zeae PH-1]
  misc_feature (5)..(851): NCBI GI: 115492241 Blast Desc: [Aspergillus terreus NIH2624] gi|114197608|gb|EAU39308.1| [Aspergillus terreus NIH2624]
  misc_feature (5)..(374): NCBI GI: 169604668 Blast Desc: SNOG_05349 [Phaeosphaeria nodorum SN15] gi|160706620|gb|EAT87740.2| SNOG_05349 [Phaeosphaeria nodorum SN15]
  misc_feature (20)..(838): NCBI GI: 255945597 Blast Desc: Pc20g10770 [Penicillium chrysogenum Wisconsin 54-1255] gi|211588301|emb|CAP86406.1| Pc20g10770 [Penicillium chrysogenum Wisconsin 54-1255]
  misc_feature (20)..(817): NCBI GI: 145244114 Blast Desc: An11g05770 [Aspergillus niger] gi|134079251|emb|CAK40734.1| [Aspergillus niger]
  misc_feature (7)..(503): NCBI GI: 256731930 Blast Desc: NECHADRAFT_80807 [Nectria haematococca mpVI 77-13-4]
  misc_feature (10)..(471): NCBI GI: 238844746 Blast Desc: conserved [Microsporum canis CBS 113480]
MSDGLGIGRLQAALAAVTNEATVAAANLNFDFTLVKCEAPKAYQPIGQLISSSRKAEAEDGSLHITARRLGALFDGVCPNVPHLLNAFGVRATEITRKAAGRSQLDINTSWIFSEYAGIDSTSLWAAATSSKAALPVYLLACMLARAWGNADATSLWVEVVAERRRAIGESYHNNEEIPINIATAAVQAEIAREQLARWDASARAWLQTADTAMTRHMKKFLLIANNISIPVNTTNRTFESIIRAWTSALESLNKLIAGEPLAIQDGAPLLGVSAWHLYPNMIIFSEKDGSKSVDMDDALIHTAGIMSLGFPDSNSHAPPGVHWSLSLAHHKFYGRAIRKNSLLNTDESRLTFSELKVVILGVILHKWRIPQAESLETLRFLHEFFSCLPHDARKRTELWIDVLHTAVKSVFEDESQAAPLISLGRRRGSFFPSPATFIEPSLFGLTDLNTLLNLLHTPNSQIELLRRLARRIENFEHTEAYILCRRGFVYCLATVFPVSVQATRPELQATIDDPRIGSCYVRWSNTEDLFGSDSPSERIFRMHGSADGSADGSAFTFLRTFIMFEQSRKKFTYLFGDADCAAVFVPDTTLETLSVPQITVPSLTCPDIMWCLAHDLLQPQDLISFFDDMDSHIVINLMKFGFASMVYENLTREGATISSRILTQPFPTMESLRTRLHNEQSLTERDVINARLKNARQHIIPALAVIAYFETGMDVIKSDRLNTNDILGLSSGDSIYVPSKMLHDPGIYFPPFKFSRLHGNLGMPGMSLITSPRQPEARDIDFASFRRVIDEFDGKAMDSFKSTSVHLSFTEWTAPMYRSSAVGERGSQATHREAVVSKHGTKYLTAQVELQ

SEQ ID NO: 11293 - DNA, 1333 bp, Muscodor strobelii
  misc_feature: SGI EST ID NO. CUFF.26791.0
  misc_feature: Variant of the nucleotide sequence at SEQ ID NO 11291
tgagaacattcatcatgttcgaacagtcaagaaagaagttcacctacctatttggagatgcagattgcgccgcagtatttgtacccgatacgactcttgagacactctcagtgccccaaattacggtaccgtccctgacttgtcctgatatcatgtggtgtcttgcacacgacctcctccagccgcaggatctcatctcttttttcgatgatatggatagtcatatcgtcataaacttgatgaaatttgggtttgcatctatggtctacgagaatctaactagagaaggcgctacgatatcctctcgaattctaacacaaccctttccgaccatggaatcccttcggacccgcctgcacaatgagcaatcactcactgaaagggatgtgataaacgccaggttaaaaaacgcgcgacagcatatcatacccgcactggcagtgattgcatactttgaaactggaatggacgtcataaagagcgaccggctcaatacgaatgatattctcggtctatcttccggtgattccatctatgttccatctaagatgcttcatgacccgggaatctacttcccgcccttcaagtttagtagattacacggcaatcttggcatgccaggcatgtcattgataacaagtccccggcagcctgaggccagggatatcgattttgcatctttcaggcgagtgattgatgaattcgatggcaaagcgatggatagcttcaaaagcacatccgtacacctctctttcacagagtggactgcgccaatgtatcgaagtagtgcggttggcgagcggggctcgcaagccactcatagagaagcagtggtgtccgtacgagatcgtggatactgggttgctgacattagtatcatggctgcattatccgatccacacgttcgcgcactaccagcttcaatggacttgtgcgatcacccccaaccttccaaaccaccgcgtggttctctttcgttagaaacatgggaccaaatacttgactgcccaggtggaattgcaataacacggtctcacaaaaactggcatgcacgtcttgcgatagtagctgtcctagcacaacactgccggctagaaaacagaatgattttcatctgcgcagaggatacttgctgggaatgtattgagccacatgttggcaataatgatatttacgtctattgatgtatatatctgctgcaaccttggtagtccctaaaggaaattgggttgcggtacgaagagacgaggtcaaatcattgtagatgagatcatggttaggctcaaatccagttcgtagaaatccggcccaatgtgcattcgattgaccctct

SEQ ID NO: 11294 - DNA, 753 bp, Muscodor strobelii
  misc_feature: SGI cDNA ID NO. 563621
  misc_feature: Encodes the peptide sequence at SEQ ID NO 11295
atgaacgaattcttaatatatcaccgcgggaaatacaataccgcaaaactttacctcagagctgctagcctagttgcgtgcctccttattcttatcctgtccgcagtcgatcaggtcttgtctcagaggtgggcaggctgggaaggctttggctatccaaattggtactccactgtgccaatagcactttttggtatcttaatagacacagtcgaactcgcacttacgtggaagtggaagcgaaatcctggtgctcatccaggctggcatgtaggcgctgaagtcgtaacattaggcggcaatattgttggcttgatattcacctctgtatggatatattatgcaccccttgtagccttgaggatatctgttgtgaccatcctcgctatttacgcatccattcgattcactctgtttgttttcgccagtatagatacaaatcgttatcatatcaatgtccacgttgagaggagggttgcgcaagtcctccgtatgcagggtcaaaacgagtctgtagcagacacgtatcatcgatactacggtaaacagctcccggagatccagcatccggcttctcgaaagttagaagccggcggctcacgtgcatcagacgcacaaacgtcacagaacacagagccagatcccaaagtcctgggcaacttatctgatttgcaagctgaagaattatcctcaggcttcaaaatgctgccatcggacatggccctactaagcgaacgcggtgtgcctcggtga

SEQ ID NO: 11295 - protein, 250 aa, Muscodor strobelii
  misc_feature: SGI Peptide ID NO. 563621
MNEFLIYHRGKYNTAKLYLRAASLVACLLILILSAVDQVLSQRWAGWEGFGYPNWYSTVPIALFGILIDTVELALTWKWKRNPGAHPGWHVGAEVVTLGGNIVGLIFTSVWIYYAPLVALRISVVTILAIYASIRFTLFVFASIDTNRYHINVHVERRVAQVLRMQGQNESVADTYHRYYGKQLPEIQHPASRKLEAGGSRASDAQTSQNTEPDPKVLGNLSDLQAEELSSGFKMLPSDMALLSERGVPR

SEQ ID NO: 11296 - DNA, 2391 bp, Muscodor strobelii
  misc_feature: SGI EST ID NO. CUFF.26809.0
  misc_feature: Variant of the nucleotide sequence at SEQ ID NO 11294
cccgggtcaacatgcgactcaaacgtcgccgccaagagctctagcaaggactcacagccaatccgagcttgagccataacccatgcgacccccacatcatttctgtcgaattgatttccttgtaccttcaatgcactgcccgttgggatcccagcgaccatgccctggacgtttgcgcatttcaactcctgtcagcagtcttgagtgacactccctggtcttctcttgattctgccactgatctaggttcaccggaaaagtcttcatccgacgacacgtcagactctcatgtatctcgtcgtcgctccgttgttagttcaatcgcagcgatgaacgaattcttaatatatcaccgcgggaaatacaataccgcaaaactttacctcagagctgctagcctagttgcgtgcctccttattcttatcctgtccgcagtcgatcaggtcttgtctcagaggtgggcaggctgggaaggctttggctatccaaattggtactccactgtgccaatagcactttttggtatcttaatagacacagtcgaactcgcacttacgtggaagtggaagcgaaatcctggtgctcatccaggctggcatgtaggcgctgaagtcgtaacattaggcggcaatattgttggcttgatattcacctctgtatggatatattatgcaccccttgtagccttgaggatatctgttgtgaccatcctcgctatttacgcatccattcgattcactctgtttgttttcgccagtatagatacaaatcgttatcatatcaatgtccacgttgagaggagggttgcgcaagtcctccgtatgcagggtcaaaacgagtctgtagcagacacgtatcatcgatactacggtaaacagctcccggagatccagcatccggcttctcgaaagttagaagccggcggctcacgtgcatcagacgcacaaacgtcacagaacacagagccagatcccaaagtcctgggcaacttatctgatttgcaagctgaagaattatcctcaggcttcaaaatgctgccatcggacatggccctactaagcgaacgcggtgtgcctcggtgacggctcacaaatggccaatggcattttgtaataccatgttctcactagacgtatctgcgatgcctttctgactctgaatacgaaatgtgcggtgtagatgggcgaaagcggccgggtcgagttcacgctcaacaagaattcttaatacaccaagaccggggtctgtcagcaatacgaatgcccattggattacaaaaggggtacaggagtcgtcaatcgcgccgattgataatcctataagcatgaatcagatgatagcatgccccccgaggaggaggatctgaaccttcgttatcttcaccgatctgaagcttcacctatgtcttgggcgcatttcgagaaggaggaatgaaggaacacagtcacttattagtgcacgaaacgtcatctacatgagcctcaatcttttgatcagctaagagtaaacctccactcgtcagctatgaaatagggagtaggcacagaaatcatgcaagcgaaagtggtctccgcttcaaaacagcgactccgtcccgtcgcccgagtttatcgcttcgaatctcgcacctatcgactccatctaggcacaccatgtagtgtaagcataggtgtcttcataacatgttgtaccgatgggacaaccctggaaggttaactcgaacttggcaaagcacttcgtctgcattaaagacgtatattaacaccatgaccttcaaggcgagagcaggagcgggggcgttgtatggaatcgcaatccggcatctcgatcggagacaagcaatcgaatcaaaggacgagtgtagctcataatataggtacagtccttcgagcatctgaactgtccgctttcataatcggtacaaaagtcaaaagttgagggcccgacgccgactcgacatgcaactgttgcgcgcggtgccaaggcggctgcgactgggttcggcactgggttgccgagtacctcagtcgctacgagtgcaactaatgttgcaaagaaggccaatgatcgcatgttatgtgcgtgtgaaagaagatgcttgtcgataatggtccaacggggtcttgacgagatttgatcacgctgtacggtcacctaatgtagtgaaacattttgatggaagtccaggaagaacaggcaatgttcatcatttaaactttttcattgagggacttatatctgctatttgaatgttacgatctccatgtcctgtctgcggggacttactctccccaatattcagctcttcagttttccacaactcgcacaagcgctccccgagcctctctcctcactcatctgctctcagaccgaaaccttgtcatgtcttgg

SEQ ID NO: 11297 - DNA, 2127 bp, Muscodor strobelii
  misc_feature: SGI cDNA ID NO. 563622
  misc_feature: Encodes the peptide sequence at SEQ ID NO 11298
atggctcccagtgagtcgcctgaggagcagcctacgtcgaccacaaacgcccagctcccccacaatgtcatgcaatggaagggcgagttgaaggcattgatcgatgccattcagcctagtggcgaggccgttatgctaagacgccactcacattttcccctgccaggtttacagattggggatactctgatctctttgcctttgcaaagcgcccatgcagacctcattcgcaacacaatccgacaatcggtgtccattatcagagaccaaccaacatgggaaattggatcatctgacttcagcatttcgaaccctgcttggaacgaagtcgtcaaaaaagcgtgtcaagacgtatcgactagtctaggcatcattgttgcgaaacctgaactgcagaagctcctgttccatcaacagggctcatccgcagtcaagtatgacaactccgatacctcacccggtgaagctgtcacactcgcaatatgtctgcccacagactgcatagacggtgatgtgcaattatcgcacgatgaaacagtctggaattttgtcctaagccaaggcatgtatcgatgtcgagagtctcacaactgtcttgaagatgatgaggaagcctccgacgatggacttgggtcacatgttacatacgagtatcatgattccgcaatcgcaattatcgcaaaggaaaaactgtttgtttatgcgctggacgacccctgcaacggcaacccaataacgaatgaggtcaacgaggaggtgcttctcgatctagtcgaagctgaacttaaggctcggccaacagatcgttggatcatcgaaagcgcttctgggcttttttcttgcgtaaagcgagattccttgcgtctaaaatctcgtgcaatcatgttagctcaggatctgaaagatgagaaattgctcgaatcatgtttggcaaatgcaattcgggcggttatattcatagccaaaggcgaattcaagacgatgggcgcgattaaagacattgcggcgccctataccaggctcataggtcttgtgaattccatggaactattggattatcatttgcgctcctcgccacagcttccgagccttgggccacatcggtcgcacgatgttgtgcaactcagcttgagtacaggtatagcgctaaaagacaacgaatttgattttgcgaatctcaacacgtttcactgggacgacgctgacgaaatttcgaacgggctattgcccaggctccgccattgtgaagaccaaagaattcggtcaaaacttatctacttcgtcttacaacaaggccgagacaagtggtatggagagccaaaacgcataattgatagcactctcgaaagtttgaagcaggaactgtccaccacggcaatccaatccggggcttgtagtccaggcgtttggtttgttgaacacctgagtgagtacctgctgtccactctgttgcggaaagtcgatcaactgctacaacccgaaccggacggttggatctcgtcaaccaaagtgtcgaaccagataatgctttacttctgtgaagaacttgagaaaagcacgatgcgaccatcagacgcaatcagagatttcgttgttgccgagctacgaaaaaacaacaaattgatagttcctcagaagcccgttggacagactcataccgcaaggcaatgcttttttaagacatgcaaagcatgcgatgagctcaacaaattcctcatctcaccactagcacacaaagtaacattcatattgacgtcagagtcctgcgcgcatttattaggcaaattgcccaagaatctattcaagtgcagaacaaaagatatctcacaggctaacaccaatgaggagtctttacgacgtatgttcgaattgaagattttcaaactgaatactgagttcaagattgccttcaagaaatttcagaaagagctgggcgaacttgttgagacgatgcgagttttccgatcaagatttttgcagcagtatttgggggacagcctttatgacgagctggtcacgttcgatacgcttatccatagtcaagactgcctggccagagagaacgttggtgcaggtcacaagaggaaagcagaggagaccgttgagcctccagcggctaagaagtga

SEQ ID NO: 11298 - protein, 708 aa, Muscodor strobelii
  misc_feature: SGI Peptide ID NO. 563622
  misc_feature (30)..(180): NCBI GI: 46135867 Blast Desc: FG09449.1 [Gibberella zeae PH-1]
  misc_feature (9)..(176): NCBI GI: 85091137 Blast Desc: NCU09412 [Neurospora crassa OR74A] gi|28920138|gb|EAA29519.1| [Neurospora crassa OR74A]
  misc_feature (12)..(176): NCBI GI: 255935387 Blast Desc: Pc13g02810 [Penicillium chrysogenum Wisconsin 54-1255] gi|211583340|emb|CAP91350.1| Pc13g02810 [Penicillium chrysogenum Wisconsin 54-1255]
  misc_feature (24)..(178): NCBI GI: 238837471 Blast Desc: conserved [Microsporum canis CBS 113480]
  misc_feature (6)..(178): NCBI GI: 242801803 Blast Desc: conserved [Talaromyces stipitatus ATCC 10500] gi|218717189|gb|EED16610.1| conserved [Talaromyces stipitatus ATCC 10500]
  misc_feature (27)..(176): NCBI GI: 238487718 Blast Desc: conserved [Aspergillus flavus NRRL3357] gi|220699976|gb|EED56315.1| conserved [Aspergillus flavus NRRL3357]
  misc_feature (24)..(176): NCBI GI: 145254402 Blast Desc: An18g01550 [Aspergillus niger] gi|134084195|emb|CAK47228.1| protein product [Aspergillus niger]
  misc_feature (27)..(176): NCBI GI: 169769949 Blast Desc: [Aspergillus oryzae RIB40] gi|83767303|dbj|BAE57442.1| protein product [Aspergillus oryzae]
  misc_feature (53)..(176): NCBI GI: 242218954 Blast Desc: [Postia placenta Mad-698-R] gi|220725540|gb|EED79522.1| [Postia placenta Mad-698-R]
  misc_feature (28)..(186): NCBI GI: 170097353 Blast Desc: [Laccaria bicolor S238N-H82] gi|164645299|gb|EDR09547.1| [Laccaria bicolor S238N-H82]
MAPSESPEEQPTSTTNAQLPHNVMQWKGELKALIDAIQPSGEAVMLRRHSHFPLPGLQIGDTLISLPLQSAHADLIRNTIRQSVSIIRDQPTWEIGSSDFSISNPAWNEVVKKACQDVSTSLGIIVAKPELQKLLFHQQGSSAVKYDNSDTSPGEAVTLAICLPTDCIDGDVQLSHDETVWNFVLSQGMYRCRESHNCLEDDEEASDDGLGSHVTYEYHDSAIAIIAKEKLFVYALDDPCNGNPITNEVNEEVLLDLVEAELKARPTDRWIIESASGLFSCVKRDSLRLKSRAIMLAQDLKDEKLLESCLANAIRAVIFIAKGEFKTMGAIKDIAAPYTRLIGLVNSMELLDYHLRSSPQLPSLGPHRSHDVVQLSLSTGIALKDNEFDFANLNTFHWDDADEISNGLLPRLRHCEDQRIRSKLIYFVLQQGRDKWYGEPKRIIDSTLESLKQELSTTAIQSGACSPGVWFVEHLSEYLLSTLLRKVDQLLQPEPDGWISSTKVSNQIMLYFCEELEKSTMRPSDAIRDFVVAELRKNNKLIVPQKPVGQTHTARQCFFKTCKACDELNKFLISPLAHKVTFILTSESCAHLLGKLPKNLFKCRTKDISQANTNEESLRRMFELKIFKLNTEFKIAFKKFQKELGELVETMRVFRSRFLQQYLGDSLYDELVTFDTLIHSQDCLARENVGAGHKRKAEETVEPPAAKK

SEQ ID NO: 11299 - DNA, 1716 bp, Muscodor strobelii
  misc_feature: SGI cDNA ID NO. 563623
  misc_feature: Encodes the peptide sequence at SEQ ID NO 11300
atgcctggctacgaagagggacgtagactcgacacagtcaagtacagcatcaagcgctacatgtccgagtctattgaagctagcgttgacgtgccctcgcgtccctacgatgtcaataccttcgcttttgctcgcatctttgcctttaccaattacaccatctccacgttgcgattcttggcgatctacataggtgaatttcgagattttgtcgagatcaagaagcggctagtagtctgctgcgacggcacgttcagcgccgtcgacaagggcaatgaccagtactcaagtaacgtcgcccggctcagccgcgtgatccacagagtcggtatcaatgaggcgggagagaaggtaccacaggttgtctattatcagtcaggtgtcggcaccggctcgcttaccgtcatcaataaagcgcgccaaggtgccgttggcgagagtttgtcagagaaagtgtgcgaagcatataattacatcgcaaacaattggagtccgggtgatgagatcttcattttcggattttcccggggtgcctatacggctcgatctcttgcaggcttcatctgccaagtggggttgttgtcgcctatgatgctggatcacttcatcgatatctacgatgcatataggaacaggggaaaggacagcatctgggacacaaagtgggctaaagagcctttggaagctggtgagcttgggactgctcccccacttgcaggccagcccaagcgagacctaggcacccgcggggactatcttaaaaataatgcccatcagcacgtcaagatcaaggtggtcggagtatgggatacagtcggtagcttgggggcgactaattggttcggtcaagccggtgatgatctctatttccacagcaccaagctctctcccaaaatcgaaaacgccttccaggccttggcaatagatgagacccgtggtaactttcccccaacactatggtatctcgattcatcgtgttgggatggtgacaaacccaaggtcaatctaaagcagtgctggtttccaggctatcactccgatataggagggcacagttcaagctcacttgacactaacagtgtcgacgagattgcctttgcctggatgtgcgatcagatcttcggcctgttgcaactaagtggcaatgccctgcagaaatacattctattcagaatcggcgctacgacgatggacgcgagcaacaagaagatcaaaaacctcgcagccgcttggtctagaattcagtgggagaacggcaaactcatggataacaacgggtggaccgacttctggtgggtcggttcactgttgtctactcgtgccgcgtcatataagcgtgtacctggcgagactgcagcgactgagactgtcaatggtgagaagaagaagatcgactacaagtggttcaacgaagagattcatccttctgtcgctcaccgcgttgccaaggctccggagaaatacacgcctgctcctttcggagctggtaagggatggcaattcgtcgagggtacatcctcgagagttggccattgggtcaagaaggacggcaacggcaaagggcaagatatcgtactcaacgagtatgttattcctaagatcggacaatacaagccgggctcagggtatgacttctggcaaggctctctcgagcgcacgtttgcgcctaaggaggttcttgaggttcaggaacctcatctcgacagcaagctttga

SEQ ID NO: 11300 - protein, 571 aa, Muscodor strobelii
  misc_feature: SGI Peptide ID NO. 563623
  misc_feature (75)..(560): NCBI GI: 212530332 Blast Desc: conserved [Penicillium marneffei ATCC 18224] gi|210074721|gb|EEA28808.1| conserved [Penicillium marneffei ATCC 18224]
  misc_feature (75)..(480): NCBI GI: 46114632 Blast Desc: FG03158.1 [Gibberella zeae PH-1]
  misc_feature (75)..(392): NCBI GI: 189203747 Blast Desc: peptidoglycan binding domain containing protein [Pyrenophora tritici-repentis Pt-1C-BFP] gi|187985308|gb|EDU50796.1| peptidoglycan binding domain protein
  misc_feature (75)..(392): NCBI GI: 169603369 Blast Desc: SNOG_04694 [Phaeosphaeria nodorum SN15] gi|111067334|gb|EAT88454.1| SNOG_04694 [Phaeosphaeria nodorum SN15]
  misc_feature (75)..(373): NCBI GI: 121720200 Blast Desc: ACLA_060400 [Aspergillus clavatus NRRL 1] gi|119405010|gb|EAW15372.1| ACLA_060400 [Aspergillus clavatus NRRL 1]
  misc_feature (75)..(480): NCBI GI: 189204866 Blast Desc: conserved [Pyrenophora tritici-repentis Pt-1C-BFP] gi|187985867|gb|EDU51355.1| conserved [Pyrenophora tritici-repentis Pt-1C-BFP]
  misc_feature (75)..(369): NCBI GI: 115385689 Blast Desc: [Aspergillus terreus NIH2624] gi|114187838|gb|EAU29538.1| [Aspergillus terreus NIH2624]
  misc_feature (73)..(480): NCBI GI: 156037644 Blast Desc: SS1G_12536 [Sclerotinia sclerotiorum 1980] gi|154697944|gb|EDN97682.1| SS1G_12536 [Sclerotinia sclerotiorum 1980]
  misc_feature (75)..(480): NCBI GI: 169610175 Blast Desc: SNOG_08184 [Phaeosphaeria nodorum SN15] gi|160702000|gb|EAT84460.2| SNOG_08184 [Phaeosphaeria nodorum SN15]
  misc_feature (75)..(481): NCBI GI: 154316309 Blast Desc: BC1G_03740 [Botryotinia fuckeliana B05.10] gi|150846526|gb|EDN21719.1| BC1G_03740 [Botryotinia fuckeliana B05.10]
MPGYEEGRRLDTVKYSIKRYMSESIEASVDVPSRPYDVNTFAFARIFAFTNYTISTLRFLAIYIGEFRDFVEIKKRLVVCCDGTFSAVDKGNDQYSSNVARLSRVIHRVGINEAGEKVPQVVYYQSGVGTGSLTVINKARQGAVGESLSEKVCEAYNYIANNWSPGDEIFIFGFSRGAYTARSLAGFICQVGLLSPMMLDHFIDIYDAYRNRGKDSIWDTKWAKEPLEAGELGTAPPLAGQPKRDLGTRGDYLKNNAHQHVKIKVVGVWDTVGSLGATNWFGQAGDDLYFHSTKLSPKIENAFQALAIDETRGNFPPTLWYLDSSCWDGDKPKVNLKQCWFPGYHSDIGGHSSSSLDTNSVDEIAFAWMCDQIFGLLQLSGNALQKYILFRIGATTMDASNKKIKNLAAAWSRIQWENGKLMDNNGWTDFWWVGSLLSTRAASYKRVPGETAATETVNGEKKKIDYKWFNEEIHPSVAHRVAKAPEKYTPAPFGAGKGWQFVEGTSSRVGHWVKKDGNGKGQDIVLNEYVIPKIGQYKPGSGYDFWQGSLERTFAPKEVLEVQEPHLDSKL

SEQ ID NO: 11301 - DNA, 1440 bp, Muscodor strobelii
  misc_feature: SGI EST ID NO. CUFF.26819.0
  misc_feature: Variant of the nucleotide sequence at SEQ ID NO 11299
taggtgccgttggcgagagtttgtcagagaaagtgtgcgaagcatataattacatcgcaaacaattggagtccgggtgatgagatcttcattttcggattttcccggggtgcctatacggctcgatctcttgcaggcttcatctgccaagtggggttgttgtcgcctatgatgctggatcacttcatcgatatctacgatgcatataggaacaggggaaaggacagcatctgggacacaaagtgggctaaagagcctttggaagctggtgagcttgggactgctcccccacttgcaggccagcccaagcgagacctaggcacccgcggggactatcttaaaaataatgcccatcagcacgtcaagatcaaggtggtcggagtatgggatacagtcggtagcttgggggcgactaattggttcggtcaagccggtgatgatctctatttccacagcaccaagctctctcccaaaatcgaaaacgccttccaggccttggcaatagatgagacccgtggtaactttcccccaacactatggtatctcgattcatcgtgttgggatggtgacaaacccaaggtcaatctaaagcagtgctggtttccaggctatcactccgatataggagggcacagttcaagctcacttgacactaacagtgtcgacgagattgcctttgcctggatgtgcgatcagatcttcggcctgttgcaactaagtggcaatgccctgcagaaatacattctattcagaatcggcgctacgacgatggacgcgagcaacaagaagatcaaaaacctcgcagccgcttggtctagaattcagtgggagaacggcaaactcatggataacaacgggtggaccgacttctggtgggtcggttcactgttgtctactcgtgccgcgtcatataagcgtgtacctggcgagactgcagcgactgagactgtcaatggtgagaagaagaagatcgactacaagtggttcaacgaagagattcatccttctgtcgctcaccgcgttgccaaggctccggagaaatacacgcctgctcctttcggagctggtaagggatggcaattcgtcgagggtacatcctcgagagttggccattgggtcaagaaggacggcaacggcaaagggcaagatatcgtactcaacgagtatgttattcctaagatcggacaatacaagccgggctcagggtatgacttctggcaaggctctctcgagcgcacgtttgcgcctaaggaggttcttgaggttcaggaacctcatctcgacagcaagctttgaattctaccttgaactttgctcactgcgtggcgtttggttttgggatttgcttgacgatggagggattattggagcatgatgtactagtgaatataacttagaataccctattccttagaaatacttcttgattacaccatacccg

SEQ ID NO: 11302 - DNA, 1029 bp, Muscodor strobelii
  misc_feature: SGI cDNA ID NO. 563624
  misc_feature: Encodes the peptide sequence at SEQ ID NO 11303
atgcaactcgaaaactttgcgtttctcgccttgctcctgcggaccatcgaggcggttgccgtcttgcgattcgggtgctctcagatcgtcgttgaacgccttgatcctctcgtcaacccctctgtgaatccatctccacatgtccatcaagtggttggaggatgccgccattgcggagaccgacgtctcgcagatcgcgaactgcacaagctgtacttcaaagcgcaaaatggaacttacaagcgcgtgggccagataccaaatcggtatctcaatggtgagacgggaggcatgactgtgtattacacttctccatacgacggctcaaaagtcacagccttcaaaccgggtttccgtatgctcacaggacaccaagatcagcgggcacctgggaacatcacgcaatggaacgcaatatgttttcgctgttataatgcaccgaacttcggaggggataacctcgcgccttgctctgacccaaccgttgatactgtctcgctgccacccaaggcgtgcccaggcggtatccggacaacgattcggttccccacttgctgggatggaacaaacctcgacagccctgaccatatgagccatgtatcatatccagcctcaggaacatttgagaatagcggcccatgcccatcaacacaccccgtgaagttaccgcaactgatgttcgaggttgtttgggatactgctcccttcaacaatatgtggcctaccgacggctcacagccttttgtgcttagtcaaggcgataagtgcggctgccagctccctcgtttaatcaagtcagcagctgatgaatcttgcgtgagtagcaccggatacggtcaacatggagactacgtcttcggttggaaaggcacagctctgcaggatgccatggacgcgagctgcttcggtgcgacatgcagcaagctccagacccagacatttgatgctgcgaacaaatgcgcagtgcagaattctgttggcgaaaacgttgatggctggctcgaccagctgccaggcatgacgatgtga

SEQ ID NO: 11303 - protein, 342 aa, Muscodor strobelii
  misc_feature: SGI Peptide ID NO. 563624
  misc_feature (35)..(288): Pfam Id: PF09362 Pfam Desc: Domain of function (DUF1996)
  misc_feature (71)..(254): Pfam Id: PF09362 Pfam Desc: Domain of function (DUF1996)
  misc_feature (271)..(288): Pfam Id: PF09362 Pfam Desc: Domain of function (DUF1996)
  misc_feature (17)..(340): NCBI GI: 189205016 Blast Desc: conserved [Pyrenophora tritici-repentis Pt-1C-BFP] gi|187985942|gb|EDU51430.1| conserved [Pyrenophora tritici-repentis Pt-1C-BFP]
  misc_feature (16)..(342): NCBI GI: 116205357 Blast Desc: CHGG_10562 [Chaetomium globosum CBS 148.51] gi|88176690|gb|EAQ84158.1| CHGG_10562 [Chaetomium globosum CBS 148.51]
  misc_feature (3)..(340): NCBI GI: 85090100 Blast Desc: NCU07763 [Neurospora crassa OR74A] gi|28919599|gb|EAA29021.1| conserved [Neurospora crassa OR74A]
  misc_feature (19)..(342): NCBI GI: 164427037 Blast Desc: NCU02341 [Neurospora crassa OR74A] gi|157071579|gb|EAA30531.2| conserved [Neurospora crassa OR74A]
  misc_feature (18)..(339): NCBI GI: 116201237 Blast Desc: CHGG_08503 [Chaetomium globosum CBS 148.51] gi|88177021|gb|EAQ84489.1| CHGG_08503 [Chaetomium globosum CBS 148.51]
  misc_feature (6)..(342): NCBI GI: 145609071 Blast Desc: MGG_09109 [Magnaporthe grisea 70-15] gi|145016512|gb|EDK00942.1| MGG_09109 [Magnaporthe grisea 70-15]
  misc_feature (22)..(342): NCBI GI: 171680460 Blast Desc: protein product [Podospora anserina] gi|170939857|emb|CAP65082.1| protein product [Podospora anserina]
  misc_feature (20)..(339): NCBI GI: 171677610 Blast Desc: protein product [Podospora anserina] gi|170936873|emb|CAP61531.1| protein product [Podospora anserina]
  misc_feature (21)..(340): NCBI GI: 169609831 Blast Desc: SNOG_08007 [Phaeosphaeria nodorum SN15] gi|160701924|gb|EAT84283.2| SNOG_08007 [Phaeosphaeria nodorum SN15]
  misc_feature (19)..(342): NCBI GI: 40804600 Blast Desc: conserved [Neurospora crassa]
MQLENFAFLALLLRTIEAVAVLRFGCSQIVVERLDPLVNPSVNPSPHVHQVVGGCRHCGDRRLADRELHKLYFKAQNGTYKRVGQIPNRYLNGETGGMTVYYTSPYDGSKVTAFKPGFRMLTGHQDQRAPGNITQWNAICFRCYNAPNFGGDNLAPCSDPTVDTVSLPPKACPGGIRTTIRFPTCWDGTNLDSPDHMSHVSYPASGTFENSGPCPSTHPVKLPQLMFEVVWDTAPFNNMWPTDGSQPFVLSQGDKCGCQLPRLIKSAADESCVSSTGYGQHGDYVFGWKGTALQDAMDASCFGATCSKLQTQTFDAANKCAVQNSVGENVDGWLDQLPGMTM

SEQ ID NO: 11304 - DNA, 1371 bp, Muscodor strobelii
  misc_feature: SGI cDNA ID NO. 563625
  misc_feature: Reduced expression when VOC is produced
  misc_feature: Encodes the peptide sequence at SEQ ID NO 11305
atggcagagccgccaatagtgccgccagcagtaccaccatcgctcttcaacctcaatgcgcatctcgaaaatcccatattcacaggcggtgtaggcattgcctccctcggcgctgcgctcgccctcgggcgccgaggcgtgctgagcggcgccagtctcctccggcgccgtctgctcgtcaccgtcgagatcagcaaacaagaccccgcctacccttggatgctcacatggctttcccagccccgacagcagaactcgtttctcgcaaagcgcctcacgcgcgtcaacaagctttcggttacgacctcgacgagcaacacgcctggtgacacaagcgcaggcttcttcctccagcccggttacgggcgccacatcgtcaagtacaggaacacgtacattgcgatcaatcgggagaagcagtcgactgcgaaattaaacaccggagagccacacgagaccctagaactgaccacgctgtatgcgcatcgccatatcttcgaacatgtcttcatggaagcgcacgcgacagcgcagcagctgaatgaaggcaagacggtgatttacaccatgaggaacatcgattgggtgccactgggtgaaccgaagacgaagagaccgctaggcagcgtcatactagacgagggagtcggagaaagtctagtcaacgacgcaagagaatttctcgcccggcaacagtggtacgtcgatcgtggtatcccgtatcgtcgaggttacctattatacgggccaccgggcagcggcaagacctcttttatccaggcgcttgccggcgaattgggctataatctagccatgatcaacctgaaccagattggtgtgacagacgacaaactggcgtttctcctgaccaaactccctcagcgttcaattgtgttgctagaagatgccgatgcggctttcgctaatcgcagacggcgcgacgctgatggctacagtggcgggactgtcacgtactccggcctgttgaatgcgctcgacggcgtgacggcatccgaggatagaatcttgtttctcactacgaatcatcccgaacggctcgacccagctatgatcaggccaggccgtgtcgatatgatggtgcacgtcggaaaagccactcgataccaagctaagcagatgtgggatcggttctacggcgacgtcgacaccgaaggcgtgaacagagaacggttcttagctcgtctagatgatttgggactttttcgcgagccagtgggtggcgaaacgccaatacgcacaagcacggcggcgatccagggtctttttctcaccaataagaacgatatggaaggcgccatcaatatggctgagggcttaattccgcagaaagtcgagccggaaccgttgtaa

SEQ ID NO: 11305 - protein, 456 aa, Muscodor strobelii
  misc_feature: SGI Peptide ID NO. 563625
  misc_feature (244)..(419): Pfam Id: PF00004 Pfam Desc: ATPase family associated with various cellular activities (AAA)
  misc_feature (34)..(210): Pfam Id: PF08740 Pfam Desc: BCS1 N terminal
  misc_feature (244)..(370): Pfam Id: PF00004 Pfam Desc: ATPase family associated with various cellular activities (AAA)
  misc_feature (9)..(454): NCBI GI: 85117804 Blast Desc: NCU03231 [Neurospora crassa OR74A] gi|28927138|gb|EAA36095.1| conserved [Neurospora crassa OR74A]
  misc_feature (16)..(452): NCBI GI: 46111775 Blast Desc: FG02769.1 [Gibberella zeae PH-1]
  misc_feature (18)..(455): NCBI GI: 171694974 Blast Desc: protein product [Podospora anserina] gi|170947729|emb|CAP59892.1| protein product [Podospora anserina]
  misc_feature (9)..(456): NCBI GI: 156062232 Blast Desc: SS1G_01232 [Sclerotinia sclerotiorum 1980] gi|154696568|gb|EDN96306.1| SS1G_01232 [Sclerotinia sclerotiorum 1980]
  misc_feature (16)..(448): NCBI GI: 39969545 Blast Desc: MGG_10383 [Magnaporthe grisea 70-15] gi|145021665|gb|EDK05794.1| MGG_10383 [Magnaporthe grisea 70-15]
  misc_feature (24)..(446): NCBI GI: 259485917 Blast Desc: TPA: mitochondrial chaperone BCS1, (AFU_orthologue; AFUA_3G13000) [Aspergillus nidulans FGSC A4]
  misc_feature (30)..(446): NCBI GI: 67525347 Blast Desc: AN3131.2 [Aspergillus nidulans FGSC A4] gi|40744526|gb|EAA63702.1| AN3131.2 [Aspergillus nidulans FGSC A4]
  misc_feature (24)..(446): NCBI GI: 115391551 Blast Desc: mitochondrial chaperone BCS1 [Aspergillus terreus NIH2624] gi|114194204|gb|EAU35904.1| mitochondrial chaperone BCS1 [Aspergillus terreus NIH2624]
  misc_feature (24)..(447): NCBI GI: 258563506 Blast Desc: mitochondrial chaperone BCS1 [Uncinocarpus reesii 1704] gi|237908005|gb|EEP82406.1| mitochondrial chaperone BCS1 [Uncinocarpus reesii 1704]
  misc_feature (24)..(446): NCBI GI: 119491009 Blast Desc: mitochondrial chaperone BCS1, [Neosartorya fischeri NRRL 181] gi|119411325|gb|EAW21268.1| mitochondrial chaperone BCS1, [Neosartorya fischeri NRRL 181]
  misc_feature: Useful for introducing or modulating the production of volatile compounds
MAEPPIVPPAVPPSLFNLNAHLENPIFTGGVGIASLGAALALGRRGVLSGASLLRRRLLVTVEISKQDPAYPWMLTWLSQPRQQNSFLAKRLTRVNKLSVTTSTSNTPGDTSAGFFLQPGYGRHIVKYRNTYIAINREKQSTAKLNTGEPHETLELTTLYAHRHIFEHVFMEAHATAQQLNEGKTVIYTMRNIDWVPLGEPKTKRPLGSVILDEGVGESLVNDAREFLARQQWYVDRGIPYRRGYLLYGPPGSGKTSFIQALAGELGYNLAMINLNQIGVTDDKLAFLLTKLPQRSIVLLEDADAAFANRRRRDADGYSGGTVTYSGLLNALDGVTASEDRILFLTTNHPERLDPAMIRPGRVDMMVHVGKATRYQAKQMWDRFYGDVDTEGVNRERFLARLDDLGLFREPVGGETPIRTSTAAIQGLFLTNKNDMEGAINMAEGLIPQKVEPEPL

SEQ ID NO: 11306 - DNA, 1536 bp, Muscodor strobelii
  misc_feature: SGI EST ID NO. CUFF.26830.0
  misc_feature: Variant of the nucleotide sequence at SEQ ID NO 11304
catattcgccatggcagagccgccaatagtgccgccagcagtaccaccatcgctcttcaacctcaatgcgcatctcgaaaatcccatattcacaggcggtgtaggcattgcctccctcggcgctgcgctcgccctcgggcgccgaggcgtgctgagcggcgccagtctcctccggcgccgtctgctcgtcaccgtcgagatcagcaaacaagaccccgcctacccttggatgctcacatggctttcccagccccgacagcagaactcgtttctcgcaaagcgcctcacgcgcgtcaacaagctttcggttacgacctcgacgagcaacacgcctggtgacacaagcgcaggcttcttcctccagcccggttacgggcgccacatcgtcaagtacaggaacacgtacattgcgatcaatcgggagaagcagtcgactgcgaaattaaacaccggagagccacacgagaccctagaactgaccacgctgtatgcgcatcgccatatcttcgaacatgtcttcatggaagcgcacgcgacagcgcagcagctgaatgaaggcaagacggtgatttacaccatgaggaacatcgattgggtgccactgggtgaaccgaagacgaagagaccgctaggcagcgtcatactagacgagggagtcggagaaagtctagtcaacgacgcaagagaatttctcgcccggcaacagtggtacgtcgatcgtggtatcccgtatcgtcgaggttacctattatacgggccaccgggcagcggcaagacctcttttatccaggcgcttgccggcgaattgggctataatctagccatgatcaacctgaaccagattggtgtgacagacgacaaactggcgtttctcctgaccaaactccctcagcgttcaattgtgttgctagaagatgccgatgcggctttcgctaatcgcagacggcgcgacgctgatggctacagtggcgggactgtcacgtactccggcctgttgaatgcgctcgacggcgtgacggcatccgaggatagaatcttgtttctcactacgaatcatcccgaacggctcgacccagctatgatcaggccaggccgtgtcgatatgatggtgcacgtcggaaaagccactcgataccaagctaagcagatgtgggatcggttctacggcgacgtcgacaccgaaggcgtgaacagagaacggttcttagctcgtctagatgatttgggactttttcgcgagccagtgggtggcgaaacgccaatacgcacaagcacggcggcgatccagggtctttttctcaccaataagaacgatatggaaggcgccatcaatatggctgagggcttaattccgcagaaagtcgagccggaaccgttgtaaaccatgtaaattgctgtaacaaaagttttgtatcatacgagataccccacagctagaatatgtaatagaggaatgagatcatgaattccgcacttcagtcattgctttgaagcgcctagggtttattcaacctctcaggcgctcgagacgacaga

SEQ ID NO: 11307 - DNA, 2316 bp, Muscodor strobelii
  misc_feature: SGI cDNA ID NO. 563626
  misc_feature: Encodes the peptide sequence at SEQ ID NO 11308
atgaagctctcggtcgctttctcgctcctcgccgcccttcatggcgtccagtttgcttgcgcggcaatggacagtgttgttggcaagaatggtattgttggattcggaatcgaattatggcccgacttatgttgcgcctcatgcgccgactcactatccgccctctatttaagctgcacgactttcccaaatggcactacagctgattcagatatggagaaaagggacgatatgggcatggacggcatggaaatggacgagatgccatcgaccagcgatgattgtcgagcagctaatacaccatggctgcagtctatggcctattgcatccagcaaaactgcaagactgatgggctttcagcaacgaggcaagcgaaatgcttcaaagacgaagcggctatgggagccgaaacgccaacattcgaagacagcctacctacaacggctcctacggtcgagttagcctcggatgctctttggttgaacaagacaagcctggtcaacagtgaactctactggtccacttatggcacctatagggaattcaagaagtctgaaaatatgcacagtcaatattctgtcagccttatcgttctcgttcttggtttctgcctcgcatgcggtgtagtgaaccaactcacggccgcagttcctcagattcgcaagtctgcgcagtcgtcctgggtctactcaaaagttcaacaatacttgctcctcccagcactcgttggctctcggcatctgcgcccgatgtatttcggctatgtgcctggtcgcatgctcagcatcttcatcacgatttacgtaatcctcaacgtcgtattttcctcgttacaattcagcagccaccagccaaatatttacttcttgtccatggggttcgagatgtgcgaatatgtcgggaaccgaacgggaaacctcagtcttgtcaacactgcgatcgccattctcttcgcaggtcgaaacaatttgcttataggcctgacggggtggaaccagaacactttcttgacactacataggtggagtgcaagagtggcgacggtccaagctatcgtacactcgatcatttataccatggcctactgggagcccggctatgaaggggccaagaaatacgcagagcaggctgcaatgccattttattggtggggaatcatcgctaccgtcgcgtatgccttggcggcctcattctcagtcttgcccatccgcatgacttattacgacacatttttgcttctgcatataggtctcgctatcgtggctttagtcggatgctggtaccaccttgttcctcatttcggtttcgcatatggttatcagacgtggctatacattgctttcgccttctggtctgcagaccgttttgctagacttgttcgtttgggttactacaacctccgaggctcgtcctctgccattgtgaaagcagttcccggctgtgacgttttcgaagtcacggtcttcccaagcgtcagctggggatttggaccagggcagcacagttttctctacacgcctcatattggagcgggtaaattctgggaaagccatcccttcagtattgccagatggacgcgcgcaggaacacctctgaaagtcgagtctagaaccgagtcactttccgacagcaacgaaaaaggcgcttccgtgggagtcgccccactgtctacagtctcatcttctgcgtcaaacactcagaacgaaagtcgcgcaagcgttcagtttttgcttcgaggcaagggtgggatgacatcagcgttgcggaatcacatgtcttggtactcgtatggcgagagcatggaagtctcagtgctcaacgaaggcccatacggcggccaccgtgcgactctccaacccttccaactagccgacactgttctgtgcattattggtggtattggtattacacacgctttgggctttgtgcaagaattcgtcagcgcaaagcgagggatcaagtctcgaactatgggaaatgtccagcgattcatccttgcctggtcagccaaggaggcggcactcatcgaatacgtcaagcaggaatatcttgccgattgcgagggcatcgaattcttgttttactgcacgggcgaggacgacagcgagaacagtaaagtggacgatataatagaagtgaaggagggaaggatggacatcaagtctgtcatgcgatcatctttagagccctctcacagggctctcgtgttggtatgcggccctggcagtatggcggatgaggcgagacaggaggttgtacattgcgtcagagatgggtataaggtcgacctagtgcaggaagccttttgttggtaa

SEQ ID NO: 11308 - protein, 771 aa, Muscodor strobelii
  misc_feature: SGI Peptide ID NO. 563626
  misc_feature (304)..(426): Pfam Id: PF01794 Pfam Desc: Ferric reductase like transmembrane component
  misc_feature (467)..(615): Pfam Id: PF08022 Pfam Desc: FAD-binding domain
  misc_feature (467)..(523): Pfam Id: PF08022 Pfam Desc: FAD-binding domain
  misc_feature (31)..(771): NCBI GI: 145609433 Blast Desc: MGG_13426 [Magnaporthe grisea 70-15] gi|145016795|gb|EDK01225.1| MGG_13426 [Magnaporthe grisea 70-15]
  misc_feature (34)..(771): NCBI GI: 256730138 Blast Desc: NECHADRAFT_95035 [Nectria haematococca mpVI 77-13-4]
  misc_feature (19)..(771): NCBI GI: 261356805 Blast Desc: ferric reductase transmembrane component 4 [Verticillium albo-atrum VaMs.102]
  misc_feature (30)..(771): NCBI GI: 159123961 Blast Desc: ferric-chelate reductase (Fre2), [Aspergillus fumigatus A1163]
  misc_feature (30)..(771): NCBI GI: 70983095 Blast Desc: ferric-chelate reductase (Fre2) [Aspergillus fumigatus Af293] gi|66844700|gb|EAL85037.1| ferric-chelate reductase (Fre2), [Aspergillus fumigatus Af293]
  misc_feature (44)..(614): NCBI GI: 261357112 Blast Desc: ferric reductase transmembrane component 4 [Verticillium albo-atrum VaMs.102]
  misc_feature (29)..(523): NCBI GI: 256721791 Blast Desc: NECHADRAFT_64609 [Nectria haematococca mpVI 77-13-4]
  misc_feature (229)..(771): NCBI GI: 159131831 Blast Desc: plasma membrane ferric-chelate reductase (Fre2), [Aspergillus fumigatus A1163]
  misc_feature (229)..(771): NCBI GI: 146322688 Blast Desc: FRE family ferric-chelate reductase [Aspergillus fumigatus Af293] gi|129557792|gb|EAL91057.2| FRE family ferric-chelate reductase, [Aspergillus fumigatus Af293]
  misc_feature (18)..(640): NCBI GI: 116196552 Blast Desc: CHGG_04874 [Chaetomium globosum CBS 148.51] gi|88180787|gb|EAQ88255.1| CHGG_04874 [Chaetomium globosum CBS 148.51]
  misc_feature (173)..(771): SWISSPROT Homolog: EC 1.16.1.7 Ferric-chelate reductase
MKLSVAFSLLAALHGVQFACAAMDSVVGKNGIVGFGIELWPDLCCASCADSLSALYLSCTTFPNGTTADSDMEKRDDMGMDGMEMDEMPSTSDDCRAANTPWLQSMAYCIQQNCKTDGLSATRQAKCFKDEAAMGAETPTFEDSLPTTAPTVELASDALWLNKTSLVNSELYWSTYGTYREFKKSENMHSQYSVSLIVLVLGFCLACGVVNQLTAAVPQIRKSAQSSWVYSKVQQYLLLPALVGSRHLRPMYFGYVPGRMLSIFITIYVILNVVFSSLQFSSHQPNIYFLSMGFEMCEYVGNRTGNLSLVNTAIAILFAGRNNLLIGLTGWNQNTFLTLHRWSARVATVQAIVHSIIYTMAYWEPGYEGAKKYAEQAAMPFYWWGIIATVAYALAASFSVLPIRMTYYDTFLLLHIGLAIVALVGCWYHLVPHFGFAYGYQTWLYIAFAFWSADRFARLVRLGYYNLRGSSSAIVKAVPGCDVFEVTVFPSVSWGFGPGQHSFLYTPHIGAGKFWESHPFSIARWTRAGTPLKVESRTESLSDSNEKGASVGVAPLSTVSSSASNTQNESRASVQFLLRGKGGMTSALRNHMSWYSYGESMEVSVLNEGPYGGHRATLQPFQLADTVLCIIGGIGITHALGFVQEFVSAKRGIKSRTMGNVQRFILAWSAKEAALIEYVKQEYLADCEGIEFLFYCTGEDDSENSKVDDIIEVKEGRMDIKSVMRSSLEPSHRALVLVCGPGSMADEARQEVVHCVRDGYKVDLVQEAFCW

SEQ ID NO: 11309 - DNA, 2923 bp, Muscodor strobelii
  misc_feature: SGI EST ID NO. CUFF.26834.0
  misc_feature: Variant of the nucleotide sequence at SEQ ID NO 11307
ctcagggcttttccgactcccatcgtcaaacccaggtcgtttccgcaatgggccactagtatagtcgcatccgccgctgtgggacatcatgttttatcactcgcggtatcgatgaacatgcgataggaagccaacataatcaggttgcagacgcatactccgtttaggattggggttctagatccatgccacatcatacatgagaaggtttctgattgtgactcgtgagtgttggacttgttcgtggaatccgcttcgatgacgaatcagaaataatactttgccccagtcccatcccgtcgaccatcccacgcatattacaagtatgcacttggaagccagttgattaattccacgatctccaagcattgttgtgtcttttaatctacatacgacgtcacaaccaggttcatagcactcgacattatattgactggccaatactaccacccaattttgtctacagcaaaaggtgtatatcgccacccaacacgggtagggtgctcaccatgaagctctcggtcgctttctcgctcctcgccgcccttcatggcgtccagtttgcttgcgcggcaatggacagtgttgttggcaagaatggtattgttggattcggaatcgaattatggcccgacttatgttgcgcctcatgcgccgactcactatccgccctctatttaagctgcacgactttcccaaatggcactacagctgattcagatatggagaaaagggacgatatgggcatggacggcatggaaatggacgagatgccatcgaccagcgatgattgtcgagcagctaatacaccatggctgcagtctatggcctattgcatccagcaaaactgcaagactgatgggctttcagcaacgaggcaagcgaaatgcttcaaagacgaagcggctatgggagccgaaacgccaacattcgaagacagcctacctacaacggctcctacggtcgagttagcctcggatgctctttggttgaacaagacaagcctggtcaacagtgaactctactggtccacttatggcacctatagggaattcaagaagtctgaaaatatgcacagtcaatattctgtcagccttatcgttctcgttcttggtttctgcctcgcatgcggtgtagtgaaccaactcacggccgcagttcctcagattcgcaagtctgcgcagtcgtcctgggtctactcaaaagttcaacaatacttgctcctcccagcactcgttggctctcggcatctgcgcccgatgtatttcggctatgtgcctggtcgcatgctcagcatcttcatcacgatttacgtaatcctcaacgtcgtattttcctcgttacaattcagcagccaccagccaaatatttacttcttgtccatggggttcgagatgtgcgaatatgtcgggaaccgaacgggaaacctcagtcttgtcaacactgcgatcgccattctcttcgcaggtcgaaacaatttgcttataggcctgacggggtggaaccagaacactttcttgacactacataggtggagtgcaagagtggcgacggtccaagctatcgtacactcgatcatttataccatggcctactgggagcccggctatgaaggggccaagaaatacgcagagcaggctgcaatgccattttattggtggggaatcatcgctaccgtcgcgtatgccttggcggcctcattctcagtcttgcccatccgcatgacttattacgacacatttttgcttctgcatataggtctcgctatcgtggctttagtcggatgctggtaccaccttgttcctcatttcggtttcgcatatggttatcagacgtggctatacattgctttcgccttctggtctgcagaccgttttgctagacttgttcgtttgggttactacaacctccgaggctcgtcctctgccattgtgaaagcagttcccggctgtgacgttttcgaagtcacggtcttcccaagcgtcagctggggatttggaccagggcagcacagttttctctacacgcctcatattggagcgggtaaattctgggaaagccatcccttcagtattgccagatggacgcgcgcaggaacacctctgaaagtcgagtctagaaccgagtcactttccgacagcaacgaaaaaggcgcttccgtgggagtcgccccactgtctacagtctcatcttctgcgtcaaacactcagaacgaaagtcgcgcaagcgttcagtttttgcttcgaggcaagggtgggatgacatcagcgttgcggaatcacatgtcttggtactcgtatggcgagagcatggaagtctcagtgctcaacgaaggcccatacggcggccaccgtgcgactctccaacccttccaactagccgacactgttctgtgcattattggtggtattggtattacacacgctttgggctttgtgcaagaattcgtcagcgcaaagcgagggatcaagtctcgaactatgggaaatgtccagcgattcatccttgcctggtcagccaaggaggcggcactcatcgaatacgtcaagcaggaatatcttgccgattgcgagggcatcgaattcttgttttactgcacgggcgaggacgacagcgagaacagtaaagtggacgatataatagaagtgaaggagggaaggatggacatcaagtctgtcatgcgatcatctttagagccctctcacagggctctcgtgttggtatgcggccctggcagtatggcggatgaggcgagacaggaggttgtacattgcgtcagagatgggtataaggtcgacctagtgcaggaagccttttgttggtaatctctggtatatagatttttctcacgaattgaaattagcgttcaaacatcatacattttcgatatctgtaggctcttattggagctatcatagccgcg

SEQ ID NO: 11310 - DNA, 537 bp, Muscodor strobelii
  misc_feature: SGI cDNA ID NO. 563627
  misc_feature: Encodes the peptide sequence at SEQ ID NO 11311
atgctacctatagtgaagcgtcatggagacgacatggacagcagctctatgtcgggatctatggacgacgacatgatgatggcgtcagagatgtccatgacattcttcaaaagcttcaccacacccttatggtccaatgcttggacgcccaacagcgagggcgcatacgtcgcaacctgcatcttcttgatattgctcgcaacaatgcaccggtttctcatcttgctacgcaccattatctttgaccgcaacgtcaatctcatttccaacagacacatacaagacgacaaagagtctctgatgtcccaacgggctcggccgccacacatgggagacataagacggcagctacgagaagcgtcccttcgacatccgttcaacttctctcgggaggctggtcggtctttcctggaagttattatcagtggtgtaggctatttgctcatgttggcagtcatgacgttgaacgtgggatactttttgtccgtcttggctggagtattcctcggtacattcatctccggtcgaatcgcatga

SEQ ID NO: 11311 - protein, 178 aa, Muscodor strobelii
  misc_feature: SGI Peptide ID NO. 563627
  misc_feature (31)..(177): Pfam Id: PF04145 Pfam Desc: Ctr copper transporter family
  misc_feature (33)..(176): NCBI GI: 256723927 Blast Desc: NECHADRAFT_37128 [Nectria haematococca mpVI 77-13-4]
  misc_feature (8)..(176): NCBI GI: 189198748 Blast Desc: low affinity copper transporter [Pyrenophora tritici-repentis Pt-1C-BFP] gi|187982810|gb|EDU48298.1| low affinity copper transporter [Pyrenophora tritici-repentis
  misc_feature (8)..(178): NCBI GI: 261353244 Blast Desc: low affinity copper transporter [Verticillium albo-atrum VaMs.102]
  misc_feature (8)..(176): NCBI GI: 154277472 Blast Desc: [Ajellomyces capsulatus NAm1] gi|150413162|gb|EDN08545.1| [Ajellomyces capsulatus NAm1]
  misc_feature (8)..(176): NCBI GI: 94483236 Blast Desc: low affinity copper transporter [Ajellomyces capsulatus]
  misc_feature (8)..(176): NCBI GI: 225561106 Blast Desc: copper transporter [Ajellomyces capsulatus G186AR]
  misc_feature (31)..(176): NCBI GI: 46128639 Blast Desc: FG08697.1 [Gibberella zeae PH-1]
  misc_feature (31)..(176): NCBI GI: 256734088 Blast Desc: NECHADRAFT_91955 [Nectria haematococca mpVI 77-13-4]
  misc_feature (32)..(176): NCBI GI: 242809173 Blast Desc: Ctr copper transporter, [Talaromyces stipitatus ATCC 10500] gi|218715939|gb|EED15361.1| Ctr copper transporter, [Talaromyces stipitatus ATCC 10500]
  misc_feature (7)..(176): NCBI GI: 261189195 Blast Desc: copper transporter [Ajellomyces dermatitidis SLH14081] gi|239591794|gb|EEQ74375.1| copper transporter [Ajellomyces dermatitidis SLH14081] gi|239614712|gb|EEQ91699.1| copper ER-3]
MLPIVKRHGDDMDSSSMSGSMDDDMMMASEMSMTFFKSFTTPLWSNAWTPNSEGAYVATCIFLILLATMHRFLILLRTIIFDRNVNLISNRHIQDDKESLMSQRARPPHMGDIRRQLREASLRHPFNFSREAGRSFLEVIISGVGYLLMLAVMTLNVGYFLSVLAGVFLGTFISGRIA

SEQ ID NO: 11312 - DNA, 1314 bp, Muscodor strobelii
  misc_feature: SGI EST ID NO. CUFF.26839.0
  misc_feature: Variant of the nucleotide sequence at SEQ ID NO 11310
tttcacactgcagattccgacagggccaaggaaacattaacaaggggtgggggttccttcatgacgaataacacccccgaaccttcaggtatctgtagatgtgtttcgcaaacttgctcttacctcaataacattgttttcaaggttatctgcatgcgacttcaataaccttaattcgacttatgttccatcgactgtgaactggcaccaaatccattcaactctctacctacctaatccaacctcctggtttctcacatctacaaatttacaatacacaaacattcctgccttgcaacctaacaaccacgcgtcacaaaactcgatttcccgcaacgacagagaagcttacacaaaatgctacctatagtgaagcgtcatggagacgacatggacagcagctctatgtcgggatctatggacgacgacatgatgatggcgtcagagatgtccatgacattcttcaaaagcttcaccacacccttatggtccaatgcttggacgcccaacagcgagggcgcatacgtcgcaacctgcatcttcttgatattgctcgcaacaatgcaccggtttctcatcttgctacgcaccattatctttgaccgcaacgtcaatctcatttccaacagacacatacaagacgacaaagagtctctgatgtcccaacgggctcggccgccacacatgggagacataagacggcagctacgagaagcgtcccttcgacatccgttcaacttctctcgggaggctggtcggtctttcctggaagttattatcagtggtgtaggctatttgctcatgttggcagtcatgacgttgaacgtgggatactttttgtccgtcttggctggagtattcctcggtacattcatctccggtcgaatcgcatgatggggagttgcgaatttcatacgaggatcaatgctgggcgcactgcagatgcatcatgaacaaataaatgtgatatcgagctttggcacgagtattcatgcacacttggcttggaggttggattcaggacagcggagaactcttttttcaaaacgcgcgacgatgcagccaagactcgaagcataggcattagcattggcgttcggctcacgtagattccgtggtttataaggtatacaacatgcagatattctgatcactactcttggcaaacttagacagtgattggcgcgattggcagctcttgaaagctgatttggcttgtattgaataacgcatcgctgctacatctagtggcacttagcctacgctcagatcatcagcagctcgacttgcctcatcgcgacccttgcataatcg

SEQ ID NO: 11313 - DNA, 1470 bp, Muscodor strobelii
  misc_feature: SGI cDNA ID NO. 563628
  misc_feature: Encodes the peptide sequence at SEQ ID NO 11314
atgaagctcaccgcaacgctgacagtttatgctctcttggctcaagccaatgcggtcccaacagacagctgctccccgagtagtggactcgagatcaagacaactagtggcgaagtgcatggtttcatcaatcaaaccgcaccaaatgtacgccagtttctcggcgtgccctacgccgagccgcctgttgacaaactgagattcatgccgcctgtccgcaagcaagccgccggtactatcaacgccacggccttcgcgccctcctgcttacagcagagcagcgatgagaagacggtctacactgagcatatgcaacagtttctcatcaatggcggtcaggatgaggactgtctgtacctgaacgtgtgggcgcctttgaacccaaaggctgagaacttgcctgtcttcgtgtatatacccggcggtggctacacaagcggcggtgcggattcgctctataagataccggataagtggatcgagagaacgcagtcgcatatcttcgtcatcatgaactaccgtgtcaacgtcttcggcttccccagctcaggtgctcaaccacttaattcgggactcctagatcagcgcatggttgttgaatggacgcgcgacaatattgcggcttttgggggtgatccgagtcgtattgtgctcatgggacagtctgctggcggtggtagcgtacactattacagtcaggcgtacgtcgaagatcctataatttggggcttgatccccgaatccggcacattctcgagcagctcttcgcctccaagcccggaaaacttcagctcactcgcagaactcctcggctgcggaggacttgaggcggaagccgagttgagctgcatgcaaggcgtcgatgcgcagctgattgaggacacggtttcgaattcaagcgatctatctttcaggcctcttgctgatgatgtgacggcatttcccaatgccacagagagatacgagaagggtttagtggccaaaatcccgatgctcacgggctataacaacaacgagggcagcaactcatcaccttacaacgaagaaacaggaccgccaccggacgtcgtcgcagctggaaacgcacgcattacttgcaacacaatctctggagccaaggttcgtcaacaaaacggttatgtgacatatcagtatcagtatgaagggaacttctccaatgtgtcgcccctcccctggataggtgctacacacagcaccgagcttcctctcatcttcggaacacactacgaataccgagggaattcaactaaattcgaatgggaagtgagtgagatcatggaggcgttttgtctctcgtttgcctctgatacatcttcagaccccacagatgggaaaggtctgtcgtggccgaagtatgagccaaataccaacagcagcatggtgttcgcaagagagcccattgccgcgcagatcgttgatggaacagaactggaaagcatctgtaattag

SEQ ID NO: 11314 - protein, 489 aa, Muscodor strobelii
  misc_feature: SGI Peptide ID NO. 563628
  misc_feature (6)..(487): Pfam Id: PF00135 Pfam Desc: Carboxylesterase
  misc_feature (6)..(347): Pfam Id: PF00135 Pfam Desc: Carboxylesterase
  misc_feature (383)..(487): Pfam Id: PF00135 Pfam Desc: Carboxylesterase
  misc_feature (20)..(472): NCBI GI: 256734166 Blast Desc: NECHADRAFT_92078 [Nectria haematococca mpVI 77-13-4]
  misc_feature (28)..(488): NCBI GI: 154301528 Blast Desc: BC1G_10091 [Botryotinia fuckeliana B05.10] gi|150855753|gb|EDN30945.1| BC1G_10091 [Botryotinia fuckeliana B05.10]
  misc_feature (1)..(470): NCBI GI: 46114506 Blast Desc: FG03095.1 [Gibberella zeae PH-1]
  misc_feature (1)..(488): NCBI GI: 145237764 Blast Desc: An07g04470 [Aspergillus niger] gi|134076003|emb|CAK48197.1| protein product [Aspergillus niger]
  misc_feature (1)..(488): NCBI GI: 118135688 Blast Desc: chlorogenic acid esterase precursor [Aspergillus niger]
  misc_feature (30)..(489): NCBI GI: 189198429 Blast Desc: para-nitrobenzyl esterase [Pyrenophora tritici-repentis Pt-1C-BFP] gi|187981500|gb|EDU48126.1| para-nitrobenzyl esterase [Pyrenophora tritici-repentis
  misc_feature (32)..(459): NCBI GI: 145612811 Blast Desc: MGG_12436 [Magnaporthe grisea 70-15] gi|145019922|gb|EDK04150.1| MGG_12436 [Magnaporthe grisea 70-15]
  misc_feature (26)..(486): NCBI GI: 116179448 Blast Desc: CHGG_00352 [Chaetomium globosum CBS 148.51] gi|88184649|gb|EAQ92117.1| CHGG_00352 [Chaetomium globosum CBS 148.51]
  misc_feature (28)..(488): NCBI GI: 145253184 Blast Desc: An16g08070 [Aspergillus niger] gi|134083664|emb|CAK47056.1| protein product [Aspergillus niger]
  misc_feature (20)..(488): NCBI GI: 166344059 Blast Desc: triacylglycerol lipase FGL5 [Gibberella zeae]
MKLTATLTVYALLAQANAVPTDSCSPSSGLEIKTTSGEVHGFINQTAPNVRQFLGVPYAEPPVDKLRFMPPVRKQAAGTINATAFAPSCLQQSSDEKTVYTEHMQQFLINGGQDEDCLYLNVWAPLNPKAENLPVFVYIPGGGYTSGGADSLYKIPDKWIERTQSHIFVIMNYRVNVFGFPSSGAQPLNSGLLDQRMVVEWTRDNIAAFGGDPSRIVLMGQSAGGGSVHYYSQAYVEDPIIWGLIPESGTFSSSSSPPSPENFSSLAELLGCGGLEAEAELSCMQGVDAQLIEDTVSNSSDLSFRPLADDVTAFPNATERYEKGLVAKIPMLTGYNNNEGSNSSPYNEETGPPPDVVAAGNARITCNTISGAKVRQQNGYVTYQYQYEGNFSNVSPLPWIGATHSTELPLIFGTHYEYRGNSTKFEWEVSEIMEAFCLSFASDTSSDPTDGKGLSWPKYEPNTNSSMVFAREPIAAQIVDGTELESICN

SEQ ID NO: 11315 - DNA, 647 bp, Muscodor strobelii
  misc_feature: SGI EST ID NO. CUFF.26846.0
  misc_feature: Variant of the nucleotide sequence at SEQ ID NO 11313
cgtacactattacagtcaggcgtacgtcgaagatcctataatttggggcttgatccccgaatccggcacattctcgagcagctcttcgcctccaagcccggaaaacttcagctcactcgcagaactcctcggctgcggaggacttgaggcggaagccgagttgagctgcatgcaaggcgtcgatgcgcagctgattgaggacacggtttcgaattcaagcgatctatctttcaggcctcttgctgatgatgtgacggcatttcccaatgccacagagagatacgagaagggtttagtggccaaaatcgtatgttactctcaagaaacacggaacctggtcatgaatcacattatagatgctgacgagaactccagccgatgctcacgggctataacaacaacgagggcagcaactcatcaccttacaacgaagaaacaggaccgccaccggacgtcgtcgcagctggaaacgcacgcattacttgcaacacaatctctggagccaaggttcgtcaacaaaacggttatgtgacatatcagtatcagtatgaagggaacttctccaatgtgtcgcccctcccctggataggtgctacacacagcaccgagcttcctctcatcttcggaacacactacgaataccgagg

SEQ ID NO: 11316 - DNA, 345 bp, Muscodor strobelii
  misc_feature: SGI cDNA ID NO. 563629
  misc_feature: Elevated expression when VOC is produced
  misc_feature: Encodes the peptide sequence at SEQ ID NO 11317
atgcgcgctacaattctatctcttcttattgccgccggtctgtcatcagcacaggaatacctcgtgactgtcaacgttgaaacagcgacgaacaagaaatgcgcaccttacaaaaacttcacgctcacattcgaccaatcgacgccatactataataccggtggagatttggatcgtgttatcgggctatctcttgccggcgaaaaccaatccctttgcatcccttataatgcggatggtagcccaactatcaccacgaacgacaactattatttcggcttcggcgagtctatacacgtttcgtccccggtcaaggtcgattacatccaatgtggtctcgagtag

SEQ ID NO: 11317 - protein, 114 aa, Muscodor strobelii
  misc_feature: SGI Peptide ID NO. 563629
  misc_feature: Useful for introducing or modulating the production of volatile compounds
MRATILSLLIAAGLSSAQEYLVTVNVETATNKKCAPYKNFTLTFDQSTPYYNTGGDLDRVIGLSLAGENQSLCIPYNADGSPTITTNDNYYFGFGESIHVSSPVKVDYIQCGLE

SEQ ID NO: 11318 - DNA, 845 bp, Muscodor strobelii
  misc_feature: SGI EST ID NO. CUFF.26857.0
  misc_feature: Variant of the nucleotide sequence at SEQ ID NO 11316
gaaatttgttcagcaacagagaaatgaaccaactcgaattcttttccacattcagctacaagttgcccaagatgcgcgctacaattctatctcttcttattgccgccggtctgtcatcagcacaggaatacctcgtgactgtcaacgttgaaacagcgacgaacaagaaatgcgcaccttacaaaaacttcacgctcacattcgaccaatcgacgccatactataataccggtggagatttggatcgtgttatcgggctatctcttgccggcgaaaaccaatccctttgcatcccttataatgcggatggtagcccaactatcaccacgaacgacaactattatttcggcttcggcgagtctatacacgtttcgtccccggtcaaggtcgattacatccaatgtggtctcgagtagactaaaggaacgaattgagcgacacctagagagacgccgtcatacaattaattcggtcacgcctctattggactcttcccgtacttctcgtgtagaaatatcatggcgatagtaagaaatggtgtaggatatctcagtagacatgttgctatgttcgcacaacaataggtcatggctctcgcatcacggcagtgtgcggcttagttcctgctgttgcctgcatggctctgcccataatgccagataattagatgatcattcttacaaccactcaccgtggcatcaagttgcaactgtgatcgcaatttgtaacgcccaatttttcttgagctctgctcgtcaagtagcatttgtctatctttttctccaaataacatgaccgtcagtcaccgttgttgagttaaactcaaacattattgtacgttacgc

SEQ ID NO: 11319 - DNA, 1659 bp, Muscodor strobelii
  misc_feature: SGI cDNA ID NO. 563630
  misc_feature: Encodes the peptide sequence at SEQ ID NO 11320
atggctgctaccgacaaggcgtccaagtacacgtccatggacctgtcgggcagcgtgtttctcatatccgaggatgggagcatgctccgacttcctatccccagcaagtcttcacgagacccgctaggctggagccgcaggaaacggatcatggcctttgtttccttggtcaacttcttaatcgtaggactcgtcctggtgatggttcccgatctgcatctccaggcgatgatgagtgatgatgccctcaaggtgaggaagccctgggatgcgaacagtagcagctcgactaacagccactcccgaaagcagaccgcaccgtttgacctcatcgtggtagtgacagcgccgacgctgatgcttggtatcggtgcttttatttggctgccgctttctctagccatcggcaggcgacctgtcttcctcctgtgcaatatactgattacattcgcgaccatatgggcagcagcagctcccaacttctaccaacttctcgcagctatatgcattcagggattcgcggcagggagcgtcatgagcgtcatgttatgtataatcatcgacatgacatatattcaccagcgtccgcaagccatcgccatgttctggtgcgggggcggcgcagtaactgtcctaatcttgtcggccgtcccatggattacagaagtgacaaagaggtggcaacctttttattgggtatggagcatcccctgccttgtgtcggttgtcacggcgttcctgttcttccccgagaccttctatgtccgcccgccagtcgcgtacgatggacgaattttggcccagagcggcactgagaaagtgcaactttacgacgactgggaagaaacgccgggtggcaaaggactcccagacctaccagtaggctcaagtttcgagcgggttttcgagcgactggctatttggagagggggtaccggcgagtggaagtcgatgatggcctgctacccccagattttcatgtgcctggcaaatcccttggtcttctgggtggtgctcctcaatgctgtcaacttcgccggtatgatgtcgctctcaaccacgtggcccactctcctacgcgctgaaccgtacaacctccctagttgggccgtcggactcgtcaatctcgccgcctttttcgggaatctcctggcgtggcccgcatcgggtattctaatccaaaagatcacccgtcgtttaacgagacgcaacggaggtgtgcggcacgccgaatactatctgcccgctttcgttctccccatcatcgcgggcgccgcgagttgcgtggtgtacgggattgtggctgagcacaagctgcactggattctagtatacgtttcatactttctgaactcgttcagctactccgcttctggcgttgccaacacgctctgggtgacggaagcttttccccgttgggcggctcccgccttgatcgtcgttggaggagtcagctatatcatcagcttctcgatgagcttcgttattccgcagtggttggcttcgcaagggtacttctggatgaatctggagattgcgatgctgatgattgtcgttggctttgttggcgttccagtcgcgttctggggcaagagtgttcggcaattcatccacggtcgctggggtacgtttgaagctggggcactcaggcctcagtag

SEQ ID NO: 11320 - protein, 552 aa, Muscodor strobelii
  misc_feature: SGI Peptide ID NO. 563630
  misc_feature (51)..(497): Pfam Id: PF07690 Pfam Desc: Major Facilitator Superfamily
  misc_feature (8)..(552): NCBI GI: 256722750 Blast Desc: NECHADRAFT_97551 [Nectria haematococca mpVI 77-13-4]
  misc_feature (3)..(552): NCBI GI: 46109870 Blast Desc: FG01817.1 [Gibberella zeae PH-1]
  misc_feature (164)..(551): NCBI GI: 189206970 Blast Desc: conserved [Pyrenophora tritici-repentis Pt-1C-BFP] gi|187975912|gb|EDU42538.1| conserved [Pyrenophora tritici-repentis Pt-1C-BFP]
  misc_feature (14)..(552): NCBI GI: 261359393 Blast Desc: conserved [Verticillium albo-atrum VaMs.102]
  misc_feature (160)..(551): NCBI GI: 169622489 Blast Desc: SNOG_14469 [Phaeosphaeria nodorum SN15] gi|160704786|gb|EAT78009.2| SNOG_14469 [Phaeosphaeria nodorum SN15]
  misc_feature (130)..(552): NCBI GI: 145604527 Blast Desc: MGG_07764 [Magnaporthe grisea 70-15] gi|145012533|gb|EDJ97187.1| MGG_07764 [Magnaporthe grisea 70-15]
  misc_feature (118)..(455): NCBI GI: 261360215 Blast Desc: conserved [Verticillium albo-atrum VaMs.102]
  misc_feature (298)..(552): NCBI GI: 145606697 Blast Desc: MGG_09401 [Magnaporthe grisea 70-15] gi|145014366|gb|EDJ98934.1| MGG_09401 [Magnaporthe grisea 70-15]
  misc_feature (1)..(286): NCBI GI: 145606697 Blast Desc: MGG_09401 [Magnaporthe grisea 70-15] gi|145014366|gb|EDJ98934.1| MGG_09401 [Magnaporthe grisea 70-15]
  misc_feature (109)..(541): NCBI GI: 212539376 Blast Desc: conserved [Penicillium marneffei ATCC 18224] gi|210067142|gb|EEA21234.1| conserved [Penicillium marneffei ATCC 18224]
MAATDKASKYTSMDLSGSVFLISEDGSMLRLPIPSKSSRDPLGWSRRKRIMAFVSLVNFLIVGLVLVMVPDLHLQAMMSDDALKVRKPWDANSSSSTNSHSRKQTAPFDLIVVVTAPTLMLGIGAFIWLPLSLAIGRRPVFLLCNILITFATIWAAAAPNFYQLLAAICIQGFAAGSVMSVMLCIIIDMTYIHQRPQAIAMFWCGGGAVTVLILSAVPWITEVTKRWQPFYWVWSIPCLVSVVTAFLFFPETFYVRPPVAYDGRILAQSGTEKVQLYDDWEETPGGKGLPDLPVGSSFERVFERLAIWRGGTGEWKSMMACYPQIFMCLANPLVFWVVLLNAVNFAGMMSLSTTWPTLLRAEPYNLPSWAVGLVNLAAFFGNLLAWPASGILIQKITRRLTRRNGGVRHAEYYLPAFVLPIIAGAASCVVYGIVAEHKLHWILVYVSYFLNSFSYSASGVANTLWVTEAFPRWAAPALIVVGGVSYIISFSMSFVIPQWLASQGYFWMNLEIAMLMIVVGFVGVPVAFWGKSVRQFIHGRWGTFEAGALRPQ

SEQ ID NO: 11321 - DNA, 3161 bp, Muscodor strobelii
  misc_feature: SGI EST ID NO. CUFF.26864.0
  misc_feature: Variant of the nucleotide sequence at SEQ ID NO 11319
ttgctctcgacatgacccgtccttatcgctctgtatatatgcactcaaggcgaagcaaagtacgactcgatatgataaaacgcgaccagcttcgaagattaagcccttataaaatccctgaagtttttacctcaggccacgcgttaacccactagtaacaggcgagtcggcgagcactacatcggcataatactctggggatactgtacgtataaagtgctgtattatgtctcccctgtaattaggagactagttcccgtgatgctgcccgtctagtcgggataggccgtcgacttacaaccaatcaaaaaccagcacaatgctcgatcaccgcccatgtcaggtaccgaacgcaccccaatccaggtgtgaccccccttgaaacatttgcacgtgcagagcagagtacgtagcatctcgaaatcgctctggaagcacggaagctcgactgtcattcgatgcacgacacatcaggacgagccaaacaggtatttgatggtgaggcaccgaactgatggccaccaaagtcccactagtgcgtcggccagccaatcggccgattcgctcgattcggcattcaaaggttatgatgactgggacgaattattttgcagactcactatgtaggtacagaaaccctctcccctccccagaacttgtcccaatgaggcgttaaaacactcaaagggcctcgcaatcacaaagccagaccggctacaccttgcttcgacgttatggcattgctaggtgtgctcccaagtgcccaagcctccaagcaccagctcgagtcatgctaccccagttgcccagcaatacctttaaggatcttcgcaacactcgggtgaaccgcagaaacctggggggagcatttccactgcatgaatgatacacagcatgcagtacgaaaccccgaaccttggagagcgaccaatcagaagctggacctcaaatcgggcctcaaatccgtgggagattgcaaaacagatctattctcggaaggctagatgctgctaccccatactatcaagatgtcacatcgacgccaactgagctagccatgatagaattaatacggaacggtcccggaagatgcggaaacttcgtattcgagtgtccatcggtatatatgaatccaccctgttcgtagtacattgcgagttgaacgtcatttctgtcgtcttctcatccctttccttttcctctaacattcttacaatcacccagcaggccttgtcccgtacggcacaatggctgctaccgacaaggcgtccaagtacacgtccatggacctgtcgggcagcgtgtttctcatatccgaggatgggagcatgctccgacttcctatccccagcaagtcttcacgagacccgctaggctggagccgcaggaaacggatcatggcctttgtttccttggtcaacttcttaatcgtaggactcgtcctggtgatggttcccgatctgcatctccaggcgatgatgagtgatgatgccctcaagaccgcaccgtttgacctcatcgtggtagtgacagcgccgacgctgatgcttggtatcggtgcttttatttggctgccgctttctctagccatcggcaggcgacctgtcttcctcctgtgcaatatactgattacattcgcgaccatatgggcagcagcagctcccaacttctaccaacttctcgcagctatatgcattcagggattcgcggcagggagcgtcatgagcgtcatgttatgtataatcatcgacatgacatatattcaccagcgtccgcaagccatcgccatgttctggtgcgggggcggcgcagtaactgtcctaatcttgtcggccgtcccatggattacagaagtgacaaagaggtggcaacctttttattgggtatggagcatcccctgccttgtgtcggttgtcacggcgttcctgttcttccccgagaccttctatgtccgcccgccagtcgcgtacgatggacgaattttggcccagagcggcactgagaaagtgcaactttacgacgactgggaagaaacgccgggtggcaaaggactcccagacctaccagtaggctcaagtttcgagcgggttttcgagcgactggctatttggagagggggtaccggcgagtggaagtcgatgatggcctgctacccccagattttcatgtgcctggcaaatcccttggtcttctgggtggtgctcctcaatgctgtcaacttcgccggtatgatgtcgctctcaaccacgtggcccactctcctacgcgctgaaccgtacaacctccctagttgggccgtcggactcgtcaatctcgccgcctttttcgggaatctcctggcgtggcccgcatcgggtattctaatccaaaagatcacccgtcgtttaacgagacgcaacggaggtgtgcggcacgccgaatactatctgcccgctttcgttctccccatcatcgcgggcgccgcgagttgcgtggtgtacgggattgtggctgagcacaagctgcactggattctagtatacgtttcatactttctgaactcgttcagctactccgcttctggcgttgccaacacgctctgggtgacggaagcttttccccgttgggcggctcccgccttgatcgtcgttggaggagtcagctatatcatcagcttctcgatgagcttcgttattccgcagtggttggcttcgcaagggtacttctggatgaatctggagattgcgatgctgatgattgtcgttggctttgttggcgttccagtcgcgttctggggcaagagtgttcggcaattcatccacggtcgctggggtacgtttgaagctggggcactcaggcctcagtagaagagatagatgtttgacgatgcgaaatttggagttcgggggacatcggaaaactattctgctcagagtacgggtaagcggtaacagtggacatccggccaggctcactcttttatgtctaagaggaaaattggagggatttgggcgtctacttagggcaaggattgggcttttcatgtcattcgttcaggaaacttcccgtgtggaagaggagttcagtacggcctctattaggctaaatgtcacgtgacaaccatttcgaggactcatgttcaacctccatttccacatcatagcaacaatttacttccagct

SEQ ID NO: 11322 - DNA, 1500 bp, Muscodor strobelii
  misc_feature: SGI cDNA ID NO. 563631
  misc_feature: Encodes the peptide sequence at SEQ ID NO 11323
atgccgaagcacaagagcacaacccacgtgcatgacaacagcctagcaggaaacaaaatgtcagagtcagatacgaatatgacagacgttgagaaaacgatagagaagtccaacaacaactcacctgaatggaactgggaatcagacgcggacaacccatataactggccaaaatggaagaagaacttcgcattactatcctcagccgtggtggcgtttgctggatctgtcgggtcatcgatcatcagcccggcccatcaggcactcgtcgacgagtttggagtttcgagcgtcgtggcttttctaccgttgaccacgtacgtgcttgctcttggcctgggaccggttgtcggagggccactttccgagatggcagggcgacgagtagttttcttcatggcggcacttctaggagggctattttctatcggcgccgggttcacgacgtctttcgcggggctgtgcgttttgcgctttcttgccggcttcttctacggaccaacattggcgatcggcagcgggtttctggcggagacatatacacctgaagagagaggcgtgccttctctgttatggatcctgagtccattcacggggccaggtttcggtccagtgttaggtgtctttcttgttagccgtatgaactggcgatggacccaatataccttggcactcttctcggccgtcagtctactcttgatcgtttttacgaaagaaacctatcatcccatcatcattcgccatcgcatgaagaagttagggatggaagtgccgcctaaagagcccatctcgaacactctgaagaagttcgcgaccgtcgggctactacgtccccttcatatgatgaccaccgagcttattgtcagcttgctttgcatctacgtcgcatttatgtttggcgtactattcagcttcttcggatcattcttttacgtgtttgggggcgtgtacggcttcacactggaccaaagtggtctggtgttcctggccatcgcggttggctgttttgtaggtgcaggcgtcattgcagtctgtgatcggctattttacctcccccaagtacgacgccatccgccacatcaagttcctcctgagtatcgtttgctgcctgccatgattggtagcgtactgcttcctgctagcattttctggtttgcctggactgcaaagcctggtatcaaccccgcgtccccaatcgccgccatattcgttttcggtgtcggaaatatttgtctgttcatcagtgccctccagtatcagggtgacgtataccatcggacaaatatcgccagcgccgcgagtgcaaacagtctctgtcgttacgttcttggagctgtgttccctctattcactcttcagctgtataagaacctgacaattccttgggcttccagtcttcttggattcattgctattggtctccttccctcgccgtggttactgttcagatttggcaagcatattcgagctagatcccgatacgagacggcatcatactaa

SEQ ID NO: 11323 - protein, 499 aa, Muscodor strobelii
  misc_feature: SGI Peptide ID NO. 563631
  misc_feature (68)..(448): Pfam Id: PF07690 Pfam Desc: Major Facilitator Superfamily
  misc_feature (27)..(497): NCBI GI: 261352934 Blast Desc: polyamine transporter 2 [Verticillium albo-atrum VaMs.102]
  misc_feature (4)..(499): NCBI GI: 256720900 Blast Desc: [Nectria haematococca mpVI 77-13-4]
  misc_feature (11)..(499): NCBI GI: 46137801 Blast Desc: FG10416.1 [Gibberella zeae PH-1]
  misc_feature (17)..(496): NCBI GI: 242766458 Blast Desc: bicyclomycin resistance protein, [Talaromyces stipitatus ATCC 10500] gi|218724370|gb|EED23787.1| bicyclomycin resistance protein, [Talaromyces stipitatus ATCC 10500]
  misc_feature (31)..(493): NCBI GI: 242797769 Blast Desc: conserved [Talaromyces stipitatus ATCC 10500] gi|218716375|gb|EED15796.1| conserved [Talaromyces stipitatus ATCC 10500]
  misc_feature (20)..(494): NCBI GI: 169776732 Blast Desc: [Aspergillus oryzae RIB40] gi|83771568|dbj|BAE61699.1| protein product [Aspergillus oryzae]
  misc_feature (38)..(496): NCBI GI: 258568294 Blast Desc: [Uncinocarpus reesii 1704] gi|237906337|gb|EEP80738.1| [Uncinocarpus reesii 1704]
  misc_feature (29)..(492): NCBI GI: 67904012 Blast Desc: AN8993.2 [Aspergillus nidulans FGSC A4] gi|40745169|gb|EAA64325.1| AN8993.2 [Aspergillus nidulans FGSC A4] gi|259486557|tpe|CBF84500.1| TPA: conserved [Aspergillus FGSC
  misc_feature (3)..(494): NCBI GI: 156838564 Blast Desc: Kpol_413p2 [Vanderwaltozyma polyspora DSM 70294] gi|156113570|gb|EDO15127.1| Kpol_413p2 [Vanderwaltozyma polyspora DSM 70294]
  misc_feature (3)..(495): NCBI GI: 189198043 Blast Desc: benomyl/methotrexate resistance protein [Pyrenophora tritici-repentis Pt-1C-BFP] gi|187981307|gb|EDU47933.1| benomyl/methotrexate resistance protein [Pyrenophora Pt-1C-BFP]
MPKHKSTTHVHDNSLAGNKMSESDTNMTDVEKTIEKSNNNSPEWNWESDADNPYNWPKWKKNFALLSSAVVAFAGSVGSSIISPAHQALVDEFGVSSVVAFLPLTTYVLALGLGPVVGGPLSEMAGRRVVFFMAALLGGLFSIGAGFTTSFAGLCVLRFLAGFFYGPTLAIGSGFLAETYTPEERGVPSLLWILSPFTGPGFGPVLGVFLVSRMNWRWTQYTLALFSAVSLLLIVFTKETYHPIIIRHRMKKLGMEVPPKEPISNTLKKFATVGLLRPLHMMTTELIVSLLCIYVAFMFGVLFSFFGSFFYVFGGVYGFTLDQSGLVFLAIAVGCFVGAGVIAVCDRLFYLPQVRRHPPHQVPPEYRLLPAMIGSVLLPASIFWFAWTAKPGINPASPIAAIFVFGVGNICLFISALQYQGDVYHRTNIASAASANSLCRYVLGAVFPLFTLQLYKNLTIPWASSLLGFIAIGLLPSPWLLFRFGKHIRARSRYETASY

SEQ ID NO: 11324 - DNA, 1462 bp, Muscodor strobelii
  misc_feature: SGI EST ID NO. CUFF.26869.0
  misc_feature: Variant of the nucleotide sequence at SEQ ID NO 11322
cgtttgctggatctgtcgggtcatcgatcatcagcccggcccatcaggcactcgtcgacgagtttggagtttcgagcgtcgtggcttttctaccgttgaccacgtacgtgcttgctcttggcctgggaccggttgtcggagggccactttccgagatggcagggcgacgagtagttttcttcatggcggcacttctaggagggctattttctatcggcgccgggttcacgacgtctttcgcggggctgtgcgttttgcgctttcttgccggcttcttctacggaccaacattggcgatcggcagcgggtttctggcggagacatatacacctgaagagagaggcgtgccttctctgttatggatcctgagtccattcacggggccaggtttcggtccagtgttaggtgtctttcttgttagccgtatgaactggcgatggacccaatataccttggcactcttctcggccgtcagtctactcttgatcgtttttacgaaagaaacctatcatcccatcatcattcgccatcgcatgaagaagttagggatggaagtgccgcctaaagagcccatctcgaacactctgaagaagttcgcgaccgtcgggctactacgtccccttcatatgatgaccaccgagcttattgtcagcttgctttgcatctacgtcgcatttatgtttggcgtactattcagcttcttcggatcattcttttacgtgtttgggggcgtgtacggcttcacactggaccaaagtggtctggtgttcctggccatcgcggttggctgttttgtaggtgcaggcgtcattgcagtctgtgatcggctattttacctcccccaagtacgacgccatccgccacatcaagttcctcctgagtatcgtttgctgcctgccatgattggtagcgtactgcttcctgctagcattttctggtttgcctggactgcaaagcctggtatcaaccccgcgtccccaatcgccgccatattcgttttcggtgtcggaaatatttgtctgttcatcagtgccctccagtatcagggtgacgtataccatcggacaaatatcgccagcgccgcgagtgcaaacagtctctgtcgttacgttcttggagctgtgttccctctattcactcttcagctcttcttggattcattgctattggtctccttccctcgccgtggttactgttcagatttggcaagcatattcgagctagatcccgatacgagacggcatcatactaaaacattgttcccttgcgcttctcagtactcttttagtgcgatatatacacaagccttggcgcatgtaaatccatcccaaagacgattttcagttggttacggcaatttcattggtctatcgccacgtccacctatttgcacgacgaagtcaaaggctgcgggcttgctcactcgcgcaacacctagactcgttgctgagcatcgttcaaa

SEQ ID NO: 11325 - DNA, 2004 bp, Muscodor strobelii
  misc_feature: SGI cDNA ID NO. 563632
  misc_feature: Encodes the peptide sequence at SEQ ID NO 11326
atgaactcgtcgaacttcacctttaacttcggtagcaataatgcgcagcctgcgttccatgggaagcctgctcttgacaatgtcctctgccaattctgcgaagacatggtcaagcaatccaagatcattcaccaggcaccaaaatgggaacatccgccatccgacgacgactacgcggaggtaatgataatagaagagccccaatatactcacgagtcgcctccgaaagtggaaatatttgctcattataacaccattggagctctcaaaacttcagcccggcagtgccatctgtgtgctttgttaagcgcatacgatccggggttcccagaacttgtcgaagaagcttctaataacatccgctacactatgaaggtgctgcgcgccgacttgcacgctgatgggccgggtttgctgaaggtagatatgaggagagggaaagagactggcgcaacctacctcatgaacgggcggccaagaaagactacgcagacgacgcttgttgccgggcggactgatgatttcaaggtactgagtcttgccaaggaatggctgaataagtgtataaacgaacatgatgaatgcaaccgccgctcgcatccgaccgccgattggcacctcccgacgcgactggtgaaggtgtcggggttcatgacgaatgtgttctcgatgcggctgtgcctgggaaaagaccttccggcaggcacgaaatacttaacgctaagtcattgttggggcggcgcggatattctcaagttaacagcagaaaacctgcagtcattccagtctgacatcccgcttcgagacatgccacgcaatttcagagatgctgcagctgtcacgctcttcatggggtatgaatacttgtggattgactctctttgtatcatccaaggatccgtccaggactgggatcgcgaggcggcattgatgggaaacgtgtatcggtattgcgtgttgagcatcgccgcagttgctgcgacgaacccgcacgatggattcttcatagaaagaaactcacaatcattcaccaaatgccagctcatccccaccgtacgaggtcgaggtggtctatatgccgaaaactggcgcgatagagcgggcaaagagatcctcaattcccgaggatgggtctgccaagagagagcgctttcaccgcgcactttgtacttcaggtccatgatgctagactggaagtgtacgatggcgtctgcgcaggagacagatgcggacttctcaacgtggtcgcagactgcaggcattaagcgagacttctacgagcttcttgacaaagcgaagaacgacgactacgataaatggttcgccaaatggtggaagattatcttcgaatacacgaaatgcaatttgacctttgactcggacaggtggccagcgatcatgggtcttgcgactgcagtcgagcaacaatctggcaatcggctgattcatggactgtgggaagtgagtctggcctcggagctgatgtggagagcttctagcccgtcaaaaggaaaacgacttggtaatggctctccgtcatggtcgtggctgagtttaacttcgccggtgtccaagatgggctacaatctcaagggatatttcgacatggacgcttctgtggctctgcaaacacaccctccggacgataagaagctctttgtacgaggacggatggcgaagattaagtggacagtcaagtatcacggcgacggagaaatcgaatattgctaccgctttctggcgcccacgagagatacaaacgggaagtgggatggacgttgggatccggatacaagcccgaacgaaacttgggatatttggtgtctggaattcatcactgacgccaaactcaaggaagcggctgggcttgtcgtcaaaagagaggagaaagacacaggcgacgtgtggactagagtgggcgcatatgccctccagccgtacgctagtggtggcgatgatcccgcttgggatctcttgagaaccaatacaatcacgatagaatga

SEQ ID NO: 11326 - protein, 667 aa, Muscodor strobelii
  misc_feature: SGI Peptide ID NO. 563632
  misc_feature (238)..(381): Pfam Id: PF06985 Pfam Desc: Heterokaryon incompatibility protein (HET)
  misc_feature (178)..(591): NCBI GI: 256732396 Blast Desc: NECHADRAFT_80919 [Nectria haematococca mpVI 77-13-4]
  misc_feature (185)..(530): NCBI GI: 256731921 Blast Desc: NECHADRAFT_3490 [Nectria haematococca mpVI 77-13-4]
  misc_feature (176)..(644): NCBI GI: 154316024 Blast Desc: BC1G_04584 [Botryotinia fuckeliana B05.10] gi|150846980|gb|EDN22173.1| BC1G_04584 [Botryotinia fuckeliana B05.10]
  misc_feature (186)..(541): NCBI GI: 169623263 Blast Desc: SNOG_14868 [Phaeosphaeria nodorum SN15] gi|111056600|gb|EAT77720.1| SNOG_14868 [Phaeosphaeria nodorum SN15]
  misc_feature (182)..(567): NCBI GI: 169613657 Blast Desc: SNOG_09961 [Phaeosphaeria nodorum SN15] gi|111061176|gb|EAT82296.1| SNOG_09961 [Phaeosphaeria nodorum SN15]
  misc_feature (80)..(523): NCBI GI: 256720306 Blast Desc: NECHADRAFT_89173 [Nectria haematococca mpVI 77-13-4]
  misc_feature (162)..(519): NCBI GI: 154291024 Blast Desc: BC1G_15400 [Botryotinia fuckeliana B05.10] gi|150847129|gb|EDN22322.1| BC1G_15400 [Botryotinia fuckeliana B05.10]
  misc_feature (168)..(522): NCBI GI: 256721365 Blast Desc: NECHADRAFT_82410 [Nectria haematococca mpVI 77-13-4]
  misc_feature (167)..(530): NCBI GI: 238502093 Blast Desc: conserved [Aspergillus flavus NRRL3357] gi|220691090|gb|EED47438.1| conserved [Aspergillus flavus NRRL3357]
  misc_feature (176)..(526): NCBI GI: 256723898 Blast Desc: NECHADRAFT_78374 [Nectria haematococca mpVI 77-13-4]
MNSSNFTFNFGSNNAQPAFHGKPALDNVLCQFCEDMVKQSKIIHQAPKWEHPPSDDDYAEVMIIEEPQYTHESPPKVEIFAHYNTIGALKTSARQCHLCALLSAYDPGFPELVEEASNNIRYTMKVLRADLHADGPGLLKVDMRRGKETGATYLMNGRPRKTTQTTLVAGRTDDFKVLSLAKEWLNKCINEHDECNRRSHPTADWHLPTRLVKVSGFMTNVFSMRLCLGKDLPAGTKYLTLSHCWGGADILKLTAENLQSFQSDIPLRDMPRNFRDAAAVTLFMGYEYLWIDSLCIIQGSVQDWDREAALMGNVYRYCVLSIAAVAATNPHDGFFIERNSQSFTKCQLIPTVRGRGGLYAENWRDRAGKEILNSRGWVCQERALSPRTLYFRSMMLDWKCTMASAQETDADFSTWSQTAGIKRDFYELLDKAKNDDYDKWFAKWWKIIFEYTKCNLTFDSDRWPAIMGLATAVEQQSGNRLIHGLWEVSLASELMWRASSPSKGKRLGNGSPSWSWLSLTSPVSKMGYNLKGYFDMDASVALQTHPPDDKKLFVRGRMAKIKWTVKYHGDGEIEYCYRFLAPTRDTNGKWDGRWDPDTSPNETWDIWCLEFITDAKLKEAAGLVVKREEKDTGDVWTRVGAYALQPYASGGDDPAWDLLRTNTITIE

SEQ ID NO: 11327 - DNA, 3805 bp, Muscodor strobelii
  misc_feature: SGI EST ID NO. CUFF.26882.0
  misc_feature: Variant of the nucleotide sequence at SEQ ID NO 11325
agcgccgctctggattttcgctgccgctcctattttgaagcttgtaggcggcggatcgcatttaactgcttttcttgctgtgtcgctactcagacaacaatattctggcagcttgcgtgctgctctgatttatgccaccggtgcaatcagtatcctttctcaaaccgtggcatccattgttacaccgctactagcaagctacgacccgagcttgccgttcactgtttcaatcgtgtgttgtgtccttgcgtacgctgtaatgtgtgcttacggaaactctcatgggtgggacacagaccgagtctgggaagatggtggcttagcggagccactcctgtcggatccttcggaatctcacgaagttcggtccctaagatcaacagctcggtcaacacgctctgatggcggagataatgggagtaggccttcaagtactagaagcgtgacgacgttgattggctgggtatttttcatacctgccatcgccaaggcgacgcgccccttatttctcacttatattcagcatcgagttggagtggcaccatcattagtaaggatctacgaagttgcgtttcattcgattcacgtctaacgacaggtcagggagataagctatggtctatccggacaatcatgtcactggccatatttgccgtcactcttcctttgatagtagcttcactgcccgtttggtcgtcaatattgcctcaagatgtgacgttaaccgcagccaagattggcatcatccttctagcaattggtgcgctgttgattggggtagctcaatcgaagccagtactttatgcaggtctcgtgataaatacaatgggtgtagccactgacctgtcattattatcgtacgcagcagatgacatagcagagaatcatgctagcgaattcttcatgaaaactgccatttgcgaaaccgtcggcacgctagttggaatcgaatacttgtacccgctctatcaatatttcatcgatgataagacgctggctggcggcattccttattatttttgcactgttcttttcactatctctggaacgatcatatggagcatggggccatgattctaggccgtcaaatccgcataaatgttgctagattcagggagacagacgtgtgttcggaatagacacggctggaaactgatactcagtaccacatctgataaaggtaatcaagggagccagaattgaacaggcgttgcgtatcgctagactaagcggcaaaatgtgcttgccagcttcacgccagggttcatgtctgttgatgaaaaagtaggttattcgagaaatttactaatagtatcctgttcgagatctcataggatatacagacagccgcagtctctcattcaggctccacagtggtgcgcgttcaggcccagttgcgcctagggttgcgatcagagctgaatcagctgaacaacaccaagctcgatttagcgctgcatgattcttgaccctctttactttggtctgcatttcgacctcttgatggtcctcttcaatctgcttgccattgccgtgattgcggaacgtattctaagaactcctatctctgctttctacgaaatcacgttttcagtctactctctctcatgacacaaagggcaggtatagccatgaactcgtcgaacttcacctttaacttcggtagcaataatgcgcagcctgcgttccatgggaagcctgctcttgacaatgtcctctgccaattctgcgaagacatggtcaagcaatccaagatcattcaccaggcaccaaaatgggaacatccgccatccgacgacgactacgcggaggtaatgataatagaagagccccaatatactcacgagtcgcctccgaaagtggaaatatttgctcattataacaccattggagctctcaaaacttcagcccggcagtgccatctgtgtgctttgttaagcgcatacgatccggggttcccagaacttgtcgaagaagcttctaataacatccgctacactatgaaggtgctgcgcgccgacttgcacgctgatgggccgggtttgctgaaggtagatatgaggagagggaaagagactggcgcaacctacctcatgaacgggcggccaagaaagactacgcagacgacgcttgttgccgggcggactgatgatttcaaggtactgagtcttgccaaggaatggctgaataagtgtataaacgaacatgatgaatgcaaccgccgctcgcatccgaccgccgattggcacctcccgacgcgactggtgaaggtgtcggggttcatgacgaatgtgttctcgatgcggctgtgcctgggaaaagaccttccggcaggcacgaaatacttaacgctaagtcattgttggggcggcgcggatattctcaagttaacagcagaaaacctgcagtcattccagtctgacatcccgcttcgagacatgccacgcaatttcagagatgctgcagctgtcacgctcttcatggggtatgaatacttgtggattgactctctttgtatcatccaaggatccgtccaggactgggatcgcgaggcggcattgatgggaaacgtgtatcggtattgcgtgttgagcatcgccgcagttgctgcgacgaacccgcacgatggattcttcatagaaagaaactcacaatcattcaccaaatgccagctcatccccaccgtacgaggtcgaggtggtctatatgccgaaaactggcgcgatagagcgggcaaagagatcctcaattcccgaggatgggtctgccaagagagagcgctttcaccgcgcactttgtacttcaggtccatgatgctagactggaagtgtacgatggcgtctgcgcaggagacagatgcggacttctcaacgtggtcgcagactgcaggcattaagcgagacttctacgagcttcttgacaaagcgaagaacgacgactacgataaatggttcgccaaatggtggaagattatcttcgaatacacgaaatgcaatttgacctttgactcggacaggtggccagcgatcatgggtcttgcgactgcagtcgagcaacaatctggcaatcggctgattcatggactgtgggaagtgagtctggcctcggagctgatgtggagagcttctagcccgtcaaaaggaaaacgacttggtaatggctctccgtcatggtcgtggctgagtttaacttcgccggtgtccaagatgggctacaatctcaagggatatttcgacatggacgcttctgtggctctgcaaacacaccctccggacgataagaagctctttgtacgaggacggatggcgaagattaagtggacagtcaagtatcacggcgacggagaaatcgaatattgctaccgctttctggcgcccacgagagatacaaacgggaagtgggatggacgttgggatccggatacaagcccgaacgaaacttgggatatttggtgtctggaattcatcactgacgccaaactcaaggaagcggctgggcttgtcgtcaaaagagaggagaaagacacaggcgacgtgtggactagagtgggcgcatatgccctccagccgtacgctagtggtggcgatgatcccgcttgggatctcttgagaaccaatacaatcacgatagaatgaagaaaatgaggggaacagcatgtttacacggtcgcggaggctgggcgatcactagttgctaacgcaatacacgcaattttgcttaatatgtcggctgcgcgcacattctttcgcgtcgtgcgctacctcagcctggttcaaataaggagtaactactcaaaggacttctg

SEQ ID NO: 11328 - DNA, 642 bp, Muscodor strobelii
  misc_feature: SGI cDNA ID NO. 563633
  misc_feature: Elevated expression when VOC is produced
  misc_feature: Encodes the peptide sequence at SEQ ID NO 11329
atggaagacattagcgtcttcaacaatcttgggacgcttagtcaagcgaacaaggttcttcagagccggcttgaggtactaggggataggagagatcttcatgagctcagggacatctttgagcgttatgatatatcttctgaggttggactcagcctcctccacaagcatttcctgatagaagaaggagagatggttgtcgagttcgggcatgtttctacgccatggccagttcctcctagtggaaaggtggcaggcggacacgttgtacccagatcttggcgttttctgagcgggcagttgataccgtatgagtttgggttcaaccatcctgcacagtccgagtataaagaatatcacctaccacctaatttcgttgaggaagtcgctaccttcctttccgatacttgtctcgatgacgtgcttggaatatgcgcgattggcaatgctgagattgaaggtcgaatagaactaaatcggggccgcgtgaacttcactatcccccctagcaaacccgaagacatggatgtgagagtagtgcctgagcatgcgccatcggtatgggcctttgattgcaagacgggtcttagagatacgactatgacgttggcacgagtttgttgggtttgtccgaaacattag

SEQ ID NO: 11329 - protein, 213 aa, Muscodor strobelii
  misc_feature: SGI Peptide ID NO. 563633
  misc_feature (1)..(168): NCBI GI: 119485871 Blast Desc: NFIA_100180 [Neosartorya fischeri NRRL 181] gi|119410434|gb|EAW20381.1| conserved [Neosartorya fischeri NRRL 181]
  misc_feature (3)..(168): NCBI GI: 70984014 Blast Desc: AFUA_8G07310 [Aspergillus fumigatus Af293] gi|66845158|gb|EAL85494.1| AFUA_8G07310 [Aspergillus fumigatus Af293]
  misc_feature (3)..(168): NCBI GI: 159123489 Blast Desc: AFUB_080430 [Aspergillus fumigatus A1163]
  misc_feature (6)..(208): NCBI GI: 240106526 Blast Desc: CPC735_000580 [Coccidioides posadasii C735 delta SOWgp]
  misc_feature (36)..(168): NCBI GI: 256724458 Blast Desc: NECHADRAFT_8754 [Nectria haematococca mpVI 77-13-4]
  misc_feature (3)..(202): NCBI GI: 261198463 Blast Desc: conserved [Ajellomyces dermatitidis SLH14081] gi|239594785|gb|EEQ77366.1| conserved [Ajellomyces dermatitidis SLH14081]
  misc_feature (36)..(168): NCBI GI: 256721000 Blast Desc: NECHADRAFT_82262 [Nectria haematococca mpVI 77-13-4]
  misc_feature (7)..(188): NCBI GI: 149209635 Blast Desc: MGCH7_ch7g300 [Magnaporthe grisea 70-15] gi|86196255|gb|EAQ70893.1| MGCH7_ch7g300 [Magnaporthe grisea 70-15]
  misc_feature (3)..(108): NCBI GI: 240273168 Blast Desc: conserved [Ajellomyces capsulatus H143]
  misc_feature (1)..(168): NCBI GI: 212541731 Blast Desc: PMAA_038870 [Penicillium marneffei ATCC 18224] gi|210065927|gb|EEA20020.1| PMAA_038870 [Penicillium marneffei ATCC 18224]
  misc_feature: Useful for introducing or modulating the production of volatile compounds
MEDISVFNNLGTLSQANKVLQSRLEVLGDRRDLHELRDIFERYDISSEVGLSLLHKHFLIEEGEMVVEFGHVSTPWPVPPSGKVAGGHVVPRSWRFLSGQLIPYEFGFNHPAQSEYKEYHLPPNFVEEVATFLSDTCLDDVLGICAIGNAEIEGRIELNRGRVNFTIPPSKPEDMDVRVVPEHAPSVWAFDCKTGLRDTTMTLARVCWVCPKH

SEQ ID NO: 11330 - DNA, 1556 bp, Muscodor strobelii
  misc_feature: SGI EST ID NO. CUFF.26904.0
  misc_feature: Variant of the nucleotide sequence at SEQ ID NO 11328
gtaaatcaccggttaaatggagaacgccgaaaccacgcattgaacatgaaccctacgacgaatgcgcgattagcgcataatctagcttcctttgccggctactcccgctgtcgcgtgtactggcctcgggcaaatacgtctagggggccaatcgcaatcatgctctgggctatgtgcacacgctacacaccatcttgatgagcatctttgttggagtcatattgtaattggcccatcgaggttattcaaaatcgatcgacgatacgattgtgtgacacgtgtctatacatttacgcgtgactttcgatattgcggctctgctcgtcgaatgaagcgaatcgggagaaatggaaggccaaccagctccaatctctcattataaggctctggaatttcttctatcattggatcaaaagtgcacatttcgtggcggaggcaaggtacaacagtcattgcttctttctctcaggtacgtggaaagtacgcaagatggaagacattagcgtcttcaacaatcttgggacgcttagtcaagcgaacaaggttcttcagagccggcttgaggtactaggggataggagagatcttcatgagctcaggtatgtgatgctgaatttgcacgataatatgaatgatcattcttattattacatagggacatctttgagcgttatgatatatcttctgaggttggactcagcctcctccacaagcatttcctgatagaagaaggagagatggttgtcgagttcgggcatgtttctacgccatggccagttcctcctagtggaaaggtggcaggcggacacgttgtacccagatcttggcgttttctgagcgggcagttgataccgtatgagtttgggttcaaccatcctgcacagtccgagtataaagaatatcacctaccacctaatttcgttgaggaagtcgctaccttcctttccgatacttgtctcgatgacgtgcttggaatatgcgcgattggcaatgctgagattgaaggtcgaatagaactaaatcggggccgcgtgaacttcactatcccccctagcaaacccgaagacatggatgtgagagtagtgcctgagcatgcgccatcggtatgggcctttgattgcaagacgggtcttagagatacggtatgtttcaagacttggccggacgtactttgtccacgtgggccttctgatgagactaacacgtaattatcgtcacagactatgacgttggcacgagtttgttgggtttgtccgaaacattagcttgttggactgatgcacatagctgccatttgaaaatatgttgtaatgggcgagattgttgtaccagttctttgcaaatttttgtgggataatcacaagattgcttgaagcaggaacgtgatcagaaaataggcaatctgcgaggagcttgattagcatgacagtaggtgaagagcacatgacttactccagcgatgagatatggcagggcagtattgcctgtatcgtctgatatactcagagaatctagtagcgaggaaataattgcgttagctccaagatcacaattac

SEQ ID NO: 11331 - DNA, 1293 bp, Muscodor strobelii
  misc_feature: SGI cDNA ID NO. 563634
  misc_feature: Encodes the peptide sequence at SEQ ID NO 11332
atggctgtttgtcgagattactacctcaaggacgacagcagccctcacgtacaacatgattgcaaggcgaaggatgtgcaagtacagcttggcattgttctgacagtactgtcaagttgttcaattctcgctgcaaccattatgcagttacccatgggatggatagctgacaagaagggccacaagattgcactgattctaaatattgtcagtacgattctctactggggctgggtcccaatagcagggctcgtcccgtctcttccgatctggactttctacattgctccgatctttattctcatcggcggtggaccttgggcatctggtgcattagtcttcgcgacaatcagcagtcagatgtctcgtaatcagaggactcccgcattctccattatggaggctctttcgggtattgctgatctgatagggccagctctcgcaagttggacgatggaagaccatatttggctaccgttcttgttcgcaacagcaagttttgcgttgatgactgtacctacattactcttgaaggacgaaacattatcagcattgccaacagaggacgattcggagatagacacagatgttgaaacagaggctagacctcatggctcttctccggacgatacgcggccacttctaaacgagcgtgaatattcagtcggtggacgaatgtcaataagcccaacgcggtttcgatcgaccactacgatttgtgctgttgcgttctgctcattctttcttatttctcttgcccgcgattccaacaacttcttgataccatggatatcatggcgatttgacacctcgatggctcaagccggcctcattttttctttgagggccgttatctcgtctcttgtcttctttgttctgctacctttggctagtattggagcttctaaactcacagatactcgctatgcttcccgagatctcttgctctcagcaggcagtgtcgcgctagccagtgttgggtcgatcctgatggcagttgccccgaacgcttgggcgcttgttgctggattctctgtcgttgtcctcggctccggcgcaactgttagtctgcgcgcgtttctcggcgctaaagtgaataagtcgtcgtcggggcgtcttttcgcctcaatatcggctatttcaacaataggcagtttactaggcatgcccttaatgggcgctctctgtgagtcatacatcttgtcacatatcgcaccttttcacttaaaattcaagtttcatgcagttgtaattgtgatcttggagctaacgcaattatttcctcgctactag

SEQ ID NO: 11332 - protein, 430 aa, Muscodor strobelii
  misc_feature: SGI Peptide ID NO. 563634
  misc_feature (25)..(389): Pfam Id: PF07690 Pfam Desc: Major Facilitator Superfamily
  misc_feature (243)..(399): Pfam Id: PF07690 Pfam Desc: Major Facilitator Superfamily
  misc_feature (2)..(392): NCBI GI: 46111579 Blast Desc: FG02671.1 [Gibberella zeae PH-1]
  misc_feature (3)..(395): NCBI GI: 255930199 Blast Desc: Pc06g00440 [Penicillium chrysogenum Wisconsin 54-1255] gi|211581272|emb|CAP79037.1| Pc06g00440 [Penicillium chrysogenum Wisconsin 54-1255]
  misc_feature (4)..(397): NCBI GI: 240104825 Blast Desc: Major Facilitator Superfamily protein [Coccidioides posadasii C735 delta SOWgp]
  misc_feature (4)..(395): NCBI GI: 119178330 Blast Desc: CIMG_08009 [Coccidioides immitis RS]
  misc_feature (3)..(401): NCBI GI: 156055966 Blast Desc: SS1G_05335 [Sclerotinia sclerotiorum 1980] gi|154703119|gb|EDO02858.1| SS1G_05335 [Sclerotinia sclerotiorum 1980]
  misc_feature (3)..(395): NCBI GI: 46115740 Blast Desc: FG03712.1 [Gibberella zeae PH-1]
  misc_feature (4)..(390): NCBI GI: 225557470 Blast Desc: conserved [Ajellomyces capsulatus G186AR]
  misc_feature (4)..(395): NCBI GI: 238839690 Blast Desc: conserved [Microsporum canis CBS 113480]
  misc_feature (3)..(394): NCBI GI: 242815347 Blast Desc: conserved [Talaromyces stipitatus ATCC 10500] gi|218714889|gb|EED14312.1| conserved [Talaromyces stipitatus ATCC 10500]
  misc_feature (4)..(388): NCBI GI: 115383780 Blast Desc: conserved [Aspergillus terreus NIH2624] gi|114196129|gb|EAU37829.1| conserved [Aspergillus terreus NIH2624]
MAVCRDYYLKDDSSPHVQHDCKAKDVQVQLGIVLTVLSSCSILAATIMQLPMGWIADKKGHKIALILNIVSTILYWGWVPIAGLVPSLPIWTFYIAPIFILIGGGPWASGALVFATISSQMSRNQRTPAFSIMEALSGIADLIGPALASWTMEDHIWLPFLFATASFALMTVPTLLLKDETLSALPTEDDSEIDTDVETEARPHGSSPDDTRPLLNEREYSVGGRMSISPTRFRSTTTICAVAFCSFFLISLARDSNNFLIPWISWRFDTSMAQAGLIFSLRAVISSLVFFVLLPLASIGASKLTDTRYASRDLLLSAGSVALASVGSILMAVAPNAWALVAGFSVVVLGSGATVSLRAFLGAKVNKSSSGRLFASISAISTIGSLLGMPLMGALCESYILSHIAPFHLKFKFHAVVIVILELTQLFPRY

SEQ ID NO: 11333 - DNA, 1548 bp, Muscodor strobelii
  misc_feature: SGI EST ID NO. CUFF.26902.1
  misc_feature: Variant of the nucleotide sequence at SEQ ID NO 11331
cccatgtctatcctgacgcccgtcagatttgcactttgcactgagcctcactgtctgacgctttctctcgcaaatccttagcgcatgagaaatcattcgcccgacatcattatttgaagtatgacaataaaaatgatcgtcaactacaatcgtatttgatgtttgctccttcattttgcaacttaagcacatctagtgtacgaggacgaccttatgttaccatcacacaatgttcggtctcacgatatttcgccaatctgacttggcatttcttccatcagacttctggctgtgtacgctgataatgtttttggtggaatttggatgcgcaatcctaggtgcaccatctccccgattgatcgagatggctgtttgtcgagattactacctcaaggacgacagcagccctcacgtacaacatgattgcaaggcgaaggatgtgcaagtacagcttggcattgttctgacagtactgtcaagttgttcaattctcgctgcaaccattatgcagttacccatgggatggatagctgacaagaagggccacaagattgcactgattctaaatattgtcagtacgattctctactggggctgggtcccaatagcagggctcgtcccgtctcttccgatctggactttctacattgctccgatctttattctcatcggcggtggaccttgggcatctggtgcattagtcttcgcgacaatcagcagtcagatgtctcgtaatcagaggactcccgcattctccattatggaggctctttcgggtattgctgatctgatagggccagctctcgcaagttggacgatggaagaccatatttggctaccgttcttgttcgcaacagcaagttttgcgttgatgactgtacctacattactcttgaaggacgaaacattatcagcattgccaacagaggacgattcggagatagacacagatgttgaaacagaggctagacctcatggctcttctccggacgatacgcggccacttctaaacgagcgtgaatattcagtcggtggacgaatgtcaataagcccaacgcggtttcgatcgaccactacgatttgtgctgttgcgttctgctcattctttcttatttctcttgcccgcgattccaacaacttcttgataccatggatatcatggcgatttgacacctcgatggctcaagccggcctcattttttctttgagggccgttatctcgtctcttgtcttctttgttctgctacctttggctagtattggagcttctaaactcacagatactcgctatgcttcccgagatctcttgctctcagcaggcagtgtcgcgctagccagtgttgggtcgatcctgatggcagttgccccgaacgcttgggcgcttgttgctggattctctgtcgttgtcctcggctccggcgcaactgttagtctgcgcgcgtttctcggcgctaaagtgaataagtcgtcgtcggggcgtcttttcgcctcaatatcggctatttcaacaataggcagtttactaggcatgcccttaatgggcgctct

SEQ ID NO: 11334 - DNA, 1506 bp, Muscodor strobelii
  misc_feature: SGI cDNA ID NO. 563635
  misc_feature: Reduced expression when VOC is produced
  misc_feature: Encodes the peptide sequence at SEQ ID NO 11335
atgaaagtcggaacatttaagttcttgtcctttgcggcctcaatctttcccgttgtcacccaatccctgacgatcaacactacatcaggtctaatcacaggccatcctctttcttcgtatgaagatgtccaagaatttcttggtattccatttgcccagccgccaattggcaagcttcgattcgcacctccgcagagatattcttctaccgcctccttcgctgccgataaccccggcctctcgtgcattcagcaacctgagacggtcaaccaatcacagccccagaacttccagaatattgcccgcggccatcaacgctatacagaacacattggcgaagactgtctgaagataaacgtttgggctaacaccaagcagtccggggcaaagacacatgcccaacccctgaagccagttctcataaacttttacggcggcggttttcacagcggctccggaagtgatgagacccttaacggggctgctttcgctcaggagcaggatatagttatagtcacattcaactatcgtcttggtatatttgggttttctggcgcgcctggactttcgcaaaacgtggctttgctagatcaacgcctcgctatcgaatgggttcgagacaatatccgagtttttggtggtgatccacatcgtatcaccatctttggtcacagcgccggcggagcaagcgttgatttctacgatttcgctttctatcatgaccctatcgtagctggagttattccgatgtctggatctgtgaatactttcggaagacgatatgaaaatacctctgggtctgggtggattgagactgctcggctccttggttgcgatgtttcgagcgtggaagcagccgtactggattgtatgcgggacgctgaacctacactacttcttgctgcctcgctgaatgcctcaaaagttgtcgctgctcagcttagtgaaaccgcaaagctttatgttggcattacagggctcttcggtccaactattgacaacaaaaccgtattcgccaactatactgagcgagtcaattcgggcaaactcagcagagttcctgcggtcttaggcctaaacacagacgaagcctgcgcgtttcaacagcaaggaaggctaccccagtcacaggtagtcggagtcgcagttaacgaggcggtcttctcatgtcccttgcaatggggtgctatatggagggcgaacgccggtgttcctacctggaagtatctatacgaaggcgcgtaccccaacttatactctcctgcttgccctggtaagccctggcatggctcagagatgtatgttattttcaactcgtccgagtcatcgaccggttttgcccctacaaagggcgagcttgcgggtggcacatattggagaactgccctggcaacttttgctgctaatcccagcaaagggcttgattcgccggcctttcccgtgcaatggcccatgttcacgccaaagacccagggtcaggtgtgtgatgcgagtcatgagagctaa

SEQ ID NO: 11335 - protein, 501 aa, Muscodor strobelii
  misc_feature: SGI Peptide ID NO. 563635
  misc_feature (3)..(498): Pfam Id: PF00135 Pfam Desc: Carboxylesterase
  misc_feature (3)..(367): Pfam Id: PF00135 Pfam Desc: Carboxylesterase
  misc_feature (27)..(491): NCBI GI: 226279398 Blast Desc: cholinesterase [Paracoccidioides brasiliensis Pb01]
  misc_feature (4)..(491): NCBI GI: 226294490 Blast Desc: cholinesterase [Paracoccidioides brasiliensis Pb18]
  misc_feature (4)..(491): NCBI GI: 225685167 Blast Desc: cholinesterase [Paracoccidioides brasiliensis Pb03]
  misc_feature (8)..(480): NCBI GI: 212538645 Blast Desc: carboxylesterase, [Penicillium marneffei ATCC 18224] gi|210069220|gb|EEA23311.1| carboxylesterase, [Penicillium marneffei ATCC 18224]
  misc_feature (9)..(494): NCBI GI: 238839300 Blast Desc: carboxylesterase [Microsporum canis CBS 113480]
  misc_feature (4)..(480): NCBI GI: 238486482 Blast Desc: lipase/esterase, [Aspergillus flavus NRRL3357] gi|220699358|gb|EED55697.1| lipase/esterase, [Aspergillus flavus NRRL3357]
  misc_feature (9)..(486): NCBI GI: 240106614 Blast Desc: cholinesterase, [Coccidioides posadasii C735 delta SOWgp]
  misc_feature (24)..(480): NCBI GI: 154322815 Blast Desc: BC1G_00750 [Botryotinia fuckeliana B05.10] gi|150848084|gb|EDN23277.1| BC1G_00750 [Botryotinia fuckeliana B05.10]
  misc_feature (24)..(493): NCBI GI: 225684981 Blast Desc: cholinesterase [Paracoccidioides brasiliensis Pb03]
  misc_feature (24)..(489): NCBI GI: 156064737 Blast Desc: SS1G_00376 [Sclerotinia sclerotiorum 1980] gi|154691238|gb|EDN90976.1| SS1G_00376 [Sclerotinia sclerotiorum 1980]
  misc_feature (23)..(371): SWISSPROT Homolog: EC 3.1.1.7 Acetylcholinesterase
  misc_feature: Useful for introducing or modulating the production of volatile compounds
MKVGTFKFLSFAASIFPVVTQSLTINTTSGLITGHPLSSYEDVQEFLGIPFAQPPIGKLRFAPPQRYSSTASFAADNPGLSCIQQPETVNQSQPQNFQNIARGHQRYTEHIGEDCLKINVWANTKQSGAKTHAQPLKPVLINFYGGGFHSGSGSDETLNGAAFAQEQDIVIVTFNYRLGIFGFSGAPGLSQNVALLDQRLAIEWVRDNIRVFGGDPHRITIFGHSAGGASVDFYDFAFYHDPIVAGVIPMSGSVNTFGRRYENTSGSGWIETARLLGCDVSSVEAAVLDCMRDAEPTLLLAASLNASKVVAAQLSETAKLYVGITGLFGPTIDNKTVFANYTERVNSGKLSRVPAVLGLNTDEACAFQQQGRLPQSQVVGVAVNEAVFSCPLQWGAIWRANAGVPTWKYLYEGAYPNLYSPACPGKPWHGSEMYVIFNSSESSTGFAPTKGELAGGTYWRTALATFAANPSKGLDSPAFPVQWPMFTPKTQGQVCDASHES

SEQ ID NO: 11336 - DNA, 2215 bp, Muscodor strobelii
  misc_feature: SGI EST ID NO. CUFF.27051.1
  misc_feature: Variant of the nucleotide sequence at SEQ ID NO 11334
cgctcgttttctatataaggtcgttcacgatgaaagtcggaacatttaagttcttgtcctttgcggcctcaatctttcccgttgtcacccaatccctgacgatcaacactacatcaggtctaatcacaggccatcctctttcttcgtatgaagatgtccaagaatttcttggtattccatttgcccagccgccaattggcaagcttcgattcgcacctccgcagagatattcttctaccgcctccttcgctgccgataaccccggcctctcgtgcattcagcaacctgagacggtcaaccaatcacagccccagaacttccagaatattgcccgcggccatcaacgctatacagaacacattggcgaagactgtctgaagataaacgtttgggctaacaccaagcagtccggggcaaagacacatgcccaacccctgaagccagttctcataaacttttacggcggcggttttcacagcggctccggaagtgatgagacccttaacggggctgctttcgctcaggagcaggatatagttatagtcacattcaactatcgtcttggtatatttgggttttctggcgcgcctggactttcgcaaaacgtggctttgctagatcaacgcctcgctatcgaatgggttcgagacaatatccgagtttttggtggtgatccacatcgtatcaccatctttggtcacagcgccggcggagcaagcgttgatttctacgatttcgctttctatcatgaccctatcgtagctggagttattccgatgtctggatctgtgaatactttcggaagacgatatgaaaatacctctgggtctgggtggattgagactgctcggctccttggttgcgatgtttcgagcgtggaagcagccgtactggattgtatgcgggacgctgaacctacactacttcttgctgcctcgctgaatgcctcaaaagttgtcgctgctcagcttagtgaaaccgcaaagctttatgttggcattacagggctcttcggtccaactattgacaacaaaaccgtattcgccaactatactgagcgagtcaattcgggcaaactcagcagagttcctgcggtcttaggcctaaacacagacgaagcctgcgcgtttcaacagcaaggaaggctaccccagtcacaggtagtcggagtcgcagttaacgaggcggtcttctcatgtcccttgcaatggggtgctatatggagggcgaacgccggtgttcctacctggaagtatctatacgaaggcgcgtaccccaacttatactctcctgcttgccctggtaagccctggcatggctcagagatgtatgttattttcaactcgtccgagtcatcgaccggttttgcccctacaaagggcgagcttgcgggtggcacatattggagaactgccctggcaacttttgctgctaatcccagcaaagggcttgattcgccggcctttcccgtgcaatggcccatgttcacgccaaagacccagggtcaggtggtaagcttgggagggaatgggacgtttgaaagtgtagagtctgatgctttgttggttgcgccttgttataccttactgagaactggagctcccaatttttgagaaagacgtcaaacttgcttccaccgtgatgatattggagaaggtcggcctatcagcacatcactgttttggagactatcggttctatttgtaatatcttcatcattgtacttatacaaagctagaaatattcaatctagaaacgagctaatctgactttgcagaaaagtgtgatgcgagtcatgagagctaaaggggtgaacgttagtgatatgccgatgattgttaattcaactacagaattcaatgtaaactgacgagaatgatagtgcgatttaaattgaccaatatgatcccaatgcctccgcgccagagtcattttacccgggttatagagatagtttcacacactctctccgtagtgagatgcagtcaaccggtatgatagttcgcttaggtaggggagagacgattatgcccagttttcaagctgacgctaagtgctacccgcatactcagggtgatggttgggctttggcgcattgatacctttttcatacctaaatagatcgagaggatagtatgctggatatgaatagataaatgacttgcacctttcaagttttacaaatctccgaaatgtaagtctccgcgtatgtcca

SEQ ID NO: 11337 - DNA, 1620 bp, Muscodor strobelii
  misc_feature: SGI cDNA ID NO. 563636
  misc_feature: Elevated expression when VOC is produced
  misc_feature: Encodes the peptide sequence at SEQ ID NO 11338
atggcgagtgttccattctcagatacgcctgttgcctggtctattgggtgtcttctgcttctttccttatctaccttctttgcttatcgcgtgttctttcatccactccgacgttttcctgggcccctcgtggcaaagctaagtgactttcgcaacggatactatgcagtgcagaagaacctgcacctaattaccgcacacgatcacgctcagtatggggatatcatgcggcatggaccaaacaaactcattttcaacactgttcgtgcattacacgacatttacgacaatgagagagtggtcaagtctcacgtatattctgtgacggtccaatcaccaggagttttcacatcgttcaatatcatcgatcaacaggcccatagatataaacgcaaaatcatcggaaaagctctcaatgaccggtccatgcgcatattcgagccgataatagcatccgaagtcgacgtccttatcaaactgctttatgtctcttgtaaaggaaaggaggccaatcccatcaatatgtcagatcgtttcgagtacctctcctgcgatatagtcactctcctcggtttcggtcaccctctgaaactacaaactgacgagacatatcggtttatgtgcaagggaatggctgtggctaactattacaccaacacgcatatgcagttcttcctgatttatcgactcaagctcacagcagcccttcactacttcaacaacgctgtgcgggagaagtacaaggggctggtaaggaaaatgatcgctattaggatgtcagaagataaggacattcgacacgatctctactcggtaacatcgaaggccaacgccgaagccgcgaatccggaagaaggtattcgaatggctgacgtatggtccgaagccgtaacgttccttcccgcaggtgccttttccatatccacaacactgagtgcccttttcttctacttgagtcgctacccagattgctaccgacatctcgcccatgaaatcagaacggcattcgcatcggaggccgacataaaatttggcacgcagctgtcaaaatgtcattatcttcgagcgtgtatcgacgagaccatgcgaatgtcaccaccgatccctggtaccatgtggagagagcttcagtccaatgacagcgagccattcatcgttgacggccatgttatacctcccggtacacaggtcggggtgaacacgtatagccttcaccataacgagaggatttacccggcgccgtacttgtttaaaccagaacgctggattgactaccaaggagctggggagtttaaggctgagtcacgtgaagcttttatgccattctcaattggacatcgagactgtgtaggaaagaacatggcatacctagtgatgagtctcgtcgtagccaaggtattatggcacttcggtttcgagtcagcaacgggtacaacaggaaaggttggcggtgggcataaagaaggggaatttggcagaagacgcgaaacagagtaccagctctacgatatcttttcagcgatgcacgatggtccatgcgttgtgttcaagccgcggggtgatgcgtgtagcaatcttccagtcgaaggcttcaatttcgatgaatcctggatgacatga

SEQ ID NO: 11338 - protein, 539 aa, Muscodor strobelii
  misc_feature: SGI Peptide ID NO. 563636
  misc_feature (35)..(502): Pfam Id: PF00067 Pfam Desc: Cytochrome P450
  misc_feature (146)..(473): Pfam Id: PF00067 Pfam Desc: Cytochrome P450
  misc_feature (26)..(519): NCBI GI: 255954725 Blast Desc: Pc21g10830 [Penicillium chrysogenum Wisconsin 54-1255] gi|211589826|emb|CAP95980.1| Pc21g10830 [Penicillium chrysogenum Wisconsin 54-1255]
  misc_feature (18)..(519): NCBI GI: 145256217 Blast Desc: An10g00660 [Aspergillus niger CBS 513.88] gi|134078632|emb|CAK40505.1| protein product [Aspergillus niger]
  misc_feature (26)..(519): NCBI GI: 121710976 Blast Desc: benzoate 4-monooxygenase cytochrome P450 [Aspergillus clavatus NRRL 1] gi|119401254|gb|EAW11678.1| benzoate 4-monooxygenase cytochrome P450 [Aspergillus clavatus NRRL 1]
  misc_feature (28)..(519): NCBI GI: 242771379 Blast Desc: cytochrome P450, [Talaromyces stipitatus ATCC 10500] gi|218721449|gb|EED20867.1| cytochrome P450, [Talaromyces stipitatus ATCC 10500]
  misc_feature (14)..(514): NCBI GI: 169782556 Blast Desc: [Aspergillus oryzae RIB40] gi|83774484|dbj|BAE64607.1| protein product [Aspergillus oryzae]
  misc_feature (14)..(514): NCBI GI: 238492179 Blast Desc: cytochrome P450, [Aspergillus flavus NRRL3357] gi|220695820|gb|EED52162.1| cytochrome P450, [Aspergillus flavus NRRL3357]
  misc_feature (73)..(519): NCBI GI: 258572362 Blast Desc: conserved [Uncinocarpus reesii 1704] gi|237905213|gb|EEP79614.1| conserved [Uncinocarpus reesii 1704]
  misc_feature (19)..(519): NCBI GI: 238845959 Blast Desc: benzoate 4-monooxygenase cytochrome P450 [Microsporum canis CBS 113480]
  misc_feature (19)..(519): NCBI GI: 145608110 Blast Desc: MGG_03375 [Magnaporthe grisea 70-15] gi|145015610|gb|EDK00100.1| MGG_03375 [Magnaporthe grisea 70-15]
  misc_feature (81)..(519): NCBI GI: 145241738 Blast Desc: An09g02000 [Aspergillus niger] gi|134078055|emb|CAK40138.1| protein product [Aspergillus niger]
  misc_feature (123)..(473): SWISSPROT Homolog: EC 1.14.14.1 Unspecific monooxygenase
  misc_feature: Useful for introducing or modulating the production of volatile compounds
MASVPFSDTPVAWSIGCLLLLSLSTFFAYRVFFHPLRRFPGPLVAKLSDFRNGYYAVQKNLHLITAHDHAQYGDIMRHGPNKLIFNTVRALHDIYDNERVVKSHVYSVTVQSPGVFTSFNIIDQQAHRYKRKIIGKALNDRSMRIFEPIIASEVDVLIKLLYVSCKGKEANPINMSDRFEYLSCDIVTLLGFGHPLKLQTDETYRFMCKGMAVANYYTNTHMQFFLIYRLKLTAALHYFNNAVREKYKGLVRKMIAIRMSEDKDIRHDLYSVTSKANAEAANPEEGIRMADVWSEAVTFLPAGAFSISTTLSALFFYLSRYPDCYRHLAHEIRTAFASEADIKFGTQLSKCHYLRACIDETMRMSPPIPGTMWRELQSNDSEPFIVDGHVIPPGTQVGVNTYSLHHNERIYPAPYLFKPERWIDYQGAGEFKAESREAFMPFSIGHRDCVGKNMAYLVMSLVVAKVLWHFGFESATGTTGKVGGGHKEGEFGRRRETEYQLYDIFSAMHDGPCVVFKPRGDACSNLPVEGFNFDESWMT

SEQ ID NO: 11339 - DNA, 3626 bp, Muscodor strobelii
  misc_feature: SGI EST ID NO. CUFF.27061.1
  misc_feature: Variant of the nucleotide sequence at SEQ ID NO 11337
atccataagctttgctacatgtccagttagacttctattctcgaggttcgagatatgaacaacatcaaatgacggtttgatgagtcgtcgtcgcgccatccatttgtctccatcaacaacagtaattccatcaccccataggtattcaatacctgctcggattttctcaactccaaagtgctcaaaataagtcgcatgaacatatttggtgatctcggtgttcattgttttgatagtaggagtaccaagaggataagctaggtacgttttgccgtattcctggaagagtctttcgttcagagccaagaaatcccgcttttcaaaagccttcttataaagaatgaagaaatctaagccgaagaaaggatccttgtggcggtagcttggtggctcttcgcagttatgtctgcgcataatcgctcttgcatgaagccatcctttgatcctcgatatgaaaacatgagtagcgagtatagcaagacagacggtccatatacaccgcgcagagtagaccaaggagacgttttccatcatgggcaagggaaaataattgaataacgatacaactatcacgacagcattgtgatgatatgggcgttcgacctcgattagtcacctgacattcgttttccccgttggtccgtcttgttctcccttacatcacccgcagtaaacaaaccaacggacatgatcggccgcattttctcaacgaatagaatgctacggaatgtatgcatctatgaggtcacataattaaacgctcgctttcgaccaacagtttgacaacctgccacagaaattggaattcttgacattgtcattcgtctccctccacatattttatgtgctgaaagccaatctggtctcaattgcgactgagtatactgtactccctttccttgcctcgaaccgtacacccatcatggcgagtgttccattctcagatacgcctgttgcctggtctattgggtgtcttctgcttctttccttatctaccttctttgcttatcgcgtgttctttcatccactccgacgttttcctgggcccctcgtggcaaagctaagtgactttcgcaacggatactatgcagtgcagaagaacctgcacctaattaccgcacacgatcacgctcagtatggggatatcatgcggcatggaccaaacaaactcattttcaacactgttcgtgcattacacgacatttacgacaatgagagagtggtcaagtctcacgtatattctgtgacggtccaatcaccaggagttttcacatcgttcaatatcatcgatcaacaggcccatagatataaacgcaaaatcatcggaaaagctctcaatgaccggtccatgcgcatattcgagccgataatagcatccgaagtcgacgtccttatcaaactgctttatgtctcttgtaaaggaaaggaggccaatcccatcaatatgtcagatcgtttcgagtacctctcctgcgatatagtcactctcctcggtttcggtcaccctctgaaactacaaactgacgagacatatcggtttatgtgcaagggaatggctgtggctaactattacaccaacacgcatatgcagttcttcctgatttatcgactcaagctcacagcagcccttcactacttcaacaacgctgtgcgggagaagtacaaggggctggtaaggaaaatgatcgctattaggatgtcagaagataaggacattcgacacgatctctactcggtaacatcgaaggccaacgccgaagccgcgaatccggaagaaggtattcgaatggctgacgtatggtccgaagccgtaacgttccttcccgcaggtgccttttccatatccacaacactgagtgcccttttcttctacttgagtcgctacccagattgctaccgacatctcgcccatgaaatcagaacggcattcgcatcggaggccgacataaaatttggcacgcagctgtcaaaatgtcattatcttcgagcgtgtatcgacgagaccatgcgaatgtcaccaccgatccctggtaccatgtggagagagcttcagtccaatgacagcgagccattcatcgttgacggccatgttatacctcccggtacacaggtcggggtgaacacgtatagccttcaccataacgagaggatttacccggcgccgtacttgtttaaaccagaacgctggattgactaccaaggagctggggagtttaaggctgagtcacgtgaagcttttatgccattctcaattggacatcgagactgtgtaggaaagaacatggcatacctagtgatgagtctcgtcgtagccaaggtattatggcacttcggtttcgagtcagcaacgggtacaacaggaaaggttggcggtgggcataaagaaggggaatttggcagaagacgcgaaacagagtaccagctctacgatatcttttcagcgatgcacgatggtccatgcgttgtgttcaagccgcggggtgatgcgtgtagcaatcttccagtcgaaggcttcaatttcgatgaatcctggatgacatgaaccgcagttattgaagagttaaagcagtatgaagtggcaacactgacgtccctggtattaactaagtcgcttttaggggtttcgtcctaaagagcagggctgacccaacaacccacacttccacatgatcaaaatgaattctcaaaacgttttcaatcataccttggtcatcatctacattactgaatgcccccaacccattataaattgtgtgatgtagtcgatccagccagtcagtaggacgacgagaaccaagtaatgtgcgtctaattaccgctccgttttccataagacgttcgctgagtttgccaattgaatcaaacttgacttccccgccagtctacagtggtacgcattggacaatgaaacagactgaaattcgcccggaaaggggttcagttatgtcagccatgatggagttgtgtcggacgcgtggcgtgacagctagaatagccgccttggtccgccgagactattctgatggaaatcagcttggtttggggtaaaaaatgctctgagagcggttgcggggagaaagccgtcgctgaccccacagtccaaacgctgggtggggaggtttttggtaaacagaggcagaagatttgcgacgtgacgacgtaggggacttccatacatagctgaagctgaactgcaagatatagctctgagatgcgtttagaatgccgggagctgctctatcgtcattttgatcgatataagatgcggtcagccattattattggaaatcacccggtcgggttgaggcaggtaacagaccggccggttcatgccgacccttcgcgtcccgctaacttccggaattgacgccaactcgtcaggcccgttctctgcctggttgccctagtcaaccctattgtgacttcgccttagagaggcgcatgcggataggttcgaatggttgtgtccattgaactgaaatatgaatcttcgtgatgcttgaaatcttgatctctgactcgtgattgtcctgttatttccaaagtatgacttatgcaaacataagtggagatcgtgacaaggtcgcattcgcactcgctatgctgaggagagtataagaaaggcg

SEQ ID NO: 11340 - DNA, 1527 bp, Muscodor strobelii
  misc_feature: SGI cDNA ID NO. 563637
  misc_feature: Elevated expression when VOC is produced
  misc_feature: Encodes the peptide sequence at SEQ ID NO 11341
atggaaaacgtctccttggtctactctgcgcggtgtatatggaccgtctgtcttgctatactcgctactcatgttttcatatcgaggatcaaaggatggcttcatgcaagagcgattatgcgcagacataactgcgaagagccaccaagctaccgccacaaggatcctttcttcggcttagatttcttcattctttataagaaggcttttgaaaagcgggatttcttggctctgaacgaaagactcttccaggaatacggcaaaacgtacctagcttatcctcttggtactcctactatcaaaacaatgaacaccgagatcaccaaatatgttcatgcgacttattttgagcactttggagttgagaaaatccgagcaggtattgaatacctatggggtgatggaattactgttgttgatggagacaaatggatggcgcgacgacgactcatcaaaccgtcatttgatgttgttcatatctcgaacctcgagaatagaagtctaactggacatgtagcaaagcttatggatcttattcctcgagatggctcttctgttgatcttatgccgctcttcatgcgcttgagcttggatacctcgagcgagtttattttcggacagtctctgaactccttagaatctcctgattcacagaaagctttcatggaagcatatttctacgcgcagagaggttgcggagtgcgtctaatacttggtcccatgttgcgttttctgcatcgggacccgaaatggtgggctgcgtgtgacaccgtgaatcaattcttagacgaacgggtcgatgaagccttagccaggataaaggacggctccaaggctaagcttgaagatcctcaatctcaacctcgcctcatagacgacatggcgagagttacacaagatcgattaacgctccgatatcaaatgcagaatatcttcactccagcccacgatggcgctgcggtgactctgagtaatgcgttcttccacttatctcggtgtccgactgcatggtcaaaacttagagacgagatactaccttcgaaagatctaccgatcacatacgacttgctcaaaacctaccagtatttgaagaacgtcatccgcgaaacacatcgcgtgacacctatctcgacaatgatttcgcgccagtgcgccaaagaggtagtgttccccactggcgggggtaagcacggccaatcgcctctttatgtgccgaaaggaactacgatcgagatgaactttcgatgcacactaagagacaaagacttctggggagacgacgctgatgtgtttagaccggaaaggtgggagaatcttaagcctacatgggagtatacaccatttggcggaggcccccgaatatgtcctgggtctcggctagcttttgcagagacagcgtttactttagtcacctttctccgagaatttgggaggctagagagtcgtgatgatcgaccgtggacagaagagacaagaacgactttccaaaatctgaatggcactcgtgtcgccctgtttcctgcctaa

SEQ ID NO: 11341 - protein, 508 aa, Muscodor strobelii
  misc_feature: SGI Peptide ID NO. 563637
  misc_feature (56)..(506): Pfam Id: PF00067 Pfam Desc: Cytochrome P450
  misc_feature (320)..(476): Pfam Id: PF00067 Pfam Desc: Cytochrome P450
  misc_feature (40)..(505): NCBI GI: 169596949 Blast Desc: SNOG_01251 [Phaeosphaeria nodorum SN15] gi|160707408|gb|EAT90900.2| SNOG_01251 [Phaeosphaeria nodorum SN15]
  misc_feature (1)..(505): NCBI GI: 238498034 Blast Desc: cytochrome P450, [Aspergillus flavus NRRL3357] gi|220693526|gb|EED49871.1| cytochrome P450, [Aspergillus flavus NRRL3357]
  misc_feature (40)..(508): NCBI GI: 212531571 Blast Desc: N-alkane-inducible cytochrome P450, [Penicillium marneffei ATCC 18224] gi|210071306|gb|EEA25395.1| N-alkane-inducible cytochrome P450, [Penicillium marneffei ATCC
  misc_feature (16)..(508): NCBI GI: 145244813 Blast Desc: An11g07010 [Aspergillus niger] gi|134079368|emb|CAK96997.1| protein product [Aspergillus niger]
  misc_feature (39)..(508): NCBI GI: 169626152 Blast Desc: SNOG_16355 [Phaeosphaeria nodorum SN15] gi|111055221|gb|EAT76341.1| SNOG_16355 [Phaeosphaeria nodorum SN15]
  misc_feature (28)..(508): NCBI GI: 145233653 Blast Desc: An02g10700 [Aspergillus niger] gi|134057131|emb|CAK44419.1| protein product [Aspergillus niger]
  misc_feature (16)..(508): NCBI GI: 212536398 Blast Desc: cytochrome P450 alkane hydroxylase, [Penicillium marneffei ATCC 18224] gi|210070754|gb|EEA24844.1| cytochrome P450 alkane hydroxylase, [Penicillium marneffei ATCC 18224]
  misc_feature (30)..(508): NCBI GI: 119467390 Blast Desc: n-alkane-inducible cytochrome P450 [Neosartorya fischeri NRRL 181] gi|119405653|gb|EAW15604.1| n-alkane-inducible cytochrome P450 [Neosartorya fischeri NRRL 181]
  misc_feature (16)..(508): NCBI GI: 242818758 Blast Desc: cytochrome P450, [Talaromyces stipitatus ATCC 10500] gi|218713646|gb|EED13070.1| cytochrome P450, [Talaromyces stipitatus ATCC 10500]
  misc_feature (16)..(505): NCBI GI: 70984521 Blast Desc: cytochrome P450 alkane hydroxylase [Aspergillus fumigatus Af293] gi|66845394|gb|EAL85729.1| cytochrome P450 alkane hydroxylase, [Aspergillus fumigatus Af293]
  misc_feature (78)..(477): SWISSPROT Homolog: EC 1.14.14.1 Unspecific monooxygenase
  misc_feature: Useful for introducing or modulating the production of volatile compounds
MENVSLVYSARCIWTVCLAILATHVFISRIKGWLHARAIMRRHNCEEPPSYRHKDPFFGLDFFILYKKAFEKRDFLALNERLFQEYGKTYLAYPLGTPTIKTMNTEITKYVHATYFEHFGVEKIRAGIEYLWGDGITVVDGDKWMARRRLIKPSFDVVHISNLENRSLTGHVAKLMDLIPRDGSSVDLMPLFMRLSLDTSSEFIFGQSLNSLESPDSQKAFMEAYFYAQRGCGVRLILGPMLRFLHRDPKWWAACDTVNQFLDERVDEALARIKDGSKAKLEDPQSQPRLIDDMARVTQDRLTLRYQMQNIFTPAHDGAAVTLSNAFFHLSRCPTAWSKLRDEILPSKDLPITYDLLKTYQYLKNVIRETHRVTPISTMISRQCAKEVVFPTGGGKHGQSPLYVPKGTTIEMNFRCTLRDKDFWGDDADVFRPERWENLKPTWEYTPFGGGPRICPGSRLAFAETAFTLVTFLREFGRLESRDDRPWTEETRTTFQNLNGTRVALFPA

SEQ ID NO: 11342 - DNA, 5803 bp, Muscodor strobelii
  misc_feature: SGI EST ID NO. CUFF.27060.0
  misc_feature: Variant of the nucleotide sequence at SEQ ID NO 11340
cgcctttcttatactctcctcagcatagcgagtgcgaatgcgaccttgtcacgatctccacttatgtttgcataagtcatactttggaaataacaggacaatcacgagtcagagatcaagatttcaagcatcacgaagattcatatttcagttcaatggacacaaccattcgaacctatccgcatgcgcctctctaaggcgaagtcacaatagggttgactagggcaaccaggcagagaacgggcctgacgagttggcgtcaattccggaagttagcgggacgcgaagggtcggcatgaaccggccggtctgttacctgcctcaacccgaccgggtgatttccaataataatggctgaccgcatcttatatcgatcaaaatgacgatagagcagctcccggcattctaaacgcatctcagagctatatcttgcagttcagcttcagctatgtatggaagtcccctacgtcgtcacgtcgcaaatcttctgcctctgtttaccaaaaacctccccacccagcgtttggactgtggggtcagcgacggctttctccccgcaaccgctctcagagcattttttaccccaaaccaagctgatttccatcagaatagtctcggcggaccaaggcggctattctagctgtcacgccacgcgtccgacacaactccatcatggctgacataactgaacccctttccgggcgaatttcagtctgtttcattgtccaatgcgtaccactgtagactggcggggaagtcaagtttgattcaattggcaaactcagcgaacgtcttatggaaaacggagcggtaattagacgcacattacttggttctcgtcgtcctactgactggctggatcgactacatcacacaatttataatgggttgggggcattcagtaatgtagatgatgaccaaggtatgattgaaaacgttttgagaattcattttgatcatgtggaagtgtgggttgttgggtcagccctgctctttaggacgaaacccctaaaagcgacttagttaataccagggacgtcagtgttgccacttcatactgctttaactcttcaataactgcggttcatgtcatccaggattcatcgaaattgaagccttcgactggaagattgctacacgcatcaccccgcggcttgaacacaacgcatggaccatcgctagaacaacatatcagcgaatcatgctgctgaaattgaaagagtcacggcttggagtcgatggtggtcaaatggtgatgtgcgccatgggtaggagagggatcactcactgcatcgctgaaaagatatcgtagagctggtactctgtttcgcgtcttctgccaaattccccttctttatgcccaccgccaacctttcctgttgtacccgttgctgactcgaaaccgaagtgccataataccttggctacgacgagactcatcactagagcacttgttcccgagcgcaaagaaaccgactcctgaaaatttccagactaggaaaaagaactccagaatttactcacgtctcgatgtccaattgagaatggcataaaagcttcacgtgactcagccttaaactccccagctccttggtagtcaatccagcgttctggtttaaacaagtacggcgccgggtaaatcctctcgttatggtgaaggctatacgtgttcaccccgacctgtgtaccgggaggtataacatggccgtcaacgatgaatggctcgctgtcattggactgaagctctctccacatggtaccagggatcggtggtgacattcgcatggtctcgtcgatacacgctcgaagataatgacattttgacagctgcgtgccaaattttatgtcggcctccgatgcgaatgccgttctgatttcatgggcgagatgtcggtagcaatctgggtagcgactcaagtagaagaaaagggcactcagtgttgtggatatggaaaaggcacctttgattgcattagcgcctacgctcggtgtagttgcgagaaccgccatgaaattagggtattccatgagcaaggaactgagtacttacctgcgggaaggaacgttacggcttcggaccatacgtcagccattcgaataccttcttccggattcgcggcttcggcgttggccttcgatgttaccgagtagagatcgtgtcgaatgtccttatcttctgacatcctaatagcgatcattttccttaccagccccttgtacttctcccgcacagcgttgttgaagtagtgaagggctgctgtgagcttgagtcgataaatcaggaagaactgcatatgcgtgttggtgtaatagttagccacagccattcccttgcacataaaccgatatgtctcgtcagtttgtagtttcagagggtgaccgaaaccgaggagagtgactatatcgcaggagaggtactcgaaacgatctgacatattgatgggattggcctcctttcctttacaagagacataaagcagtttgataaggacgtcgacttcggatgctattatcggctcgaatatgcgcatggaccggtcattgagagcttttccgatgattttgcgtttatatctatgggcctgttgatcgatgatattgaacgatgtgaaaactcctggtgattggaccgtcacagaatatacgtgagacttgaccactctctcattgtcgtaaatgtctgtcccatgtcagcagcaagatacaggtgggccagagtcgtcgagtcgcctaccgtgtaatgcacgaacagtgttgaaaatgagtttgtttggtccatgccgcatgatatccccatactgagcgtgatcgtgtgcggtaattaggtgcaggttcttctgcactgcatagtatccgttgcgaaagtcacttagctttgccacgaggggcccaggaaaacgtcggagtggatgaaagaacacgcgataagcaaagaaggtagataactttttgcaatcagtaaacatagatttagctcaattgagcttagacctacggaaagaagcagaagacacccaatagaccaggcaacaggcgtatctgagaatggaacactcgccatgatgggtgtacggttcgaggcaaggaaagggagtacagtatactcagtcgcaattgagaccagattggctttcagcacataaaatatgtggagggagacgaatgacaatgtcaagaattccaatttctgtggcaggttgtcaaactgttggtcgaaagcgagcgtttaattatgtgacctcatagatgcatacattccgtagcattctattcgttgagaaaatgcggccgatcatgtccgttggtttgtttactgcgggtgatgtaagggagaacaagacggaccaacggggaaaacgaatgtcaggtgactaatcgaggtcgaacgcccatatcatcacaatgctgtcgtgatagttgtatcgttattcaattattttcccttgcccatgatggaaaacgtctccttggtctactctgcgcggtgtatatggaccgtctgtcttgctatactcgctactcatgttttcatatcgaggatcaaaggatggcttcatgcaagagcgattatgcgcagacataactgcgaagagccaccaagctaccgccacaaggatcctttcttcggcttagatttcttcattctttataagaaggcttttgaaaagcgggatttcttggctctgaacgaaagactcttccaggaatacggcaaaacgtacctagcttatcctcttggtactcctactatcaaaacaatgaacaccgagatcaccaaatatgttcatgcgacttattttgagcactttggagttgagaaaatccgagcaggtattgaatacctatggggtgatggaattactgttgttgatggagacaaatggatggcgcgacgacgactcatcaaaccgtcatttgatgttgttcatatctcgaacctcgagaatagaagtctaactggacatgtagcaaagcttatggatcttattcctcgagatggctcttctgttgatcttatgccgctcttcatgcgcttgagcttggatacctcgagcgagtttattttcggacagtctctgaactccttagaatctcctgattcacagaaagctttcatggaagcatatttctacgcgcagagaggttgcggagtgcgtctaatacttggtcccatgttgcgttttctgcatcgggacccgaaatggtgggctgcgtgtgacaccgtgaatcaattcttagacgaacgggtcgatgaagccttagccaggataaaggacggctccaaggctaagcttgaagatcctcaatctcaacctcgcctcatagacgacatggcgagagttacacaagatcgattaacgctccgatatcaaatgcagaatatcttcactccagcccacgatggcgctgcggtgactctgagtaatgcgttcttccacttatctcggtgtccgactgcatggtcaaaacttagagacgagatactaccttcgaaagatctaccgatcacatacgacttgctcaaaacctaccagtatttgaagaacgtcatccgcgaaacacatcgcgtgacacctatctcgacaatgatttcgcgccagtgcgccaaagaggtagtgttccccactggcgggggtaagcacggccaatcgcctctttatgtgccgaaaggaactacgatcgagatgaactttcgatgcacactaagagacaaagacttctggggagacgacgctgatgtgtttagaccggaaaggtgggagaatcttaagcctacatgggagtatacaccatttggcggaggcccccgaatatgtcctgggtctcggctagcttttgcagagacagcgtttactttagtcacctttctccgagaatttgggaggctagagagtcgtgatgatcgaccgtggacagaagagacaagaacgactttccaaaatctgaatggcactcgtgtcgccctgtttcctgcctaatgtagatagtctgtagttcgatattcaatatttctagtgcatacgcagagtaattgcggccgacctttctccctgttttgtccatcgtgggtctccccaaggcaatcaaccatccagactgcttcatgccttgtctccaaatgctaaatcccttctatctctggagatagtgcaagggttgaaacgccaggcaccgcgaaatcgtctcccataaacgcgatcgatcacaaaggggacgaagaacggaacggatgggaaattatgtacacctccttcaaagcttcgatccgccgttccaaataccaaaggcgcaattcgatactaggacaccgttaatcgtgttgtttagaatcagtttcaggggcgtcttacattgtccgtctgcatcatcaacttttcgaagtccttgtacgcctggcggattttgtcactgtcgtaagcatcgagagcgcgaagactgtcgatctcttcatgtaaatgcttcgtgaacggttccgaaaaatcttcaatgagacccttgagtcgctgaccgtcgtattcagctggcttacaagtcttaacgtactcatcgaattggatgaatcccggtgtgaaggctttgtgttgctcgacattttcctccatgagtccttcaataccggatatccgctctatagcagggaagagctgctcttcttctacatcgtgatgatgatgcatagactcgcaccaacattgacaatatgtcaaaaagtcttgaatcgcagtcaggtcagtacgtggcaggttcgctgcttgaaggtatattgagttcaacccccggattacaccattgtgcgctaagg

SEQ ID NO: 11343 - DNA, 567 bp, Muscodor strobelii
  misc_feature: SGI cDNA ID NO. 563638
  misc_feature: Encodes the peptide sequence at SEQ ID NO 11344
atgtctggtcagtgggcagatcaaccatatccattgatttctacactcgcgttttcacaaaacaaaacacatgctgcatactatgtcgcaacagaaatggccttagcgcacaatggtgtaatccgggggttgaactcaatataccttcaagcagcgaacctgccacgtactgacctgactgcgattcaagactttttgacatattgtcaatgttggtgcgagtctatgcatcatcatcacgatgtagaagaagagcagctcttccctgctatagagcggatatccggtattgaaggactcatggaggaaaatgtcgagcaacacaaagccttcacaccgggattcatccaattcgatgagtacgttaagacttgtaagccagctgaatacgacggtcagcgactcaagggtctcattgaagatttttcggaaccgttcacgaagcatttacatgaagagatcgacagtcttcgcgctctcgatgcttacgacagtgacaaaatccgccaggcgtacaaggacttcgaaaagttgatgatgcagacggacaatgtaagacgcccctga

SEQ ID NO: 11344 - protein, 188 aa, Muscodor strobelii
  misc_feature: SGI Peptide ID NO. 563638
  misc_feature (33)..(173): NCBI GI: 169605969 Blast Desc: SNOG_06017 [Phaeosphaeria nodorum SN15] gi|160706883|gb|EAT87081.2| SNOG_06017 [Phaeosphaeria nodorum SN15]
  misc_feature (2)..(188): NCBI GI: 145234108 Blast Desc: An02g12940 [Aspergillus niger] gi|134057367|emb|CAK37922.1| protein product [Aspergillus niger]
  misc_feature (1)..(175): NCBI GI: 261361447 Blast Desc: hemerythrin HHE cation binding domain-containing protein [Verticillium albo-atrum VaMs.102]
  misc_feature (4)..(187): NCBI GI: 242813806 Blast Desc: conserved [Talaromyces stipitatus ATCC 10500] gi|218714580|gb|EED14003.1| conserved [Talaromyces stipitatus ATCC 10500]
  misc_feature (5)..(187): NCBI GI: 121711445 Blast Desc: hemerythrin HHE cation binding domain protein [Aspergillus clavatus NRRL 1] gi|119401489|gb|EAW11912.1| hemerythrin HHE cation binding domain protein [Aspergillus NRRL
  misc_feature (4)..(168): NCBI GI: 212537829 Blast Desc: conserved [Penicillium marneffei ATCC 18224] gi|210068812|gb|EEA22903.1| conserved [Penicillium marneffei ATCC 18224]
  misc_feature (1)..(177): NCBI GI: 258565641 Blast Desc: [Uncinocarpus reesii 1704] gi|237907266|gb|EEP81667.1| [Uncinocarpus reesii 1704]
  misc_feature (5)..(167): NCBI GI: 261352258 Blast Desc: hemerythrin HHE cation binding domain-containing protein [Verticillium albo-atrum VaMs.102]
  misc_feature (1)..(179): NCBI GI: 171678201 Blast Desc: protein product [Podospora anserina] gi|170937170|emb|CAP61827.1| protein product [Podospora anserina]
  misc_feature (4)..(163): NCBI GI: 242808174 Blast Desc: conserved [Talaromyces stipitatus ATCC 10500] gi|218715733|gb|EED15155.1| conserved [Talaromyces stipitatus ATCC 10500]
MSGQWADQPYPLISTLAFSQNKTHAAYYVATEMALAHNGVIRGLNSIYLQAANLPRTDLTAIQDFLTYCQCWCESMHHHHDVEEEQLFPAIERISGIEGLMEENVEQHKAFTPGFIQFDEYVKTCKPAEYDGQRLKGLIEDFSEPFTKHLHEEIDSLRALDAYDSDKIRQAYKDFEKLMMQTDNVRRP

SEQ ID NO: 11345 - DNA, 2215 bp, Muscodor strobelii
  misc_feature: SGI EST ID NO. CUFF.27061.2
  misc_feature: Variant of the nucleotide sequence at SEQ ID NO 11343
ctcgggtggacaaaagagccacatctgattcgactgttcattcaattgggatttcttgtcgcaatcttagctgcgcctcaataattgttccgttcagcatccattcttcagattcataatgtggtttgactgcttactcgatgattaaacacgtcatatctcacggacaagctcgcatagaattctcgtaacttagatttgatgtcctacatacttggcgcttcggcgactactgcgactgcttcgagatggaggacggtataattacgagtggctcgccggagtgcagcattcatcgtgctccatagtcaacgcctcagctctcttacaacgtccccaacagcaggaataactcacgagcttcattcttaagactatcaaatcactgtcgtgcgaaatccaaactcaccatgtctggtcagtgggcagatcaaccatatccattgatttctacactcgcgttttcacaaaacaaaacacatgctgcatactatgtcgcaacagaaatggccttagcgcacaatggtgtaatccgggggttgaactcaatataccttcaagcagcgaacctgccacgtactgacctgactgcgattcaagactttttgacatattgtcaatgttggtgcgagtctatgcatcatcatcacgatgtagaagaagagcagctcttccctgctatagagcggatatccggtattgaaggactcatggaggaaaatgtcgagcaacacaaagccttcacaccgggattcatccaattcgatgagtacgttaagacttgtaagccagctgaatacgacggtcagcgactcaagggtctcattgaagatttttcggaaccgttcacgaagcatttacatgaagagatcgacagtcttcgcgctctcgatgcttacgacagtgacaaaatccgccaggcgtacaaggacttcgaaaagttgatgatgcagacggacaattatcgaattgcgcctttggtatttggaacggcggatcgaagctttgaaggaggtgtacataatttcccatccgttccgttcttcgtcccctttgtgatcgatcgcgtttatgggagacgatttcgcggtgcctggcgtttcaacccttgcactatctccagagatagaagggatttagcatttggagacaaggcatgaagcagtctggatggttgattgccttggggagacccacgatggacaaaacagggagaaaggtcggccgcaattactctgcgtatgcactagaaatattgaatatcgaactacagactatctacattaggcaggaaacagggcgacacgagtgccattcagattttggaaagtcgttcttgtctcttctgtccacggtcgatcatcacgactctctagcctcccaaattctcggagaaaggtgactaaagtaaacgctgtctctgcaaaagctagccgagacccaggacatattcgggggcctccgccaaatggtgtatactcccatgtaggcttaagattctcccacctttccggtctaaacacatcagcgtcgtctccccagaagtctttgtctcttagtgtgcatcgaaagttcatctcgatcgtagttcctttcggcacataaagaggcgattggccgtgcttacccccgccagtggggaacactacctctttggcgcactggcgcgaaatcattgtcgagataggtgtcacgcgatgtgtttcgcggatgacgttcttcaaatactggtaggttttgagcaagtcgtatgtgatcggtagatctttcgaaggtagtatctcgtctctaagttttgaccatgcagtcggacaccgagataagtggaagaacgcattactcagagtcaccgcagcgccatcgtgggctggagtgaagatattctgcatttgatatcggagcgttaatcgatcttgtgtaactctcgccatgtcgtctatgaggcgaggttgagattgaggatcttcaagcttagccttggagccgtcctttatcctggctaaggcttcatcgacccgttcgtctaagaattgattcacggtgtcacacgcagcccaccatttcgggtcccgatgcagaaaacgcaacatgggaccaagtattagacgcactccgcaacctctctgcgcgtagaaatatgcttccatgaaagctttctgtgaatcaggagattctaaggagttcagagactgtccgaaaataaactcgctcgagg

SEQ ID NO: 11346 - DNA, 813 bp, Muscodor strobelii
  misc_feature: SGI cDNA ID NO. 563639
  misc_feature: Encodes the peptide sequence at SEQ ID NO 11347
atgaaggtcctcatcctcggtgcaaccggcaacctaggctcacgccttgtctcagcacttctcacgcataaccacaacgtcgtcgcatttgtccgctcatcaaagaagctcgagactcttctcccagcatcagtatatcaacaaataaatgtcgttgaaggcgatgcgacgagctcaacctcggtcaagaaggctattttgagcaccgactgtgatgccgtagttagcgccgcaggcgtagcggcagtggctccgtggggtaaatcagatttgcctgtcatctttcgcgctatcgtcgaaggcgtgcgagatgcagcgacagagaggaagaagcctttgagaacgtggatgttaggaggtcagagtgtattgcattaccctggaacggaatccatgttgtcgaacttgtatgtcaaccctacgccagcttctgatcgcattctaacatcttccagtatccctatttttcttgagcatcgtcagaacctgaagtttctggagtcactaccacctaatactgtagaatggtctatgctttgccctcagactatggtccctgagtcttcagacttaaacgttccgttgaagagtacacatggcaagctcgtcgcgaaggctgctgctccccctgagtggaaagattcttggatgaaatccatcccgttgattggcaagcatatcgtcattggctccaatgcgagccgatacgaaacaacgctcgaacagaacgcggactttatcgcaagcgacctcgcgaatgggcagggtgaatggattcgaaaagcggtcggggtgattgatcccgcgaagtaa

SEQ ID NO: 11347 - protein, 270 aa, Muscodor strobelii
  misc_feature: SGI Peptide ID NO. 563639
  misc_feature (3)..(230): Pfam Id: PF01370 Pfam Desc: NAD dependent epimerase/dehydratase family
  misc_feature (3)..(104): Pfam Id: PF01370 Pfam Desc: NAD dependent epimerase/dehydratase family
  misc_feature (3)..(36): Pfam Id: PF05368 Pfam Desc: NmrA-like family
  misc_feature (1)..(259): NCBI GI: 169622483 Blast Desc: SNOG_14466 [Phaeosphaeria nodorum SN15] gi|111056886|gb|EAT78006.1| SNOG_14466 [Phaeosphaeria nodorum SN15]
  misc_feature (1)..(265): NCBI GI: 212537827 Blast Desc: PMAA_095070 [Penicillium marneffei ATCC 18224] gi|210068811|gb|EEA22902.1| PMAA_095070 [Penicillium marneffei ATCC 18224]
  misc_feature (1)..(270): NCBI GI: 240110895 Blast Desc: CPC735_037570 [Coccidioides posadasii C735 delta SOWgp]
  misc_feature (1)..(259): NCBI GI: 119196399 Blast Desc: [Coccidioides immitis RS]
  misc_feature (1)..(270): NCBI GI: 242808180 Blast Desc: TSTA_046100 [Talaromyces stipitatus ATCC 10500] gi|218715734|gb|EED15156.1| TSTA_046100 [Talaromyces stipitatus ATCC 10500]
  misc_feature (40)..(270): NCBI GI: 258569689 Blast Desc: [Uncinocarpus reesii 1704] gi|237903918|gb|EEP78319.1| [Uncinocarpus reesii 1704]
  misc_feature (1)..(195): NCBI GI: 251797214 Blast Desc: NADH-flavin reductase-like protein [Paenibacillus sp. JDR-2] gi|247544840|gb|ACT01859.1| NADH-flavin reductase-like protein [Paenibacillus sp. JDR-2]
  misc_feature (1)..(223): NCBI GI: 13470514 Blast Desc: mlr0241 [Mesorhizobium loti MAFF303099] gi|14021256|dbj|BAB47869.1| mlr0241 [Mesorhizobium loti MAFF303099]
  misc_feature (1)..(199): NCBI GI: 264679751 Blast Desc: NAD-dependent epimerase/dehydratase [Comamonas testosteroni CNB-2] gi|262210266|gb|ACY34364.1| NAD-dependent epimerase/dehydratase [Comamonas testosteroni CNB-2]
  misc_feature (1)..(190): NCBI GI: 221065697 Blast Desc: NAD-dependent epimerase/dehydratase [Comamonas testosteroni KF-1] gi|220710720|gb|EED66088.1| NAD-dependent epimerase/dehydratase [Comamonas testosteroni KF-1]
MKVLILGATGNLGSRLVSALLTHNHNVVAFVRSSKKLETLLPASVYQQINVVEGDATSSTSVKKAILSTDCDAVVSAAGVAAVAPWGKSDLPVIFRAIVEGVRDAATERKKPLRTWMLGGQSVLHYPGTESMLSNLYVNPTPASDRILTSSSIPIFLEHRQNLKFLESLPPNTVEWSMLCPQTMVPESSDLNVPLKSTHGKLVAKAAAPPEWKDSWMKSIPLIGKHIVIGSNASRYETTLEQNADFIASDLANGQGEWIRKAVGVIDPAK

SEQ ID NO: 11348 - DNA, 362 bp, Muscodor strobelii
  misc_feature: SGI EST ID NO. CUFF.26912.0
  misc_feature: Variant of the nucleotide sequence at SEQ ID NO 11346
gttccgttgaagagtacacatggcaagctcgtcgcgaaggctgctgctccccctgagtggaaagattcttggatgaaatccatcccgttgattggcaagcatatcgtcattggctccaatgcgagccgatacgaaacaacgctcgaacagaacgcggactttatcgcaagcgacctcgcgaatgggcagggtgaatggattcgaaaagcggtcggggtgattgatcccgcgaagtaaagagttggtgctttgtcgcggatgttaggcttaggagagcagattgtgtcgtgaggcaggactcattgtcaatgcaaacctgatactataataccaatgttctgcgaacaatatttagataatca

SEQ ID NO: 11349 - DNA, 1026 bp, Muscodor strobelii
  misc_feature: SGI cDNA ID NO. 563640
  misc_feature: Encodes the peptide sequence at SEQ ID NO 11350
atgcgtacgcgcacatcactgagggttttcgccctgttgagcacaacgatatggacaataccatccctcgcaacattaatgttcacaaacaccgattataccatagtagcaggtgaagcgtttgaaattacatggacatccgacgtgaatgattcgaccttcacgcttacgctcgttgatgcgagcaatacgattgccgtgactgaggtcgaagttttggattcaaatgagaagggagattcatatacatggacaccacctgatagtctagagtctggcacatacgcctttgagatctcagacggcaccgacgtgaatttctctgaggtgtggtcttacgaggcctccggtagttcttcaggatccaatgaaacttcgactgctgcggaacagcctttgactacaagcacgactacaaccccatcagctacggcagaatcctcaacgaccacaccctcgacgaccagtaaaactacaacttcctctaaatctccaagttcaacggaatctaacgcagaatctaccctttcctcccaaacctcctcaaagacctcattcacaacctccacaaccacatcatctacctcatcagcatcacccatctcatcatcaaacaccagcgcaacctcaacaccaaactcgtcagactccgattccaactccaactccaccaccacctccaaatctagcggtctctcaacaggcgcaaaagccggaatcggcgcaggcgtcgggctcgtcgggctcctcatcctaatcatcctcggcatcacgctctaccgacgggggcgcgccgcaggacgaaaagacatccaccccactccccccaaccacgcggaactcgacagctcaccacctgttgtaaagaagcacgagctcgctggccagagcgtagcagaggtacatgggaaccacgtcgtgcccgagttatggcagggccattatgagcagtggaggcaggagccacgggagatggatgcttggactcctgcgcaggggtatgggcatgcgcatggggagaaataa

SEQ ID NO: 11350 - protein, 341 aa, Muscodor strobelii
  misc_feature: SGI Peptide ID NO. 563640
  misc_feature (10)..(120): NCBI GI: 85116972 Blast Desc: NCU00957 [Neurospora crassa OR74A] gi|28926954|gb|EAA35914.1| [Neurospora crassa OR74A] gi|38567029|emb|CAE76327.1| related to extracellular matrix
  misc_feature (28)..(117): NCBI GI: 261356360 Blast Desc: [Verticillium albo-atrum VaMs.102]
  misc_feature (9)..(137): NCBI GI: 226278214 Blast Desc: PAAG_04829 [Paracoccidioides brasiliensis Pb01]
  misc_feature (22)..(131): NCBI GI: 256734527 Blast Desc: NECHADRAFT_102374 [Nectria haematococca mpVI 77-13-4]
  misc_feature (28)..(111): NCBI GI: 238845132 Blast Desc: extracellular matrix protein [Microsporum canis CBS 113480]
  misc_feature (28)..(118): NCBI GI: 116180556 Blast Desc: CHGG_00906 [Chaetomium globosum CBS 148.51] gi|88185203|gb|EAQ92671.1| CHGG_00906 [Chaetomium globosum CBS 148.51]
  misc_feature (26)..(117): NCBI GI: 156063466 Blast Desc: SS1G_01851 [Sclerotinia sclerotiorum 1980] gi|154697185|gb|EDN96923.1| SS1G_01851 [Sclerotinia sclerotiorum 1980]
  misc_feature (29)..(117): NCBI GI: 154319131 Blast Desc: BC1G_02517 [Botryotinia fuckeliana B05.10] gi|150856948|gb|EDN32140.1| BC1G_02517 [Botryotinia fuckeliana B05.10]
  misc_feature (27)..(120): NCBI GI: 256721310 Blast Desc: NECHADRAFT_87001 [Nectria haematococca mpVI 77-13-4]
MRTRTSLRVFALLSTTIWTIPSLATLMFTNTDYTIVAGEAFEITWTSDVNDSTFTLTLVDASNTIAVTEVEVLDSNEKGDSYTWTPPDSLESGTYAFEISDGTDVNFSEVWSYEASGSSSGSNETSTAAEQPLTTSTTTTPSATAESSTTTPSTTSKTTTSSKSPSSTESNAESTLSSQTSSKTSFTTSTTTSSTSSASPISSSNTSATSTPNSSDSDSNSNSTTTSKSSGLSTGAKAGIGAGVGLVGLLILIILGITLYRRGRAAGRKDIHPTPPNHAELDSSPPVVKKHELAGQSVAEVHGNHVVPELWQGHYEQWRQEPREMDAWTPAQGYGHAHGEK

SEQ ID NO: 11351 - DNA, 843 bp, Muscodor strobelii
  misc_feature: SGI cDNA ID NO. 563641
  misc_feature: Encodes the peptide sequence at SEQ ID NO 11352
atgccgtccggcaggaggatacgcgggtatatactgctcgccatattgtctttgggcatggtcttgatgttcacgtctttcctcaaattcatgtcctcccaaccacgcgacatccgaacctccaacgactttctcgacaagacaagatacggattggatagcgaccatggaaaggtcaaccagatcgtgatgggcgctgggagcaacaacccaaaagaccacgatggcgacggcaacgttgacgaggatgatgagaaactcgcccagcagatgtccgagagcctacgggctgcggagaagaaggccaaagagctcgcaaacgccaaggcgcccaagccagactctcccgccgaagtagtcggtgttgggagctcggctggtggccagaccaagggcaagggcaagaatagactttcgaagccttccaaagacgaggaggaggaagaggacgatagctcggacgtagcagatgaaagctccgaggtcgagaccatgttcaatagcatcctgacaaggtcgcctatgatcatcttctcgaaaacctactgcccctactccaagaaggcgaaaaccttacttctcgaggaatatcagatcctacccgcgccctacgtcgtcgaactcgacgagcaccgcctcggaaaggagctacaagacctactatacgagaagacgggccgcaagacggtacccaacattttgatcaacggtaaaaccatcggcggcagcgacgacattgctttacttgagaaacacaatacgctcgtggacgtggtgaagtccaaatccaaggagggcaagggcaagccgctcaccatgacgaggcggttcgagcgcggctag

SEQ ID NO: 11352 - protein, 280 aa, Muscodor strobelii
  misc_feature: SGI Peptide ID NO. 563641
  misc_feature (175)..(240): Pfam Id: PF00462 Pfam Desc: Glutaredoxin
  misc_feature (1)..(277): NCBI GI: 145614768 Blast Desc: MGG_10371 [Magnaporthe grisea 70-15] gi|145021657|gb|EDK05786.1| MGG_10371 [Magnaporthe grisea 70-15]
  misc_feature (1)..(276): NCBI GI: 85117048 Blast Desc: NCU00974 [Neurospora crassa OR74A] gi|28926971|gb|EAA35931.1| [Neurospora crassa OR74A] gi|38567046|emb|CAE76344.1| related to glutaredoxin [Neurospora
  misc_feature (1)..(277): NCBI GI: 171684345 Blast Desc: protein product [Podospora anserina] gi|170942133|emb|CAP67785.1| protein product [Podospora anserina]
  misc_feature (1)..(261): NCBI GI: 116192281 Blast Desc: CHGG_05858 [Chaetomium globosum CBS 148.51] gi|88181771|gb|EAQ89239.1| CHGG_05858 [Chaetomium globosum CBS 148.51]
  misc_feature (1)..(260): NCBI GI: 154292088 Blast Desc: BC1G_14853 [Botryotinia fuckeliana B05.10] gi|150846280|gb|EDN21473.1| BC1G_14853 [Botryotinia fuckeliana B05.10]
  misc_feature (1)..(260): NCBI GI: 156062060 Blast Desc: SS1G_01144 [Sclerotinia sclerotiorum 1980] gi|154696482|gb|EDN96220.1| SS1G_01144 [Sclerotinia sclerotiorum 1980]
  misc_feature (1)..(280): NCBI GI: 256735105 Blast Desc: NECHADRAFT_74598 [Nectria haematococca mpVI 77-13-4]
  misc_feature (16)..(278): NCBI GI: 119184813 Blast Desc: CIMG_07164 [Coccidioides immitis RS]
  misc_feature (1)..(256): NCBI GI: 46108576 Blast Desc: FG01170.1 [Gibberella zeae PH-1]
  misc_feature (110)..(260): NCBI GI: 240109991 Blast Desc: Glutaredoxin family protein [Coccidioides posadasii C735 delta SOWgp]
MPSGRRIRGYILLAILSLGMVLMFTSFLKFMSSQPRDIRTSNDFLDKTRYGLDSDHGKVNQIVMGAGSNNPKDHDGDGNVDEDDEKLAQQMSESLRAAEKKAKELANAKAPKPDSPAEVVGVGSSAGGQTKGKGKNRLSKPSKDEEEEEDDSSDVADESSEVETMFNSILTRSPMIIFSKTYCPYSKKAKTLLLEEYQILPAPYVVELDEHRLGKELQDLLYEKTGRKTVPNILINGKTIGGSDDIALLEKHNTLVDVVKSKSKEGKGKPLTMTRRFERG

SEQ ID NO: 11353 - DNA, 1647 bp, Muscodor strobelii
  misc_feature: SGI EST ID NO. CUFF.26922.0
  misc_feature: Variant of the nucleotide sequence at SEQ ID NO 11351
tcggcggccatcattctacacattcactcggtcgcgtttagcaagcgtgcagttgcgattccatcttcgaccgatatctgtgcttgcatggcatgtctactacatacatgattcagtagagtttagagccaacgaccggccgaaaccccaaggcgggagccgaaacacgtcgctgtccgaatccttcgacaccgaccgttccatacacctcttccatctactctcaatctcgctcgaaagcccttccgaatcatctacaatcacaatgccgtccggcaggaggatacgcgggtatatactgctcgccatattgtctttgggcatggtcttgatgttcacgtctttcctcaaattcatgtcctcccaaccacgcgacatccgaacctccaacgactttctcgacaagacaagatacggattggatagcgaccatggaaaggtcaaccagatcgtgatgggcgctgggagcaacaacccaaaagaccacgatggcgacggcaacgttgacgaggatgatgagaaactcgcccagcagatgtccgagagcctacgggctgcggagaagaaggccaaagagctcgcaaacgccaaggcgcccaagccagactctcccgccgaagtagtcggtgttgggagctcggctggtggccagaccaagggcaagggcaagaatagactttcgaagccttccaaagacgaggaggaggaagaggacgatagctcggacgtagcagatgaaagctccgaggtcgagaccatgttcaatagcatcctgacaaggtcgcctatgatcatcttctcgaaaacctactgcccctactccaagaaggcgaaaaccttacttctcgaggaatatcagatcctacccgcgccctacgtcgtcgaactcgacgagcaccgcctcggaaaggagctacaagacctactatacgagaagacgggccgcaagacggtacccaacattttgatcaacggtaaaaccatcggcggcagcgacgacattgctttacttgagaaacacaatacgctcgtggacgtggtgaagtccaaatccaaggagggcaagggcaagccgctcaccatgacgaggcggttcgagcgcggctaggtcccgctgccctatttctcctaatacggcgctctccgccgatgctgttacgcttcaaggcctgtcgtccttttgaggctaagattgatatggtatgggttgcaacgagaaacagatttgcagagtcaagtttggtatgcattgatggcgttttggggtggggtggtagattttggtatcaggtcccgtgtcgacgaatacttcagcgcatttgcgcgaaggaccaaacatcgctcgaaactatgtgttacttgcttatgacgaggatgcaatgcgacgcaagcatcgggcctgttgtacattgaaagttctttggtacacttgtattactaccgaccttgtatgtatgagcttgaattaggtcgtgcctttatacgtcaacaccagtactagctaggtagacgaagaatgacaagggaaagaatattgtaagcctggtctacgctctagcttgcgtttgaagacttcattgtcgttgatcatggtatgtgcatcggaacctaccctattggtgtcgagagagtaagacatattcccga

SEQ ID NO: 11354 - DNA, 939 bp, Muscodor strobelii
  misc_feature: SGI cDNA ID NO. 563642
  misc_feature: Elevated expression when VOC is produced
  misc_feature: Encodes the peptide sequence at SEQ ID NO 11355
atggattattcagacctaaacgctttcaccctgccttatcagctaactaaacaaattcgccgtgatgtcgaaaaatccagactgacttatttcgaacacaaggtttatccactattagaaccaacccagcccgacctctcggccaagggaaagactgtcctgatcacgggtgtatcaggaggcataggcaaggccatcgccgaacaatgggccatcgcgggagcctccggcatcgtgatcacggggcgcaagctcgatgtgctcgaggacatcgcgacgcagctccggagtctcgccccggccgacactaaaatcttctcccaagcggccgacatcaccaacgaggcctcagtcgcagcgctcttcacggctatcaaagacacggtcggcaagatagatgtgctagtcaacagcgcggggagcctagagtcgggcgccgtcggcgacgtcgatggcgcgaagttcttcaacgacttccaagttaacgtcttaggcacatacctgataacccagagcttcctcaagcaggccgacggcgtcggcactatcatcagcttcacgacaggagccatcggcacagtatttccaggtatggggagctacacggcgtccaagttggctctcactcggattatggagaacctacacgccgaacagccgggcattcgcgtctttatgctcatgccgggaatcgtcatgtccggaatgacggtcgattcgctgaaaccgtatgccaaggatagtccccatcttagtggcagttggacgctgttattgtctactcctcgcgcggagtggatgcgcggcggtattgtcagtgtgaattgggatgtggaggagatggaggcacacaaggatgagattgtccgcgacaatctgctcagtcgggcatttttgaacgccaagctcgggaaagatgggcacccctggaagggatag

SEQ ID NO: 11355 - protein, 312 aa, Muscodor strobelii
  misc_feature: SGI Peptide ID NO. 563642
  misc_feature (51)..(220): Pfam Id: PF00106 Pfam Desc: short chain dehydrogenase
  misc_feature (53)..(275): Pfam Id: PF01370 Pfam Desc: NAD dependent epimerase/dehydratase family
  misc_feature (52)..(222): Pfam Id: PF08659 Pfam Desc: KR domain
  misc_feature (51)..(218): Pfam Id: PF00106 Pfam Desc: short chain dehydrogenase
  misc_feature (52)..(155): Pfam Id: PF08659 Pfam Desc: KR domain
  misc_feature (1)..(310): NCBI GI: 169614163 Blast Desc: SNOG_10217 [Phaeosphaeria nodorum SN15] gi|111061432|gb|EAT82552.1| SNOG_10217 [Phaeosphaeria nodorum SN15]
  misc_feature (5)..(311): NCBI GI: 189193847 Blast Desc: conserved [Pyrenophora tritici-repentis Pt-1C-BFP] gi|187978826|gb|EDU45452.1| conserved [Pyrenophora tritici-repentis Pt-1C-BFP]
  misc_feature (5)..(300): NCBI GI: 154296137 Blast Desc: BC1G_12798 [Botryotinia fuckeliana B05.10] gi|150843759|gb|EDN18952.1| BC1G_12798 [Botryotinia fuckeliana B05.10]
  misc_feature (13)..(294): NCBI GI: 170101260 Blast Desc: [Laccaria bicolor S238N-H82] gi|164643202|gb|EDR07455.1| [Laccaria bicolor S238N-H82]
  misc_feature (9)..(294): NCBI GI: 170111681 Blast Desc: [Laccaria bicolor S238N-H82] gi|164638087|gb|EDR02367.1| [Laccaria bicolor S238N-H82]
  misc_feature (5)..(299): NCBI GI: 156032483 Blast Desc: SS1G_13939 [Sclerotinia sclerotiorum 1980] gi|154699341|gb|EDN99079.1| SS1G_13939 [Sclerotinia sclerotiorum 1980]
  misc_feature (5)..(295): NCBI GI: 238502247 Blast Desc: short-chain dehydrogenase, [Aspergillus flavus NRRL3357] gi|220691167|gb|EED47515.1| short-chain dehydrogenase, [Aspergillus flavus NRRL3357]
  misc_feature (35)..(304): NCBI GI: 189209688 Blast Desc: conserved [Pyrenophora tritici-repentis Pt-1C-BFP] gi|187977269|gb|EDU43895.1| conserved [Pyrenophora tritici-repentis Pt-1C-BFP]
  misc_feature (35)..(294): NCBI GI: 145235005 Blast Desc: An03g02550 [Aspergillus niger] gi|134057827|emb|CAK38222.1| protein product [Aspergillus niger]
  misc_feature (31)..(294): NCBI GI: 46117514 Blast Desc: FG04599.1 [Gibberella zeae PH-1]
  misc_feature (45)..(274): SWISSPROT Homolog: EC 1.1.1.159 7-alpha-hydroxysteroid dehydrogenase
  misc_feature: Useful for introducing or modulating the production of volatile compounds
MDYSDLNAFTLPYQLTKQIRRDVEKSRLTYFEHKVYPLLEPTQPDLSAKGKTVLITGVSGGIGKAIAEQWAIAGASGIVITGRKLDVLEDIATQLRSLAPADTKIFSQAADITNEASVAALFTAIKDTVGKIDVLVNSAGSLESGAVGDVDGAKFFNDFQVNVLGTYLITQSFLKQADGVGTIISFTTGAIGTVFPGMGSYTASKLALTRIMENLHAEQPGIRVFMLMPGIVMSGMTVDSLKPYAKDSPHLSGSWTLLLSTPRAEWMRGGIVSVNWDVEEMEAHKDEIVRDNLLSRAFLNAKLGKDGHPWKG

SEQ ID NO: 11356 - DNA, 1471 bp, Muscodor strobelii
  misc_feature: SGI EST ID NO. CUFF.26928.0
  misc_feature: Variant of the nucleotide sequence at SEQ ID NO 11354
ttagtccatgcgtcccttgcatctgtgataagagaaagcaaaacaacgtatcgttaactaaaatggattattcagacctaaacgctttcaccctgccttatcagctaactaaacaaattcgccgtgatggtacgtatcaaaacctttgtgctttgtagatcttgactctttagcagtatctttgctaatatgtactatagtaagtagtctcggttctacgtaccagagtgacttcattcggactatgaccagtcgaaaaatccagactgacttatttcgaacacaaggtttatccactattagaaccaacccagcccgacctctcggccaagggaaagactgtcctgatcacgggtgtatcaggaggcataggcaaggccatcgccgaacaatgggccatcgcgggagcctccggcatcgtgatcacggggcgcaagctcgatgtgctcgaggacatcgcgacgcagctccggagtctcgccccggccgacactaaaatcttctcccaagcggccgacatcaccaacgaggcctcagtcgcagcgctcttcacggctatcaaagacacggtcggcaagatagatgtgctagtcaacagcgcggggagcctagagtcgggcgccgtcggcgacgtcgatggcgcgaagttcttcaacgacttccaagttaacgtcttaggcacatacctgataacccagagcttcctcaagcaggccgacggcgtcggcactatcatcagcttcacgacaggagccatcggcacagtatttccaggtatggggagctacacggcgtccaagttggctctcactcggattatggagaacctacacgccgaacagccgggcattcgcgtctttatgctcatgccgggaatcgtcatgtccggaatgacggtcgattcgctgaaaccgtatgccaaggatagtccccatcttagtggcagttggacgctgttattgtctactcctcgcgcggagtggatgcgcggcggtattgtcagtgtgaattgggatgtggaggagatggaggcacacaaggatgagattgtccgcgacaatctgctcagtcgggcatttttgaacgccaagctcgggaaagatgggcacccctggaagggatagtggagagctgatggatatttgcgacgatgattagcaatgcgactgcgctacactttcaggatcaattagctgagtgtttcgatgcgatacccatcaaccatcaatacaatcgtggcgtgtctgccgacaatgcagtcatggcccgttgtcttggataaaaaaaacacactaggtggacttcgaatcatgattgaagtccctagcatgatagcgattgttctgtgcattgcaaccaccttcatagtaccctgcactaaaacctccatgcaaaatctatggtacctcagatagccaatgtgaaatgacttctaaaccgtacgtgcgattttgctctaatccgggactcg

SEQ ID NO: 11357 - DNA, 600 bp, Muscodor strobelii
  misc_feature: SGI cDNA ID NO. 563643
  misc_feature: Encodes the peptide sequence at SEQ ID NO 11358
atgcaactgttcaagtctctggccttatttgctttgctaagtgtaccctcacttagcgagccaattcgcgcgccacgaagcaacttcgacattgacactgcgaaacttgaagttcgcaatgaaccaccctcaaatgccgacactgtggacatgggggaaatacgacgagatctgtctggcggttccctaaaaacagacggcctgcaggcctgcataggagtagtcattcgtaacactgtcccaggcccaaaaggccaattcgacaagattcttgcccacatctcgccgacgctctgcgcgaccatggagaacccttccattgatcagcagattgccaacatttggaatcgatatgatgccggcccattcgcgcagcctgaagcgatagtcgcatatccgccatcgaacggtaatcaggcttcagacgctttcaacaactacgtgatcggtcagatgcagaacaatgcgaacacccgcaactgcggcttccgagctatcgaaagggatcatacctatgttaacgaggccggtggctcaagattctggattgatgccaaccaacagatctggtggagcgtctttaacaccccttttgcttag

SEQ ID NO: 11358 - protein, 199 aa, Muscodor strobelii
  misc_feature: SGI Peptide ID NO. 563643
MQLFKSLALFALLSVPSLSEPIRAPRSNFDIDTAKLEVRNEPPSNADTVDMGEIRRDLSGGSLKTDGLQACIGVVIRNTVPGPKGQFDKILAHISPTLCATMENPSIDQQIANIWNRYDAGPFAQPEAIVAYPPSNGNQASDAFNNYVIGQMQNNANTRNCGFRAIERDHTYVNEAGGSRFWIDANQQIWWSVFNTPFA

SEQ ID NO: 11359 - DNA, 972 bp, Muscodor strobelii
  misc_feature: SGI cDNA ID NO. 563644
  misc_feature: Encodes the peptide sequence at SEQ ID NO 11360
atgtcgaacgtcacgggcacgatggccggcaatgaagtgccacatccctatcgcaagggcgacgagttcgagcttcctgttcctagtgttcagtactatccagagcaccggctcatgcagcagctcaaccaagcatgcaccgacgatgatcttgaagagttcaaacgtctactgaaagggtggcgcgagatgcagaacccttctccccctcgaggaccatctcaataccctctgggaacgatcgaaccctgtctataccacgctatcagattagatcgctcaccttttgtggcgcacttgctcgacttgggtctcaagactgggcgtctggctgcatgggaagctcaaaaacagaagtgctcgtctacaatgtggcaggtcctcgttgatcatggccgcttcgacatcaacgcacctttcgaagatcctggcccttctgctcttggatatgtcctcgatgacgaggatctggtcagatggttccttgcacaaggtgcagatccaaacgcggagtcgcgtatagggttgacacctttcctaaaggccgttggacactcatccctgccagttgtgaagctactccatgctgcgggaggctcacctgccatcgcggttcctttcgtgtgtcagccttctcctccactcccacctggcacagcagtgacccctgaaagtcgcctagatgtgcttcaatacgttctagacgctggtgcagatcccaatgcaaagaaatgggctcataatgacaaagggtatgcgagcgactttgactggggtagtggactgaatgcagcacttgctaacggtcgccctgaactggcgcaagaactattacggcgaggggctcggacagatgccactacgcttaattttgcatcacggggagaaacagccttggagcttgcgtttcggcatatgccttcgttggtaccacttgtcgaagactgccgggcacgagagcaaattcattag

SEQ ID NO: 11360 - protein, 323 aa, Muscodor strobelii
  misc_feature: SGI Peptide ID NO. 563644
  misc_feature (39)..(304): NCBI GI: 121714523 Blast Desc: Ankyrin repeat protein [Aspergillus clavatus NRRL 1] gi|119403026|gb|EAW13446.1| Ankyrin repeat protein [Aspergillus clavatus NRRL 1]
  misc_feature (46)..(302): NCBI GI: 242760940 Blast Desc: hspc200, [Talaromyces stipitatus ATCC 10500] gi|218723286|gb|EED22703.1| hspc200, [Talaromyces stipitatus ATCC 10500]
  misc_feature (38)..(304): NCBI GI: 145256316 Blast Desc: An19g00080 [Aspergillus niger CBS 513.88] gi|134084743|emb|CAK47331.1| protein product [Aspergillus niger]
  misc_feature (45)..(302): NCBI GI: 242825487 Blast Desc: hspc200, [Talaromyces stipitatus ATCC 10500] gi|218712268|gb|EED11694.1| hspc200, [Talaromyces stipitatus ATCC 10500]
  misc_feature (70)..(302): NCBI GI: 242825491 Blast Desc: hspc200, [Talaromyces stipitatus ATCC 10500] gi|218712269|gb|EED11695.1| hspc200, [Talaromyces stipitatus ATCC 10500]
  misc_feature (84)..(302): NCBI GI: 255935353 Blast Desc: Pc13g02630 [Penicillium chrysogenum Wisconsin 54-1255] gi|211583323|emb|CAP91332.1| Pc13g02630 [Penicillium chrysogenum Wisconsin 54-1255]
  misc_feature (83)..(282): NCBI GI: 238505856 Blast Desc: conserved [Aspergillus flavus NRRL3357] gi|220690244|gb|EED46594.1| conserved [Aspergillus flavus NRRL3357]
  misc_feature (88)..(199): NCBI GI: 169780094 Blast Desc: [Aspergillus oryzae RIB40] gi|83773251|dbj|BAE63378.1| protein product [Aspergillus oryzae]
  misc_feature (39)..(315): NCBI GI: 255945707 Blast Desc: Pc20g11320 [Penicillium chrysogenum Wisconsin 54-1255] gi|211588356|emb|CAP86461.1| Pc20g11320 [Penicillium chrysogenum Wisconsin 54-1255]
  misc_feature (78)..(284): NCBI GI: 212534374 Blast Desc: ankyrin repeat-containing protein, [Penicillium marneffei ATCC 18224] gi|210069742|gb|EEA23832.1| ankyrin repeat-containing protein, [Penicillium marneffei ATCC 18224]
MSNVTGTMAGNEVPHPYRKGDEFELPVPSVQYYPEHRLMQQLNQACTDDDLEEFKRLLKGWREMQNPSPPRGPSQYPLGTIEPCLYHAIRLDRSPFVAHLLDLGLKTGRLAAWEAQKQKCSSTMWQVLVDHGRFDINAPFEDPGPSALGYVLDDEDLVRWFLAQGADPNAESRIGLTPFLKAVGHSSLPVVKLLHAAGGSPAIAVPFVCQPSPPLPPGTAVTPESRLDVLQYVLDAGADPNAKKWAHNDKGYASDFDWGSGLNAALANGRPELAQELLRRGARTDATTLNFASRGETALELAFRHMPSLVPLVEDCRAREQIH

SEQ ID NO: 11361 - DNA, 1271 bp, Muscodor strobelii
  misc_feature: SGI EST ID NO. CUFF.26936.0
  misc_feature: Variant of the nucleotide sequence at SEQ ID NO 11359
cgacagggctaccttaggcgggacaaggtatagattggtaagggaatgcggattaatcctaccctcatcggacaatgctctttacgtcattcaatccgtttctcataagacacttctcaatcgcatgtgcaccggtacaacggctacgactcgaaattctcccacgacagaatttatatgataatcatctagattgcttaacttatcatcacattttgtaaacacacactgtgcgcagcatgtcgaacgtcacgggcacgatggccggcaatgaagtgccacatccctatcgcaagggcgacgagttcgagcttcctgttcctagtgttcagtactatccagagcaccggctcatgcagcagctcaaccaagcatgcaccgacgatgatcttgaagagttcaaacgtctactgaaagggtggcgcgagatgcagaacccttctccccctcgaggaccatctcaataccctctgggaacgatcgaaccctgtctataccacgctatcagattagatcgctcaccttttgtggcgcacttgctcgacttgggtctcaagactgggcgtctggctgcatgggaagctcaaaaacagaagtgctcgtctacaatgtggcaggtcctcgttgatcatggccgcttcgacatcaacgcacctttcgaagatcctggcccttctgctcttggatatgtcctcgatgacgaggatctggtcagatggttccttgcacaaggtgcagatccaaacgcggagtcgcgtatagggttgacacctttcctaaaggccgttggacactcatccctgccagttgtgaagctactccatgctgcgggaggctcacctgccatcgcggttcctttcgtgtgtcagccttctcctccactcccacctggcacagcagtgacccctgaaagtcgcctagatgtgcttcaatacgttctagacgctggtgcagatcccaatgcaaagaaatgggctcataatgacaaagggtatgcgagcgactttgactggggtagtggactgaatgcagcacttgctaacggtcgccctgaactggcgcaagaactattacggcgaggggctcggacagatgccactacgcttaattttgcatcacggggagaaacagccttggagcttgcgtttcggcatatgccttcgttggtaccacttgtcgaagactgccgggcacgagagcaaattcattagttgtatgaacaggtcgtagaacaaatttgattgtatgatagactccatagcaattgttct

SEQ ID NO: 11362 - DNA, 342 bp, Muscodor strobelii
  misc_feature: SGI cDNA ID NO. 563645
  misc_feature: Encodes the peptide sequence at SEQ ID NO 11363
atgcatttcaacaccggtactctcgccttccttggcctcgccgccttcaagagtctcgcaaatgcgcaaacaattgcttttggtcaagagctacaagagaatgaccagaccaaccactgggtcgtatggatcgacggcatggacgcatgccccggacagcaagtcctcggagtcctcacagattctccttgtgagcagccattcaacctcggtgaagtagaatacaccttcactggctgtgccggcgatggcgctccccaaccgtccttctcgactctggcggtctccagtggtcaccactggcaagcacaagcgagaattcatcgcatgagaggccaataa

SEQ ID NO: 11363 - protein, 113 aa, Muscodor strobelii
  misc_feature: SGI Peptide ID NO. 563645
  misc_feature (24)..(87): NCBI GI: 238490754 Blast Desc: AFLA_107430 [Aspergillus flavus NRRL3357] gi|220697027|gb|EED53368.1| AFLA_107430 [Aspergillus flavus NRRL3357]
MHFNTGTLAFLGLAAFKSLANAQTIAFGQELQENDQTNHWVVWIDGMDACPGQQVLGVLTDSPCEQPFNLGEVEYTFTGCAGDGAPQPSFSTLAVSSGHHWQAQARIHRMRGQ

SEQ ID NO: 11364 - DNA, 2970 bp, Muscodor strobelii
  misc_feature: SGI cDNA ID NO. 563646
  misc_feature: Encodes the peptide sequence at SEQ ID NO 11365
atgtctagctacgcaccgggtcgtggaagaggtcgcggcagaggccgtggcaacttcacaattcttttgcaccagagaggaagcagtgtgtcagagtcttcgagtggatcgattgcccaacgaggaaggggcggtgcctccagttatccaagcgaacaggctccaatttcggctaaggaagtagagcgtatcgagaacgaatcggtactccagatgaagaatgcaagtcctcgcgagatcaatccgcagagaccaggatatggggtagtcggtagagaggttatcctctatgcaaactatttcaacttgccctcacgaaaggtcatggaggtgtaccgctatcattttgacattgtggatgacaacaataatgtcccggttggcagaaaggcaaagagaatttttgacctattggtcgaagaccacttcggctctcaaggacatggtattactgctgactcaaagtctaacatcatttcatgcagcaagctcgaactagaaggcgggacctttactgttccctatcgctccgaacacgatgactcaacaccggccaacgcaaggcagtatcatacccgcctcaagtttacggggccattgaccgtgtctgaactccttgaccacttgacatcaactcaagcgtcccatatgttcggttcaaatgaagcgatcattcaagctttgaacattgtactcaactatcatgccagaacagagccatcaatagcaagcgttggggcgaatcggcattttgatatgaatgcagatgctcaaaatagaatgagcctcggtgcaggcctagaggtcatacgaggattcttcgtgagcgtgagggctgccactgctcgtatcttggtctgtgtacaagtcaagaacatggcgttctacgaagaaggaccgctcgacggcatgatggaagcctataagatcgcaaatgggaccgggactgacctaaacatcaaactactcaggttcgtgaggaagttgtctcttgatataacacacattgtgcgaaagaacagcagagggcaacgtattccgcgaatcaagatgcttcaaggcttcgcaacaacgaaggacggtgaaaagctagagcaccctcctaaggtgccgagatttggtgccggcgcgatggaagtcgagttctacctcgatcaatcgaccggtggtgcatcttccaccagcaaaagtggcagcggtagcaagaagggaaagaccagtatcatgggtggtccgacgccaccttcaacgggtcgatacatcagcgtctacgagttcttcaaacagagtaggttaccagaactcactacatactatatccatactgactggtggagcgcacaatatatcgatcaagaatcccagaatgcctgtgatcaacgttgggacaaaagacaagccatcatatctaccggcagagttcgaaaacctgtggacaacttgcgatcgattgagacgtctggtcgtcgactactaggatttgagcccaccaactcaacgcttaatacgtttggcctgaatgtacctccgggattaataactgtacggagtagagtgctaggggcacctcaaatcaagtactccgaccgtaatgtggtaaatccacgttttggacaatgggatatgcgacaagtgaagtttgacacaaaagcaaagctgccatcttggacctacttacggatttccatgcagaatagaggaagtccttggcgcgatagcaacgcttttgctactaagctcaaagaattgcaggatcagctcaagaacgagggaatcgcggtcaccaattatgtaccaggaatgcacattacggtcaactcatacaattttgagtctcaaattgagcgaggagttcatgaacttcttggtcaccagaagccaaaattaatcctagtgatcatacctgaggcggtgtcgaacccaatctattatcacgtcaaatacgtttgtgacgttctcaaaggggttctcaacatatgtgtgaaggacgagaagttctcaagagcaaacgctcagtatctggcaaatgttgggttgaagttcaacttgaagctcggtggcagaaatcattcacttgatagttctaaattgagcttcatttcaaaaggtgatacgatggtggttggacttgacgtgacgcacccatcgcctggctcgtcatccaatgccccgagtgttgctgctatcgtcgcatcggttgatcagtcgctcggtcaatggccggcagccattagagtgcagcctgcccgtcaagagatggtcgctgatctaaaaggtctgctcgaatcccgacttcttctttggcggcagaagaatggaattttgccgaagaacattcttgtttatcgagacggagtgtctgaaggacagtacaacattgtactcgatgaggagcttcccgcgttacgggctgcgtgtcaagaaatgtatccagcgcctgacacaaaggctggcatgcccaagattagcatcattattgtcgggaagcgacataacactcgcttttacccaccccgagctgaagatgccgacagaggagggaatcctatgcatggaacggttgtcgatcgtggtgttactgaagcccgcaattgggacttctttctccaatcgcatactgcgatccaaggtactgcgcgcccagcacattactttgtgatctatgatcaaattttcagcaagatgcaggtcgcaccaggattgacacctgcggatacgctagaggacctgacacataacctgtgctatctcttcggtcgagcaacaaaggctgtgagcatttgtacacctgcctactatgcagaccttgtctgcgatagagctcgttgctacttgcacggcttgttcgatccttcagccatttcagacacgacatcagtcgcgagtggatcttccgcagtgcctcagcttccagactcgagcatggtgacaattcataccaatgttaaggatactatgttctacatctag

SEQ ID NO: 11365 - protein, 989 aa, Muscodor strobelii
  misc_feature: SGI Peptide ID NO. 563646
  misc_feature (243)..(298): Pfam Id: PF08699 Pfam Desc: Domain of function (DUF1785)
  misc_feature (629)..(946): Pfam Id: PF02171 Pfam Desc: Piwi domain
  misc_feature (82)..(989): NCBI GI: 119484584 Blast Desc: RNA interference and gene silencing protein (Qde2), [Neosartorya fischeri NRRL 181] gi|119410227|gb|EAW20174.1| RNA interference and gene silencing protein (Qde2), [Neosartorya NRRL
  misc_feature (53)..(989): NCBI GI: 121719874 Blast Desc: RNA interference and gene silencing protein (Qde2), [Aspergillus clavatus NRRL 1] gi|119404847|gb|EAW15209.1| RNA interference and gene silencing protein (Qde2), [Aspergillus NRRL
  misc_feature (82)..(989): NCBI GI: 70983606 Blast Desc: RNA interference and gene silencing protein (Qde2) [Aspergillus fumigatus Af293] gi|66844956|gb|EAL85292.1| RNA interference and gene silencing protein (Qde2), [Aspergillus
  misc_feature (82)..(989): NCBI GI: 159123664 Blast Desc: RNA interference and gene silencing protein (Qde2), [Aspergillus fumigatus A1163]
  misc_feature (60)..(989): NCBI GI: 115396604 Blast Desc: conserved [Aspergillus terreus NIH2624] gi|114193510|gb|EAU35210.1| conserved [Aspergillus terreus NIH2624]
  misc_feature (50)..(989): NCBI GI: 238483095 Blast Desc: RNA interference and gene silencing protein (Qde2), [Aspergillus flavus NRRL3357] gi|220700836|gb|EED57174.1| RNA interference and gene silencing protein (Qde2), [Aspergillus
  misc_feature (82)..(989): NCBI GI: 169766388 Blast Desc: [Aspergillus oryzae RIB40] gi|83765520|dbj|BAE55663.1| protein product [Aspergillus oryzae]
  misc_feature (52)..(989): NCBI GI: 255931339 Blast Desc: Pc12g03410 [Penicillium chrysogenum Wisconsin 54-1255] gi|211581845|emb|CAP79968.1| Pc12g03410 [Penicillium chrysogenum Wisconsin 54-1255]
  misc_feature (82)..(989): NCBI GI: 226286102 Blast Desc: RNA interference and gene silencing protein [Paracoccidioides brasiliensis Pb01]
  misc_feature (50)..(989): NCBI GI: 67522124 Blast Desc: AN1519.2 [Aspergillus nidulans FGSC A4] gi|40744619|gb|EAA63775.1| AN1519.2 [Aspergillus nidulans FGSC A4] gi|259486845|tpe|CBF85033.1| TPA: RNA interference and gene
MSSYAPGRGRGRGRGRGNFTILLHQRGSSVSESSSGSIAQRGRGGASSYPSEQAPISAKEVERIENESVLQMKNASPREINPQRPGYGVVGREVILYANYFNLPSRKVMEVYRYHFDIVDDNNNVPVGRKAKRIFDLLVEDHFGSQGHGITADSKSNIISCSKLELEGGTFTVPYRSEHDDSTPANARQYHTRLKFTGPLTVSELLDHLTSTQASHMFGSNEAIIQALNIVLNYHARTEPSIASVGANRHFDMNADAQNRMSLGAGLEVIRGFFVSVRAATARILVCVQVKNMAFYEEGPLDGMMEAYKIANGTGTDLNIKLLRFVRKLSLDITHIVRKNSRGQRIPRIKMLQGFATTKDGEKLEHPPKVPRFGAGAMEVEFYLDQSTGGASSTSKSGSGSKKGKTSIMGGPTPPSTGRYISVYEFFKQSRLPELTTYYIHTDWWSAQYIDQESQNACDQRWDKRQAIISTGRVRKPVDNLRSIETSGRRLLGFEPTNSTLNTFGLNVPPGLITVRSRVLGAPQIKYSDRNVVNPRFGQWDMRQVKFDTKAKLPSWTYLRISMQNRGSPWRDSNAFATKLKELQDQLKNEGIAVTNYVPGMHITVNSYNFESQIERGVHELLGHQKPKLILVIIPEAVSNPIYYHVKYVCDVLKGVLNICVKDEKFSRANAQYLANVGLKFNLKLGGRNHSLDSSKLSFISKGDTMVVGLDVTHPSPGSSSNAPSVAAIVASVDQSLGQWPAAIRVQPARQEMVADLKGLLESRLLLWRQKNGILPKNILVYRDGVSEGQYNIVLDEELPALRAACQEMYPAPDTKAGMPKISIIIVGKRHNTRFYPPRAEDADRGGNPMHGTVVDRGVTEARNWDFFLQSHTAIQGTARPAHYFVIYDQIFSKMQVAPGLTPADTLEDLTHNLCYLFGRATKAVSICTPAYYADLVCDRARCYLHGLFDPSAISDTTSVASGSSAVPQLPDSSMVTIHTNVKDTMFYI

SEQ ID NO: 11366 - DNA, 372 bp, Muscodor strobelii
  misc_feature: SGI cDNA ID NO. 563647
  misc_feature: Encodes the peptide sequence at SEQ ID NO 11367
atgcaattcaccaagtctctctttgcagcccttctcgccgttggcgtatcggccaacaagcacaagtactgcaattgccacgttaacggagaccttgatgtcggcctttcccatgatacttgcacaacttggggtggcatctaccctaacaccgagtggggtgcgtatcctcccccgtggaagtttggcacagaatacaccttcatcatgctaaccatggtcaatttagtttcaaacagagcttcatgccatgactatgacccggctgcctccgcaggcattgacggtgctcgatgggagagcttctgcaagtctgagtaccacggaaatcagggcgtaggcgctgttcgtgggaactgtttcgagaagtaa

SEQ ID NO: 11367 - protein, 123 aa, Muscodor strobelii
  misc_feature: SGI Peptide ID NO. 563647
MQFTKSLFAALLAVGVSANKHKYCNCHVNGDLDVGLSHDTCTTWGGIYPNTEWGAYPPPWKFGTEYTFIMLTMVNLVSNRASCHDYDPAASAGIDGARWESFCKSEYHGNQGVGAVRGNCFEK

SEQ ID NO: 11368 - DNA, 1467 bp, Muscodor strobelii
  misc_feature: SGI cDNA ID NO. 563648
  misc_feature: Encodes the peptide sequence at SEQ ID NO 11369
atggcccagtccacttcagataagcctctatacactctagctaacgggcagccaagtgataatcctggctccgtacggcaagtccgctatggcgagactaatggtggcctggttgtgcttgcggatgttcagctggtagaggtgctagctcatttcgcacgcgagcgcattccagagcggagtgttcacgctaaggccgctggtgccttcggcgaattcgaagtccttgacgatgtgtcggatctgaccgacgccaaatttctgaatggtatcggaaagaagacgagactgcttatgcgcatctcgaccgttggaggtgagaagggctctgcggacaccgtccgcgatgtcagaggctggtcaaccaagctctacaccgaagatggcattcaggattttgtcttcaatgatctgcccgtcttcttcattcgtgacccgatcaagtttccatccatgaatcgtagccacaagcgacatccgagaaccaacattcccgacaataccatgttttgggattatcatgtcaataacccagaaggtatccatgcattgatgcatctctttggtcagcgcggaatcccagaatcactgagacacatcaatggcttcagtgtacacacgtatacactgaacaaatctgatggcagctatgtatacgtcaagtggcacttcaagccagaaggaggtatcaagaccatggaccaggatactgccacacgactggcaggttcccagccagactaccacgtcaaagacctgttcgatgcaattgaaaagggagattatcccaagtggctcgtgtacgtccaagtcatgacaccagacgaggcaaaagcagcacccatcgacatttttgacaatacgtatacttggccatatgaaaagtaccctcttcgacgcattggcagactgacattggacaaaaacccggacaactacttccaagatattgagcaggcgtgcttctccccatcaaacatggtcccgggcattggtccctctgctgaccctgtcctccaagccagaatgtttagctatccggatgcccacaggtacagagtcggtcccaactactttcaactcccgcccaatcgaccacacagtcacgtgtacgcgccctatgtacgagatggccccggcactatgaacggcaactatggaggagaccccgactacgtgttttccgagctgaagcccctcgaatactccaagcgagtccgtatgccaacacatgagacgtggtctgggaacgtcactgccttttccaccagtgtgaccgacaaggactttgtccaagcacgagacttatggcacattatttgcaaggagcctaaaggaaaggaacagtttctccgcaatattgtgcccacgttgagggatatcccttctgttctacaggaaaaagtcattgcatactttggtaaagtggacgaggaattgaaaaagtgtcttcgcgatgcattatag

SEQ ID NO: 11369 - protein, 488 aa, Muscodor strobelii
  misc_feature: SGI Peptide ID NO. 563648
  misc_feature (12)..(401): Pfam Id: PF00199 Pfam Desc: Catalase
  misc_feature (5)..(488): NCBI GI: 216408351 Blast Desc: catalase [Gibberella moniliformis]
  misc_feature (7)..(484): NCBI GI: 46112504 Blast Desc: FG02881.1 [Gibberella zeae PH-1]
  misc_feature (4)..(488): NCBI GI: 85068532 Blast Desc: NCU05169 [Neurospora crassa OR74A] gi|28923455|gb|EAA32637.1| NCU05169 [Neurospora crassa OR74A]
  misc_feature (7)..(488): NCBI GI: 171679371 Blast Desc: protein product [Podospora anserina] gi|170939311|emb|CAP64539.1| protein product [Podospora anserina]
  misc_feature (5)..(488): NCBI GI: 58261050 Blast Desc: catalase [Cryptococcus neoformans var. neoformans JEC21] gi|58270756|ref|XP_572534.1| catalase [Cryptococcus neoformans var. neoformans JEC21] gi|134115955|ref|XP_773364.1|
  misc_feature (11)..(488): NCBI GI: 169641073 Blast Desc: catalase [Sporothrix schenckii]
  misc_feature (5)..(488): NCBI GI: 109156573 Blast Desc: catalase 2 [Filobasidiella neoformans]
  misc_feature (7)..(451): NCBI GI: 154296390 Blast Desc: catalase [Botryotinia fuckeliana B05.10] gi|150843382|gb|EDN18575.1| catalase [Botryotinia fuckeliana B05.10]
  misc_feature (9)..(488): NCBI GI: 256722579 Blast Desc: NECHADRAFT_85374 [Nectria haematococca mpVI 77-13-4]
  misc_feature (11)..(487): NCBI GI: 242783655 Blast Desc: catalase, [Talaromyces stipitatus ATCC 10500] gi|218720377|gb|EED19796.1| catalase, [Talaromyces stipitatus ATCC 10500]
  misc_feature (9)..(485): SWISSPROT Homolog: EC 1.11.1.6 Catalase
MAQSTSDKPLYTLANGQPSDNPGSVRQVRYGETNGGLVVLADVQLVEVLAHFARERIPERSVHAKAAGAFGEFEVLDDVSDLTDAKFLNGIGKKTRLLMRISTVGGEKGSADTVRDVRGWSTKLYTEDGIQDFVFNDLPVFFIRDPIKFPSMNRSHKRHPRTNIPDNTMFWDYHVNNPEGIHALMHLFGQRGIPESLRHINGFSVHTYTLNKSDGSYVYVKWHFKPEGGIKTMDQDTATRLAGSQPDYHVKDLFDAIEKGDYPKWLVYVQVMTPDEAKAAPIDIFDNTYTWPYEKYPLRRIGRLTLDKNPDNYFQDIEQACFSPSNMVPGIGPSADPVLQARMFSYPDAHRYRVGPNYFQLPPNRPHSHVYAPYVRDGPGTMNGNYGGDPDYVFSELKPLEYSKRVRMPTHETWSGNVTAFSTSVTDKDFVQARDLWHIICKEPKGKEQFLRNIVPTLRDIPSVLQEKVIAYFGKVDEELKKCLRDAL

SEQ ID NO: 11370 - DNA, 2247 bp, Muscodor strobelii
  misc_feature: SGI EST ID NO. CUFF.26985.0
  misc_feature: Variant of the nucleotide sequence at SEQ ID NO 11368
ggattatctgcatgccggtcccagctctgtcatcgttgggcacgtatctctaccgacatcgagtgcgatttgcgcgcagtctcattggccacatggtctttcctaattcagaatatcacggaatgaaccgtaagcttgctccacgcgcagtataagagaaaccatgttcatttcattctttgtcttgggatgatcaatccctttcacgaacccaacgaaaattatggcccagtccacttcagataagcctctatacactctagctaacgggcagccaagtgataatcctggctccgtacggcaagtccgctatggcgagactaatggtggcctggttgtgcttgcggatgttcagctggtagaggtgctagctcatttcgcacgcgagcgcattccagagcggagtgttcacgctaaggccgctggtgccttcggcgaattcgaagtccttgacgatgtgtcggatctgaccgacgccaaatttctgaatggtatcggaaagaagacgagactgcttatgcgcatctcgaccgttggaggtgagaagggctctgcggacaccgtccgcgatgtcagaggctggtcaaccaagctctacaccgaagatggcattcaggattttgtcttcaatgatctgcccgtcttcttcattcgtgacccgatcaagtttccatccatgaatcgtagccacaagcgacatccgagaaccaacattcccgacaataccatgttttgggattatcatgtcaataacccagaaggtatccatgcattgatgcatctctttggtcagcgcggaatcccagaatcactgagacacatcaatggcttcagtgtacacacgtatacactgaacaaatctgatggcagctatgtatacgtcaagtggcacttcaagccagaaggaggtatcaagaccatggaccaggatactgccacacgactggcaggttcccagccagactaccacgtcaaagacctgttcgatgcaattgaaaagggagattatcccaagtggctcgtgtacgtccaagtcatgacaccagacgaggcaaaagcagcacccatcgacatttttgacaatacgtatacttggccatatgaaaagtaccctcttcgacgcattggcagactgacattggacaaaaacccggacaactacttccaagatattgagcaggcgtgcttctccccatcaaacatggtcccgggcattggtccctctgctgaccctgtcctccaagccagaatgtttagctatccggatgcccacaggtacagagtcggtcccaactactttcaactcccgcccaatcgaccacacagtcacgtgtacgcgccctatgtacgagatggccccggcactatgaacggcaactatggaggagaccccgactacgtgttttccgagctgaagcccctcgaatactccaagcgagtccgtatgccaacacatgagacgtggtctgggaacgtcactgccttttccaccagtgtgaccgacaaggactttgtccaagcacgagacttatggcacattatttgcaaggagcctaaaggaaaggaacagtttctccgcaatattgtgcccacgttgagggatatcccttctgttctacaggaaaaagtcattgcatactttggtaaagtggacgaggaattgaaaaagtgtcttcgcgatgcattataggcaagacggtgataacacgattgctacgcctaacgaagtgatctgggtgttaatttaagtacgagggctattatgtcacttgtattgcctgttgactgacagtgtaactaatattctagccaagattggaacggagtgcttatccctgcttctaccatgaaggtgtctacgatgatacctcctcttctcagcttgactagtctctcgtccagtgcacgttctaatacagtccgaagtcgttccgctttttttccccttgtatatcgagagaacggagccatgtattattttgaattgcccgtcgatgcttcattattctgcgaaaatgtgtcgaggttggatctcatctctttcaaatatgcgctgcttacctggtatatttccagtacgtcttttaataacttcaccggggcaaggcttttaacgactgtgcttggttcgaggcttctttcacaaaagcacaacttattctcgtggaaaacgtgcgcatttttctatctggtgcaggtgaatgttacattgtaatatatcagactagatacgcgaatgaaagagcg

SEQ ID NO: 11371 - DNA, 369 bp, Muscodor strobelii
  misc_feature: SGI cDNA ID NO. 563649
  misc_feature: Encodes the peptide sequence at SEQ ID NO 11372
atggctatcaacttgggaccactcccaactgattttgcccttccttcggaatgcgcgaacgatcttgacgtggtctatgaacagtttgcggacaacggcgattatttcctagggattggtcctcccgatcaaacgacgtgctttccgagtggctatgctgcgactactcagccgcagtactattcgccaggaagatgccctaccggattcacggctccatgctctacagcgagtagtcttgggacagttaccgagaccgtattaacttgctgtccgacacacgacctcctcacgctcacagccttccccaacagcactttcgacccagtctccatcaaatacaccaacgcaaaactcggcgaaagctga

SEQ ID NO: 11372 - protein, 122 aa, Muscodor strobelii
  misc_feature: SGI Peptide ID NO. 563649
  misc_feature (5)..(94): NCBI GI: 171690158 Blast Desc: protein product [Podospora anserina] gi|170945027|emb|CAP71138.1| protein product [Podospora anserina]
  misc_feature (7)..(92): NCBI GI: 119485867 Blast Desc: NFIA_100160 [Neosartorya fischeri NRRL 181] gi|119410432|gb|EAW20379.1| NFIA_100160 [Neosartorya fischeri NRRL 181]
  misc_feature (5)..(105): NCBI GI: 116204789 Blast Desc: CHGG_10278 [Chaetomium globosum CBS 148.51] gi|88176406|gb|EAQ83874.1| CHGG_10278 [Chaetomium globosum CBS 148.51]
  misc_feature (7)..(98): NCBI GI: 145241642 Blast Desc: An09g01500 [Aspergillus niger] gi|134078006|emb|CAK49071.1| protein product [Aspergillus niger]
  misc_feature (12)..(92): NCBI GI: 255930157 Blast Desc: Pc06g00220 [Penicillium chrysogenum Wisconsin 54-1255] gi|211581251|emb|CAP79015.1| Pc06g00220 [Penicillium chrysogenum Wisconsin 54-1255]
  misc_feature (4)..(100): NCBI GI: 85080307 Blast Desc: NCU01607 [Neurospora crassa OR74A] gi|16416017|emb|CAB91367.2| conserved [Neurospora crassa] gi|28917585|gb|EAA27282.1| [Neurospora crassa OR74A]
  misc_feature (5)..(93): NCBI GI: 156060363 Blast Desc: [Sclerotinia sclerotiorum 1980] gi|154699728|gb|EDN99466.1| [Sclerotinia sclerotiorum 1980]
  misc_feature (5)..(110): NCBI GI: 154312023 Blast Desc: BC1G_06045 [Botryotinia fuckeliana B05.10] gi|150850695|gb|EDN25888.1| BC1G_06045 [Botryotinia fuckeliana B05.10]
  misc_feature (8)..(93): NCBI GI: 212543619 Blast Desc: conserved [Penicillium marneffei ATCC 18224] gi|210066871|gb|EEA20964.1| conserved [Penicillium marneffei ATCC 18224]
  misc_feature (5)..(93): NCBI GI: 242805878 Blast Desc: conserved [Talaromyces stipitatus ATCC 10500] gi|218715249|gb|EED14671.1| conserved [Talaromyces stipitatus ATCC 10500]
MAINLGPLPTDFALPSECANDLDVVYEQFADNGDYFLGIGPPDQTTCFPSGYAATTQPQYYSPGRCPTGFTAPCSTASSLGTVTETVLTCCPTHDLLTLTAFPNSTFDPVSIKYTNAKLGES

SEQ ID NO: 11373 - DNA, 516 bp, Muscodor strobelii
  misc_feature: SGI cDNA ID NO. 563650
  misc_feature: Encodes the peptide sequence at SEQ ID NO 11374
atgaagtggtccattgaatccgtcttcccatcaaagctaattcaggatcctcaacggggccgaccaaacgtgcgcaacgcgatcattgacatgtttcgacgcgcggagaccttggtccttgactatcgcaccaaggacgttgagttgttcaggattcttggcgcgcttcaggcgcagtgcccctgggcagctgcgatgaacaagtggctatttgcggacttctttgtcgggttgatccaggctcgccgtcgctgggagctctcgccccgtgtttgggacttgcagcacattatgccgatggtgagcgcaattatcgtgttccgccgagctgtcggcgacggtctccagacccacgatgcccgtcgcacataccgcgagaaggagatcccgccgtggatcatagagacatataccaagaagtaccgcagattgactaagcccattttctgcccgatcggcttccgtctcaatcaatatcccggcatctctcgtgcctaccactttgaaggcgactag

SEQ ID NO: 11374 - protein, 171 aa, Muscodor strobelii
  misc_feature: SGI Peptide ID NO. 563650
MKWSIESVFPSKLIQDPQRGRPNVRNAIIDMFRRAETLVLDYRTKDVELFRILGALQAQCPWAAAMNKWLFADFFVGLIQARRRWELSPRVWDLQHIMPMVSAIIVFRRAVGDGLQTHDARRTYREKEIPPWIIETYTKKYRRLTKPIFCPIGFRLNQYPGISRAYHFEGD

SEQ ID NO: 11375 - DNA, 1095 bp, Muscodor strobelii
  misc_feature: SGI cDNA ID NO. 563651
  misc_feature: Encodes the peptide sequence at SEQ ID NO 11376
atgcttggccatcaaccgaatccccatctccgtggtcataaattgctcctcaatatcccctggatatatccaaaagactatgtgcagggactgcatgctagatatccggagcttcaagtcatcgagtcatcttggaactcctggaaaattcgaaagctgcctccggaactatcagatgaagactggaaaaccgtaaccatagttgttgtggggcccgtattacccgcgatcaaacaagtgccgagcctcaggcttgttcagctacaaagtgcgagcgcagactacgttgccaatgagccactatttacggagggaaatatccccttttgtacgtcgaagggaatcgcaggaccgcgaatatcagaatgggtcatgaacacctatgtcgcctcccaaatgggccttctacgatatctgaaagacatggaacatagccgatgggacaaaggctcgagtatggagacacgagatgccgccggtcagtgtgtaggaattcttggttatggctcggttggtcgacaagtggcccgcgtatgcacggcgatgggaatgtcagtccacgcatatactcttaacccgcgtccggacgctgcatcgcggcatgatcactcgtaccacgctcctggattaggtgatgcggagggtacgttgcctgcgaaatggttttcgggatcatcaagcttcgagttagcagcgtttctgtcttctggcctggacctgctggtcattgccttaccattgacaacgcagacaacaggtctgatcggccaaaatcagtttaaattgctcagggcacgacgggcattcgtctccaatattggccgaggcagagtagttgtgacggatgctcttatatatgcactggagaaagagtggattagtggcgcggcgttggatgtcactgatccagagccacttccggatgggcatcgcttgtggaagaccaagaatgtcatcgtcacgccacacattagcggggattcgtcaagctatggtacgagactgctagacatcttagacatcaacctagagagattgagcaaggtatcacctgaaggatatatcaataaggtgaacaaaagaaaaggttattga

SEQ ID NO: 11376 - protein, 364 aa, Muscodor strobelii
  misc_feature: SGI Peptide ID NO. 563651
  misc_feature (125)..(325): Pfam Id: PF02826 Pfam Desc: D-isomer specific 2-hydroxyacid dehydrogenase, NAD binding domain
  misc_feature (239)..(325): Pfam Id: PF02826 Pfam Desc: D-isomer specific 2-hydroxyacid dehydrogenase, NAD binding domain
  misc_feature (134)..(197): Pfam Id: PF02826 Pfam Desc: D-isomer specific 2-hydroxyacid dehydrogenase, NAD binding domain
  misc_feature (7)..(364): NCBI GI: 171688036 Blast Desc: protein product [Podospora anserina] gi|170943980|emb|CAP70090.1| protein product [Podospora anserina]
  misc_feature (7)..(348): NCBI GI: 85091872 Blast Desc: NCU04857 [Neurospora crassa OR74A] gi|28920514|gb|EAA29878.1| conserved [Neurospora crassa OR74A]
  misc_feature (7)..(364): NCBI GI: 256724980 Blast Desc: NECHADRAFT_34748 [Nectria haematococca mpVI 77-13-4]
  misc_feature (10)..(364): NCBI GI: 145615326 Blast Desc: MGG_05506 [Magnaporthe grisea 70-15] gi|145022175|gb|EDK06195.1| MGG_05506 [Magnaporthe grisea 70-15]
  misc_feature (1)..(364): NCBI GI: 46110643 Blast Desc: FG02203.1 [Gibberella zeae PH-1]
  misc_feature (13)..(364): NCBI GI: 39975083 Blast Desc: MGG_00312 [Magnaporthe grisea 70-15] gi|145018804|gb|EDK03083.1| MGG_00312 [Magnaporthe grisea 70-15]
  misc_feature (1)..(364): NCBI GI: 171680586 Blast Desc: protein product [Podospora anserina] gi|170939920|emb|CAP65146.1| protein product [Podospora anserina]
  misc_feature (15)..(364): NCBI GI: 145250931 Blast Desc: An15g04440 [Aspergillus niger] gi|134082505|emb|CAK97311.1| protein product [Aspergillus niger]
  misc_feature (10)..(362): NCBI GI: 256734105 Blast Desc: NECHADRAFT_36497 [Nectria haematococca mpVI 77-13-4]
  misc_feature (19)..(364): NCBI GI: 119474071 Blast Desc: 2-hydroxyacid dehydrogenase [Neosartorya fischeri NRRL 181] gi|119407064|gb|EAW17014.1| 2-hydroxyacid dehydrogenase [Neosartorya fischeri NRRL 181]
  misc_feature (77)..(355): SWISSPROT Homolog: EC 1.1.1.29 Glycerate dehydrogenase
MLGHQPNPHLRGHKLLLNIPWIYPKDYVQGLHARYPELQVIESSWNSWKIRKLPPELSDEDWKTVTIVVVGPVLPAIKQVPSLRLVQLQSASADYVANEPLFTEGNIPFCTSKGIAGPRISEWVMNTYVASQMGLLRYLKDMEHSRWDKGSSMETRDAAGQCVGILGYGSVGRQVARVCTAMGMSVHAYTLNPRPDAASRHDHSYHAPGLGDAEGTLPAKWFSGSSSFELAAFLSSGLDLLVIALPLTTQTTGLIGQNQFKLLRARRAFVSNIGRGRVVVTDALIYALEKEWISGAALDVTDPEPLPDGHRLWKTKNVIVTPHISGDSSSYGTRLLDILDINLERLSKVSPEGYINKVNKRKGY

SEQ ID NO: 11377 - DNA, 1341 bp, Muscodor strobelii
  misc_feature: SGI cDNA ID NO. 563652
  misc_feature: Encodes the peptide sequence at SEQ ID NO 11378
atggagcccagtgcatcagcaacacagcatctttactctgccgacggctcaacggtagtcagcgagacttcccaaggggactccgtgatgaagattgagctagcagctcttccaacacgaaacttcaaggtcgtgactccgcgatggactcgcacggaagaatatcagtcgctgtgggaaagcaggattggcgactttacagcattcaaaaagcatttggagcaacccgaaaccgctatcgtcgcatttagcagcaaaagacgctcaaacggaacaatcgcagagatcaccatggctcatctgccaagtataggtcttcagaaacctaccgacatcgagcagtttgttcggaaacacgacgtagagtatgtttgtatgacttctcacgcgaaaaggggatcaagaacccaggggggaaatttcgaatggatcgacaactacggactcaatcaacagaacatcgacaccggcgcaatcaggcgcagaatgattgagtggtttgaaaccattgggcaagatattacagtcgttggctttgacatgcagaaagacttcagcgcactcttcaaacaatcgccgaccatcgtctcgcgtacatcggtctggatcgaccttcgacccgttgtccgcgaagtcgacaagccgaataacgcgtcggataattctagtatcgatggtctaccatcaatatcttcgtcattgacagcatttggggttgagggtggacgtagtgcaagtaatgatgctgtccgcattctggccatactcagctgcctcgcacacacatcgtctggtcgacttgacccgaatctacaactgcctctcacccagagcgcacaatcctcccggaaaaggaaggatggtaaggcatggcaaaagcatcgaaaaggaaccatattcagacataaggaatacatcttcgatcactaccagttcatggctctcctgcgtatggaagacaggaagtgtcctggtcccgggctggacagcccccgaaaagttcagcatcttttcagggactatagtatcacagctattggtcagtccggtaagcaccgggaaagccatggcccggatcgggatagcagatgtggctgctactttgtttgtttcgaagatgcagacaaactagacagatttatcaaggacaatcacgggagacagtttgaaaacgggcgaccgatcgaagttctgcgggactcgtggccttggttcgaaccggaggacagaaagaggactgttgtgtcagcacgaaagagtaagaaggaaacgcttaacaagatgcaagaggatgggttcggtttggactttgtgactaacatggaagccttgtcactgtag

SEQ ID NO: 11378 - protein, 446 aa, Muscodor strobelii
  misc_feature: SGI Peptide ID NO. 563652
MEPSASATQHLYSADGSTVVSETSQGDSVMKIELAALPTRNFKVVTPRWTRTEEYQSLWESRIGDFTAFKKHLEQPETAIVAFSSKRRSNGTIAEITMAHLPSIGLQKPTDIEQFVRKHDVEYVCMTSHAKRGSRTQGGNFEWIDNYGLNQQNIDTGAIRRRMIEWFETIGQDITVVGFDMQKDFSALFKQSPTIVSRTSVWIDLRPVVREVDKPNNASDNSSIDGLPSISSSLTAFGVEGGRSASNDAVRILAILSCLAHTSSGRLDPNLQLPLTQSAQSSRKRKDGKAWQKHRKGTIFRHKEYIFDHYQFMALLRMEDRKCPGPGLDSPRKVQHLFRDYSITAIGQSGKHRESHGPDRDSRCGCYFVCFEDADKLDRFIKDNHGRQFENGRPIEVLRDSWPWFEPEDRKRTVVSARKSKKETLNKMQEDGFGLDFVTNMEALSL

SEQ ID NO: 11379 - DNA, 306 bp, Muscodor strobelii
  misc_feature: SGI EST ID NO. CUFF.27014.0
  misc_feature: Variant of the nucleotide sequence at SEQ ID NO 11377
cccggatcgggatagcagatgtggctgctactttgtttgtttcgaagatgcagacaaactagacagatttatcaaggacaatcacgggagacagtttgaaaacgggcgaccgatcgaagttctgcgggactcgtggccttggttcgaaccggaggacagaaagaggactgttgtgtcagcacgaaagagtaagaaggaaacgcttaacaagatgcaagaggatgggttcggtttggactttgtgactaacatggaagccttgtcactgtagcatgatagacgagaagggatatggcacatcacggc

SEQ ID NO: 11380 - DNA, 933 bp, Muscodor strobelii
  misc_feature: SGI cDNA ID NO. 563653
  misc_feature: Encodes the peptide sequence at SEQ ID NO 11381
atggcagaggcatcgactcacagcaattccgtggacctgcgcggctacttgcccagcaatggattggtctattcccatgaatcacatgtcacccaatccgcctacgacgaccgcgtcattgttgagaacttggtgaagtacattcgtacagccgatctgcaactgaatcggtttatagtccgcaagcttattggcgatgcgtttaccgaagctggtccgatctttgccaatgatcgcccgaagggtcgaggcgttcatcgcatactcatcgcgctggggaagtcgctcccctgggcaaaggatatcacgccgtgggtgttttgcgaccttcgctggagcgtcgcgcctctagtcgatacaatcgtggctttccggcaagcggtgagcgatggggatcagtcatggatttgcaaagactaccaagccgcccgcacgcgccatcatcaactgtctacctctggtagtaaacaagtgaggcgacttggtaaggatttccgacgccgctttcgcttcgatgggcctacaagaagcagacgcccaagtctcaagcgcaagctgaacagacagacccgacgtcattatgcccgtgtattgtctcgaattcccttctcccgtggcaaaccatttcatcgccacacgcatgccgttcctcctcagtcttcgcgcgccgcctcccccagtcccgccgaatcccctattttcacgccggagccgagcccagctcctgaccatgaagaacttgcgaccaataacgtcgagaccctggccgctcccacgattgaagacaccgcaaccacacctttccgtggtgagaaccagtatacacgcacagagatttggacgttcgatgcctttgggtgtcaaagcgctaggataaaggttgccgttgtctacgtgtatggcagcacgaacgattcttgtaaggacttgtag

SEQ ID NO: 11381 - protein, 310 aa, Muscodor strobelii
  misc_feature: SGI Peptide ID NO. 563653
MAEASTHSNSVDLRGYLPSNGLVYSHESHVTQSAYDDRVIVENLVKYIRTADLQLNRFIVRKLIGDAFTEAGPIFANDRPKGRGVHRILIALGKSLPWAKDITPWVFCDLRWSVAPLVDTIVAFRQAVSDGDQSWICKDYQAARTRHHQLSTSGSKQVRRLGKDFRRRFRFDGPTRSRRPSLKRKLNRQTRRHYARVLSRIPFSRGKPFHRHTHAVPPQSSRAASPSPAESPIFTPEPSPAPDHEELATNNVETLAAPTIEDTATTPFRGENQYTRTEIWTFDAFGCQSARIKVAVVYVYGSTNDSCKDL

SEQ ID NO: 11382 - DNA, 765 bp, Muscodor strobelii
  misc_feature: SGI cDNA ID NO. 563654
  misc_feature: Elevated expression when VOC is produced
  misc_feature: Encodes the peptide sequence at SEQ ID NO 11383
atgtcggaatcgcagcatattgagggctctcgggctgaagagggcacgggaaatgctatcgactttccttgggagtacccagttcccgacaccaagttttgggccgacatccctctcgcaccagcacggacattcctacaaagcttctccgctgaagagaaggccaagctaccaatcgatcccgacagcaagcttgagttgcccaagaagcttcagctcttgctggctctcttgaaagagcagctcgctagaaaagaggcagaatcaacaccagattcactatatgatgcggattacgcaatctgggaaaagatacacatggcgattttctccatgcagagatcacttaaggacaatggcgcagccgagatgactgtgcgcatgcttatcgatcgtcgcaaagaccgaagcaatctgtcacttcggcagtctcttgattttatccttatggaccgcggtgaatacggggaagttgaaaagagcgaggaagaaataatcgagtggctgaacggccggttgggaaaggactctccccaagcccttggctcgcgacgcatgcgtgccgagtcactttggagactagatcgaaagcgggaggcggatgagcttctcgacgaagttaggaagctggcagacagtatggtggatggccaatatgccaaatatcgagacgtcgaagtggaggctgttgcaaaattggcgcataggctgcacggcatcgaggcacagctacatgcaaaggagagtcgcgttggacaagattag

SEQ ID NO: 11383 - protein, 254 aa, Muscodor strobelii
  misc_feature: SGI Peptide ID NO. 563654
  misc_feature (9)..(238): NCBI GI: 145236543 Blast Desc: An06g00920 [Aspergillus niger] gi|134075375|emb|CAK44998.1| [Aspergillus niger]
  misc_feature (21)..(223): NCBI GI: 145241135 Blast Desc: An08g11120 [Aspergillus niger] gi|134077743|emb|CAK45783.1| protein product [Aspergillus niger]
  misc_feature (19)..(233): NCBI GI: 169777181 Blast Desc: [Aspergillus oryzae RIB40] gi|83771793|dbj|BAE61923.1| protein product [Aspergillus oryzae]
  misc_feature (22)..(237): NCBI GI: 238494304 Blast Desc: conserved [Aspergillus flavus NRRL3357] gi|220695038|gb|EED51381.1| conserved [Aspergillus flavus NRRL3357]
  misc_feature (24)..(230): NCBI GI: 238495680 Blast Desc: conserved [Aspergillus flavus NRRL3357] gi|220695726|gb|EED52069.1| conserved [Aspergillus flavus NRRL3357]
  misc_feature (24)..(230): NCBI GI: 169778369 Blast Desc: [Aspergillus oryzae RIB40] gi|83772387|dbj|BAE62517.1| protein product [Aspergillus oryzae]
  misc_feature (11)..(228): NCBI GI: 145233517 Blast Desc: An02g10030 [Aspergillus niger] gi|134057063|emb|CAK44351.1| protein product [Aspergillus niger]
  misc_feature: Useful for introducing or modulating the production of volatile compounds
MSESQHIEGSRAEEGTGNAIDFPWEYPVPDTKFWADIPLAPARTFLQSFSAEEKAKLPIDPDSKLELPKKLQLLLALLKEQLARKEAESTPDSLYDADYAIWEKIHMAIFSMQRSLKDNGAAEMTVRMLIDRRKDRSNLSLRQSLDFILMDRGEYGEVEKSEEEIIEWLNGRLGKDSPQALGSRRMRAESLWRLDRKREADELLDEVRKLADSMVDGQYAKYRDVEVEAVAKLAHRLHGIEAQLHAKESRVGQD

SEQ ID NO: 11384 - DNA, 1299 bp, Muscodor strobelii
  misc_feature: SGI EST ID NO. CUFF.27041.0
  misc_feature: Variant of the nucleotide sequence at SEQ ID NO 11382
ttcagagagagttaatggtctcccgcatctttgatttctcgggaactcatttttattcgaagaccaacacgcgatccacgtctacggcctccctaagacaggtgatatctgtatagctataacgaaacgagcgccgtcgaaaatatgtcggaatcgcagcatattgagggctctcgggctgaagagggcacgggaaatgctatcgactttccttgggagtacccagttcccgacaccaagttttgggccgacatccctctcgcaccagcacggacattcctacaaagcttctccgctgaagagaaggccaagctaccaatcgatcccgacagcaagcttgagttgcccaagaagcttcagctcttgctggctctcttgaaagagcagctcgctagaaaagaggcagaatcaacaccagattcactatatgatgcggattacgcaatctgggaaaagatacacatggcgattttctccatgcagagatcacttaaggacaatggcgcagccgagatgactgtgcgcatgcttatcgatcgtcgcaaagaccgaagcaatctgtcacttcggcagtctcttgattttatccttatggaccgcggtgaatacggggaagttgaaaagagcgaggaagaaataatcgagtggctgaacggccggttgggaaaggactctccccaagcccttggctcgcgacgcatgcgtgccgagtcactttggagactagatcgaaagcgggaggcggatgagcttctcgacgaagttaggaagctggcagacagtatggtggatggccaatatgccaaatatcgagacgtcgaagtggaggctgttgcaaaattggcgcataggctgcacggcatcgaggcacagctacatgcaaaggagagtcgcgttggacaagattaggtgatggacgtaggttctgaacaaatgctattcgcatatggcaatacaagagacattcacgcgcaacaaaaggatgaaacgggatgatgaaaaggacattgtacacaatacgcggcaaattataacccgtcgctatcggaaatcgacgtttagaacacctcagcttttccagcttcccgaaagctgcggcgctctatgtcaacacaaactgctcagccgagaaaatgctatgaagagcgtgttcggctttattcgttggcagctaaatgtccttaatctgaacaatgagcaatacccagcaaaagttagcctactactgcatctagacatatctggttgacgaatgctttgagatagcggacaaattcaacgtactgttttcgattcttt

SEQ ID NO: 11385 - DNA, 978 bp, Muscodor strobelii
  misc_feature: SGI cDNA ID NO. 563655
  misc_feature: Elevated expression when VOC is produced
  misc_feature: Encodes the peptide sequence at SEQ ID NO 11386
atgtcagcctttgacgcaaccgcgtctagtgaggagatcgtcgacgcgtttgcttcacaggtacatgaccgtaccttcgttgtcgttggcgccgggctgcccagcattggcagctcgatcgccacaacgctggcacgggcctcgcccaaacacatcgtcattgtatccaggacagccgcgaaagccagtcctatggtctccgcaatccgtgagaccggtacaaaggcctcatacgtccaagtggacctctcggaccatgactcggtgcggcgcgctgctcgggaaatcttagacgtgacagaatccaatatcaatgtcctcatcaacagcgctgggaatatggggatcaaagagtatactgttgacaaacagggcatcgagatgcagctttcgggtaatcacgtcggctcttttctcttgacgaacctcctcgcgccggcgctagcggctgctgcggcggcagaccgccacagcgttcgcgtcgtcaacttgtctagtcacggacattatatcagtccatttcgcttcgacgactacaacttctcctggggtgagacgtatgacatgtggaccgcctatggccaagctaaaaccgccaacatcctcttcaccatcgccttgacaaagcgactacaggggcaaggcgttgtctcattctcggttcatcctggttccaacttggacaccagactcggctcacatctagagatgagcgactacaatgacatattcgagattgcaaagcagaataccgggcgcgagttcgtgttcgatgaacctcgtttcaagacgtatgagcaaatcggagccacaccattgacggctgcgcttgatccttccataacccggcaagcacccgcgtatctcatgaacaatcagatatctgagccagctgagcatgcaagagatccggcgcttgcagagaagttgtgggagctcagtgagatgctcgtgggacagaagttcacttacgattag

SEQ ID NO: 11386 - protein, 325 aa, Muscodor strobelii
  misc_feature: SGI Peptide ID NO. 563655
  misc_feature (24)..(157): Pfam Id: PF00106 Pfam Desc: short chain dehydrogenase
  misc_feature (36)..(112): Pfam Id: PF00106 Pfam Desc: short chain dehydrogenase
  misc_feature (36)..(98): Pfam Id: PF08659 Pfam Desc: KR domain
  misc_feature (26)..(95): Pfam Id: PF03435 Pfam Desc: Saccharopine dehydrogenase
  misc_feature (1)..(324): NCBI GI: 171681670 Blast Desc: protein product [Podospora anserina] gi|170940794|emb|CAP66443.1| protein product [Podospora anserina]
  misc_feature (1)..(324): NCBI GI: 145247610 Blast Desc: An12g10060 [Aspergillus niger] gi|134080793|emb|CAL00907.1| protein product [Aspergillus niger]
  misc_feature (1)..(324): NCBI GI: 116205537 Blast Desc: CHGG_10652 [Chaetomium globosum CBS 148.51] gi|88176780|gb|EAQ84248.1| CHGG_10652 [Chaetomium globosum CBS 148.51]
  misc_feature (1)..(322): NCBI GI: 39946214 Blast Desc: MGG_08405 [Magnaporthe grisea 70-15] gi|145019935|gb|EDK04163.1| MGG_08405 [Magnaporthe grisea 70-15]
  misc_feature (4)..(322): NCBI GI: 154317021 Blast Desc: BC1G_03928 [Botryotinia fuckeliana B05.10] gi|150845540|gb|EDN20733.1| BC1G_03928 [Botryotinia fuckeliana B05.10]
  misc_feature (1)..(322): NCBI GI: 238496683 Blast Desc: short-chain dehydrogenase, [Aspergillus flavus NRRL3357] gi|220694457|gb|EED50801.1| short-chain dehydrogenase, [Aspergillus flavus NRRL3357]
  misc_feature (25)..(322): NCBI GI: 169774723 Blast Desc: [Aspergillus oryzae RIB40] gi|83769692|dbj|BAE59827.1| protein product [Aspergillus oryzae]
  misc_feature (1)..(324): NCBI GI: 212539079 Blast Desc: short-chain dehydrogenase, [Penicillium marneffei ATCC 18224] gi|210069437|gb|EEA23528.1| short-chain dehydrogenase, [Penicillium marneffei ATCC 18224]
  misc_feature (1)..(324): NCBI GI: 119483786 Blast Desc: short-chain dehydrogenase [Neosartorya fischeri NRRL 181] gi|119409952|gb|EAW19899.1| short-chain dehydrogenase [Neosartorya fischeri NRRL 181]
  misc_feature (1)..(324): NCBI GI: 145249970 Blast Desc: An14g07010 [Aspergillus niger] gi|134082009|emb|CAK46694.1| protein product [Aspergillus niger]
  misc_feature (25)..(319): SWISSPROT Homolog: EC 1.3.1.33 Protochlorophyllide reductase
  misc_feature: Useful for introducing or modulating the production of volatile compounds
MSAFDATASSEEIVDAFASQVHDRTFVVVGAGLPSIGSSIATTLARASPKHIVIVSRTAAKASPMVSAIRETGTKASYVQVDLSDHDSVRRAAREILDVTESNINVLINSAGNMGIKEYTVDKQGIEMQLSGNHVGSFLLTNLLAPALAAAAAADRHSVRVVNLSSHGHYISPFRFDDYNFSWGETYDMWTAYGQAKTANILFTIALTKRLQGQGVVSFSVHPGSNLDTRLGSHLEMSDYNDIFEIAKQNTGREFVFDEPRFKTYEQIGATPLTAALDPSITRQAPAYLMNNQISEPAEHARDPALAEKLWELSEMLVGQKFTYD

SEQ ID NO: 11387 - DNA, 1095 bp, Muscodor strobelii
  misc_feature: SGI cDNA ID NO. 563656
  misc_feature: Encodes the peptide sequence at SEQ ID NO 11388
atgccgcgcccaatggacatgcagattcgctcgcacttcacgcaaggcgaggaaaacaaaatgacgtgcaactactgcagccagtcgcttgtaggtgcagcctcaaatctaagccgtcacctagagcgctgtcgcgggtatgccgcgatcgcgatccagaacccagctatggccggtggctgggcgggcaatccgcagccccagcctagaccatcgcttggtggtgctggcggcggtggtggtgagcgtggacctgtcgcttctaagagaccgagggccaagatgttgcagggttgcacgttgaaaaatgcgttcttcaataatcaaggtccgagcatgggtgtttggcaaacgctgcctggacagaatatctccaggatcttggccaggacgcccggtgttgattgggttatggtggactgtgagcacgggaacattgatgatgcagccatgcatgaggcggtgccgactattgctagttgcgacgttagtccaattgtgcgattgccggatatgcagccttggatgattaagagagcgctagattctggagcacatggtatccttattcccctgttgcgcactgcagatgaggcgagaaacatcgtggcagcagccaaatttccaccccagggtcagcgtgggctaggatctcctttcgcgatggagcgcttcaaccctattcccacgatgacggagtacctacagttcgcgaatacctcgctcttgaccatggtgcagattgagactcaagaggcactcgatgctgttgaggagattgctgcggtgccgggcattgatgttctatttgtcggacctttcgacctgggcaacaacattggacgtccagttctggatggcgtaatggagccggagctggagctggcaattgagcgggttttcgaagctactgtccaagccggcaagaaatgcggaatcttcgctacgagcggcgagcaagccaagcggtatgccgatcgaggctttcacatgatcaacgcggcacttgatagcacgctgctagagactcaattggagcgatctttgaatgcagcgagaggtaagaacaatcgtaagaataccgggcgctattag

SEQ ID NO: 11388 - protein, 364 aa, Muscodor strobelii
  misc_feature: SGI Peptide ID NO. 563656
  misc_feature (112)..(344): Pfam Id: PF03328 Pfam Desc: HpcH/HpaI aldolase/citrate lyase family
  misc_feature (113)..(344): Pfam Id: PF03328 Pfam Desc: HpcH/HpaI aldolase/citrate lyase family
  misc_feature (86)..(364): NCBI GI: 85111942 Blast Desc: NCU03086 [Neurospora crassa OR74A] gi|28925949|gb|EAA34943.1| NCU03086 [Neurospora crassa OR74A]
  misc_feature (94)..(364): NCBI GI: 171687843 Blast Desc: protein product [Podospora anserina] gi|170943883|emb|CAP69535.1| protein product [Podospora anserina]
  misc_feature (112)..(355): NCBI GI: 256735076 Blast Desc: [Nectria haematococca mpVI 77-13-4]
  misc_feature (88)..(356): NCBI GI: 46108678 Blast Desc: FG01221.1 [Gibberella zeae PH-1]
  misc_feature (112)..(352): NCBI GI: 256729311 Blast Desc: NECHADRAFT_47695 [Nectria haematococca mpVI 77-13-4]
  misc_feature (101)..(364): NCBI GI: 154318399 Blast Desc: BC1G_03367 [Botryotinia fuckeliana B05.10] gi|150842890|gb|EDN18083.1| BC1G_03367 [Botryotinia fuckeliana B05.10]
  misc_feature (96)..(364): NCBI GI: 255935313 Blast Desc: Pc13g02420 [Penicillium chrysogenum Wisconsin 54-1255] gi|211583303|emb|CAP91311.1| Pc13g02420 [Penicillium chrysogenum Wisconsin 54-1255]
  misc_feature (93)..(355): NCBI GI: 145613910 Blast Desc: MGG_01270 [Magnaporthe grisea 70-15] gi|145020921|gb|EDK05050.1| MGG_01270 [Magnaporthe grisea 70-15]
  misc_feature (101)..(357): NCBI GI: 121701717 Blast Desc: HpcH/HpaI aldolase/citrate lyase family protein [Aspergillus clavatus NRRL 1] gi|119397266|gb|EAW07697.1| HpcH/HpaI aldolase/citrate lyase family protein [Aspergillus NRRL
  misc_feature (101)..(353): NCBI GI: 240109850 Blast Desc: 2,4-dihydroxyhept-2-ene-1,7-dioic acid aldolase, [Coccidioides posadasii C735 delta SOWgp]
  misc_feature (113)..(353): SWISSPROT Homolog: EC 4.1.2.20 2-dehydro-3-deoxyglucarate aldolase
MPRPMDMQIRSHFTQGEENKMTCNYCSQSLVGAASNLSRHLERCRGYAAIAIQNPAMAGGWAGNPQPQPRPSLGGAGGGGGERGPVASKRPRAKMLQGCTLKNAFFNNQGPSMGVWQTLPGQNISRILARTPGVDWVMVDCEHGNIDDAAMHEAVPTIASCDVSPIVRLPDMQPWMIKRALDSGAHGILIPLLRTADEARNIVAAAKFPPQGQRGLGSPFAMERFNPIPTMTEYLQFANTSLLTMVQIETQEALDAVEEIAAVPGIDVLFVGPFDLGNNIGRPVLDGVMEPELELAIERVFEATVQAGKKCGIFATSGEQAKRYADRGFHMINAALDSTLLETQLERSLNAARGKNNRKNTGRY

SEQ ID NO: 11389 - DNA, 2107 bp, Muscodor strobelii
  misc_feature: SGI EST ID NO. CUFF.27064.1
  misc_feature: Variant of the nucleotide sequence at SEQ ID NO 11387
cacagttggtccctgaattcgctaccaaggctacgcggcaaacgaccggcaggcaccccatatcgcgaccaaccgattagcgtgcgcctaaaacccggtattcttccggtttcacacctgcacactttccagcctcctcaacaacaccattgcggcccagcgtataacaccatttcatgtcaaccgcggtacggcttcattgccgtcatcttctacgaaggcatcaaagctcgtttcttgtcagtcctttcattttctctaatcactgcgggcgcattcagtcccgctgcacttctgccaaaatgccgcgcccaatggacatgcagattcgctcgcacttcacgcaaggcgaggaaaacaaaatgacgtgcaactactgcagccagtcgcttgtaggtgcagcctcaaatctaagccgtcacctagagcgctgtcgcgggtatgccgcgatcgcgatccagaacccagctatggccggtggctgggcgggcaatccgcagccccagcctagaccatcgcttggtggtgctggcggcggtggtggtgagcgtggacctgtcgcttctaagagaccgagggccaagatgttgcagggttgcacgttgaaaaatgcgttcttcaataatcaaggtccgagcatgggtgtttggcaaacgctgcctggacagaatatctccaggatcttggccaggacgcccggtgttgattgggttatggtggactgtgagcacgggaacattgatgatgcagccatgcatgaggcggtgccgactattgctagttgcgacgttagtccaattgtgcgattgccggatatgcagccttggatgattaagagagcgctagattctggagcacatggtatccttattcccctgttgcgcactgcagatgaggcgagaaacatcgtggcagcagccaaatttccaccccagggtcagcgtgggctaggatctcctttcgcgatggagcgcttcaaccctattcccacgatgacggagtacctacagttcgcgaatacctcgctcttgaccatggtgcagattgagactcaagaggcactcgatgctgttgaggagattgctgcggtgccgggcattgatgttctatttgtcggacctttcgacctgggcaacaacattggacgtccagttctggatggcgtaatggagccggagctggagctggcaattgagcgggttttcgaagctacgtgagttctacttttgcccccatgctctttcgatcgcagctgacacgcttccgtctggtacaatagtgtccaagccggcaagaaatgcggaatcttcgctacgagcggcgagcaagccaagcggtatgccgatcgaggctttcacatgatcaacgcggcacttgatagcacgctgctagagactcaattggagcgatctttgaatgcagcgagaggtaagaacaatcgtaagaataccgggcgctattaggacactccgctcacgtctctccatccggtgcactattctcgtggtgcgcgacatatcctcttacgctttttgaacctcgtccatcttggccttcacttcgtctacagtgaagcggtgcatgagtctaccatctcgagagacagtgtttggctgttcctcaggtgcagaggatttgctgatatggatctacatacttattattagcgcgaggtcatggatgtatgatagcaacaaaagtaatgaacactgagtctttctgcctaccactggtacatcgaactcatagaggtctcgccatttagggccgttttccgacttgactatgtcaatttctttgaagtcgaaagcccgctgatcccagacttcggcgagaacggaacgggcctcggtgcacaagccacagttcgcgcgagtgaggagcgtgattctacaagcgtggaggagtctggcagttgggcggaacatctttgagacaatgagatagaatacaccgggcaagagatagactacacggatgtgtaagaaagcttcgacattgacttccaagtgagtgcagatacgatagtgcttgtaatggtctctgaacggaacgaattggatttgtacagggaatgccggtgcgctataaatacggtatttaagtg

SEQ ID NO: 11390 - DNA, 1425 bp, Muscodor strobelii
  misc_feature: SGI cDNA ID NO. 563657
  misc_feature: Encodes the peptide sequence at SEQ ID NO 11391
atgcatacacaagccgacctagacttgttacaagaaatgctagatgtcgcatcccaactggtgttgaagtgggcaagatttggacctgaataccagatcaacgccgttcaagacttcacacgactcacagttgatacaattgcattatgcgctatggatacgcggcgcaactctttttattccgagctggttccggaatacattcgtgcaatggccgagctgctccaagagacgcagctacgaactcatcggccatggtggctctcggtatttatgaccggctccgaccgaagttttgacgagaactatcatgttgtccaccgtgttgcctcggaagttgttgcgcggcggcgagcagatacgaactgtcgcaagaaaggtctcgttgacgccatgctttatggagtcgaccccaagaccgacaaacagctatccaacaaattgatcgccgataatatgatcacgttactcattggtgtaacttgtatgatctccgacaaatctcctcctgttattctgggaaataattgggaggtcaagtctggtcaaacaatggtcatcgtcaatcgcaaactgcacagaggtaggatgctcggcgaggacccagaagagttcaagccgcagcgaatgcttggggagaatttctccaagctaccaaaggactctttgaaggcttttggcaatggacaaagggcatgcatcggtcgagcattcgcgctacaggaagctacattagctactgcgcttctactacaggagttcgattttgctctcgttgaccataacttctatgaaatcgtcgctcaacaaaagctgacatcaaagtttagggagtatttcatggtagcattccccaaatgtgtcgcttggcccatcatgggtgtggcgtggcacaggctccatgtgtggcctgagatgacacttaaataccgtatttatagcgcaccggcattccctgtacaaatccaattcgttccgttcagagaccattacaagcactatcgtatctgcactcacttggaagtcaatgtcgaagctttcttacacatccgtgtagtctatctcttgcccggtgtattctatctcattgtctcaaagatgttccgcccaactgccagactcctccacgcttgtagaatcacgctcctcactcgcgcgaactgtggcttgtgcaccgaggcccgttccgttctcgccgaagtctgggatcagcgggctttcgacttcaaagaaattgacatagtcaagtcggaaaacggccctaaatggcgagacctctatgagttcgatgtaccagtgatccatatcagcaaatcctctgcacctgaggaacagccaaacactgtctctcgagatggtagactcatgcaccgcttcactgtagacgaagtgaaggccaagatggacgaggttcaaaaagcgtaa

SEQ ID NO: 11391 - protein, 474 aa, Muscodor strobelii
  misc_feature: SGI Peptide ID NO. 563657
  misc_feature (379)..(469): Pfam Id: PF05768 Pfam Desc: Glutaredoxin-like domain (DUF836)
  misc_feature (200)..(256): Pfam Id: PF00067 Pfam Desc: Cytochrome P450
  misc_feature (8)..(275): NCBI GI: 119474235 Blast Desc: NADPH cytochrome P450 [Neosartorya fischeri NRRL 181] gi|119407146|gb|EAW17096.1| NADPH cytochrome P450 [Neosartorya fischeri NRRL 181]
  misc_feature (9)..(275): NCBI GI: 253686673 Blast Desc: cytochrome P450 [Pectobacterium carotovorum subsp. carotovorum PC1] gi|251753251|gb|ACT11327.1| cytochrome P450 [Pectobacterium carotovorum subsp. carotovorum PC1]
  misc_feature (13)..(289): NCBI GI: 16079770 Blast Desc: cytochrome P450 CYP102A3 [Bacillus subtilis subsp. subtilis str. 168] gi|221310651|ref|ZP_03592498.1| Bsubs1_14841 [Bacillus subtilis subsp. subtilis str. 168] BsubsN3_14757 subsp.
  misc_feature (8)..(287): NCBI GI: 21449376 Blast Desc: AF453501_34 cytochrome P450 [Actinosynnema pretiosum subsp. auranticum]
  misc_feature (369)..(474): NCBI GI: 171687841 Blast Desc: protein product [Podospora anserina] gi|170943882|emb|CAP69534.1| protein product [Podospora anserina]
  misc_feature (368)..(474): NCBI GI: 39951034 Blast Desc: [Magnaporthe grisea 70-15] gi|145020920|gb|EDK05049.1| [Magnaporthe grisea 70-15]
  misc_feature (9)..(158): NCBI GI: 238842369 Blast Desc: fatty acid hydroxylase [Microsporum canis CBS 113480]
  misc_feature (9)..(159): NCBI GI: 256724530 Blast Desc: NECHADRAFT_98004 [Nectria haematococca mpVI 77-13-4]
  misc_feature (8)..(286): NCBI GI: 284087785 Blast Desc: cytochrome p450 [Naegleria gruberi]
  misc_feature (370)..(473): NCBI GI: 261356314 Blast Desc: glutaredoxin domain-containing protein [Verticillium albo-atrum VaMs.102]
  misc_feature (13)..(289): SWISSPROT Homolog: EC 1.6.2.4 NADPH--hemoprotein reductase
  misc_feature (13)..(289): SWISSPROT Homolog: EC 1.14.14.1 Unspecific monooxygenase
MHTQADLDLLQEMLDVASQLVLKWARFGPEYQINAVQDFTRLTVDTIALCAMDTRRNSFYSELVPEYIRAMAELLQETQLRTHRPWWLSVFMTGSDRSFDENYHVVHRVASEVVARRRADTNCRKKGLVDAMLYGVDPKTDKQLSNKLIADNMITLLIGVTCMISDKSPPVILGNNWEVKSGQTMVIVNRKLHRGRMLGEDPEEFKPQRMLGENFSKLPKDSLKAFGNGQRACIGRAFALQEATLATALLLQEFDFALVDHNFYEIVAQQKLTSKFREYFMVAFPKCVAWPIMGVAWHRLHVWPEMTLKYRIYSAPAFPVQIQFVPFRDHYKHYRICTHLEVNVEAFLHIRVVYLLPGVFYLIVSKMFRPTARLLHACRITLLTRANCGLCTEARSVLAEVWDQRAFDFKEIDIVKSENGPKWRDLYEFDVPVIHISKSSAPEEQPNTVSRDGRLMHRFTVDEVKAKMDEVQKA

SEQ ID NO: 11392 - DNA, 2155 bp, Muscodor strobelii
  misc_feature: SGI EST ID NO. CUFF.27065.2
  misc_feature: Variant of the nucleotide sequence at SEQ ID NO 11390
cacttaaataccgtatttatagcgcaccggcattccctgtacaaatccaattcgttccgttcagagaccattacaagcactatcgtatctgcactcacttggaagtcaatgtcgaagctttcttacacatccgtgtagtctatctcttgcccggtgtattctatctcattgtctcaaagatgttccgcccaactgccagactcctccacgcttgtagaatcacgctcctcactcgcgcgaactgtggcttgtgcaccgaggcccgttccgttctcgccgaagtctgggatcagcgggctttcgacttcaaagaaattgacatagtcaagtcggaaaacggccctaaatggcgagacctctatgagttcgatgtaccagtgatccatatcagcaaatcctctgcacctgaggaacagccaaacactgtctctcgagatggtagactcatgcaccgcttcactgtagacgaagtgaaggccaagatggacgaggttcaaaaagcgtaagaggatatgtcgcgcaccacgagaatagtgcaccggatggagagacgtgagcggagtgtcctaatagcgcccggtattcttacgattgttcttacctctcgctgcattcaaagatcgctccaattgagtctctagcagcgtgctatcaagtgccgcgttgatcatgtgaaagcctcgatcggcataccgcttggcttgctcgccgctcgtagcgaagattccgcatttcttgccggcttggacactattgtaccagacggaagcgtgtcagctgcgatcgaaagagcatgggggcaaaagtagaactcacgtagcttcgaaaacccgctcaattgccagctccagctccggctccattacgccatccagaactggacgtccaatgttgttgcccaggtcgaaaggtccgacaaatagaacatcaatgcccggcaccgcagcaatctcctcaacagcatcgagtgcctcttgagtctcaatctgcaccatggtcaagagcgaggtattcgcgaactgtaggtactccgtcatcgtgggaatagggttgaagcgctccatcgcgaaaggagatcctagcccacgctgaccctggggtggaaatttggctgctgccacgatgtttctcgcctcatctgcagtgcgcaacaggggaataaggatctagagtatcatgtcagaaatcaaacattttgacgcacatcagtagccgtctcgtccttacttacaccatgtgctccagaatctagcgctcctacagcatcatattagcccaaagtcgcaaatgtttcaatctgatcatacgtatcactcactcttaatcatccaaggctgcatatccggcaatcgcacaattggactaacgtcgcaactagcaatagtcggcaccgcctcatgcatggctgcatcatcaatgttcccgtgctcacagtccaccataacccaatcaacaccgggcgtcctggccaagatcctggagatattctgtccaggcagcgtttgccaaacacccatgctcggaccttgattattgaagaacgcatttttcaacgtgcaaccctgcaacatcttggccctcggtctcttagaagcgacaggtccacgctcaccaccaccgccgccagcaccaccaagcgatggtctaggctggggctgcggattgcccgcccagccaccggccatagctgggttctggatcgcgatcgcggcatacccgcgacagcgctctaggtgacggcttagatttgaggctgcacctacaagcgactggctgcagtagttgcacgtcattttgttttcctcgccttgcgtgaagtgcgagcgaatctgcatgtccattgggcgcggcattttggcagaagtgcagcgggactgaatgcgcccgcagtgattagagaaaatgaaaggactgacaagaaacgagctttgatgccttcgtagaagatgacggcaatgaagccgtaccgcggttgacatgaaatggtgttatacgctgggccgcaatggtgttgttgaggaggctggaaagtgtgcaggtgtgaaaccggaagaataccgggttttaggcgcacgctaatcggttggtcgcgatatggggtgcctgccggtcgtttgccgcgtagccttggtagcgaattcagggaccaactgtg

SEQ ID NO: 11393 - DNA, 981 bp, Muscodor strobelii
  misc_feature: SGI cDNA ID NO. 563658
  misc_feature: Encodes the peptide sequence at SEQ ID NO 11394
atggctcagaagtgtgtccatcaaggttgtaccaaggagtacaccgacccggaagaggtctgcacttaccacccaggaccgccagtctttcacgagggccagaaaggctggaaatgctgcaaaccccgcgtcctaaccttcgacgaattcctctccatcccaccttgcacccaaggcaaacacagcacgaccgacttcccgcccaaaatcgagaaaaaggaactcgaagaagacatcgcccccacccaaaccctcgcctccaagctcgccgaagcagttacagccgcaccaccctcccgcggccccgtcgcacccgtcgcgtcgacaccacctcccccacccccagaatccgaagatgatgaaccatccctcgagataccagacggcaagctctgccgtagaaaagcctgtggcgtgtcctacaagaaaggtcaatctcgatctgacgacgagaactgtgtccaccaccccggagccccgatctttcacgagggcagtaagggttattcgtgctgcaagagacgagtcctcgagtttgaccagttcatgaagatcgagggatgcaagacgagcaaacgacacttattcatcggttccggccaggataagaacaagaagggaaacggcaccagtggaggagaagaggtcctagagactgtgaggcatgacttctaccaaactcccagcacggtcatcgctagtttcttcctaaagaagatcgataaggagaaggccgtggttgaattcaagagcaagacgctagagttggatctgccgactggtgatacgccgccgaagaggtataaggcggctgttccgttgtttggggaggtggataacgagaagagtagcttcaagatcatgggcacgaagctggaggttaatcttgttaaggcggatggtgcgagttggccgacgttgaggagtgatgaggcgaggggaagtgatattattcaggttgggagggcgggacgggtgtag

SEQ ID NO: 11394 - protein, 326 aa, Muscodor strobelii
  misc_feature: SGI Peptide ID NO. 563658
  misc_feature (1)..(62): Pfam Id: PF04968 Pfam Desc: CHORD
  misc_feature (128)..(195): Pfam Id: PF04968 Pfam Desc: CHORD
  misc_feature (220)..(298): Pfam Id: PF04969 Pfam Desc: CS domain
  misc_feature (128)..(190): Pfam Id: PF04968 Pfam Desc: CHORD
  misc_feature (1)..(325): NCBI GI: 171687839 Blast Desc: protein product [Podospora anserina] gi|170943881|emb|CAP69533.1| protein product [Podospora anserina]
  misc_feature (1)..(326): NCBI GI: 46108680 Blast Desc: FG01222.1 [Gibberella zeae PH-1]
  misc_feature (1)..(326): NCBI GI: 116180402 Blast Desc: CHGG_00829 [Chaetomium globosum CBS 148.51] gi|88185126|gb|EAQ92594.1| CHGG_00829 [Chaetomium globosum CBS 148.51]
  misc_feature (1)..(326): NCBI GI: 256735075 Blast Desc: NECHADRAFT_98694 [Nectria haematococca mpVI 77-13-4]
  misc_feature (1)..(325): NCBI GI: 156053031 Blast Desc: SS1G_06683 [Sclerotinia sclerotiorum 1980] gi|154704461|gb|EDO04200.1| SS1G_06683 [Sclerotinia sclerotiorum 1980]
  misc_feature (1)..(326): NCBI GI: 39951045 Blast Desc: MGG_01272 [Magnaporthe grisea 70-15] gi|145020919|gb|EDK05048.1| MGG_01272 [Magnaporthe grisea 70-15]
  misc_feature (2)..(326): NCBI GI: 164427312 Blast Desc: NCU03087 [Neurospora crassa OR74A] gi|157071690|gb|EAA34944.2| NCU03087 [Neurospora crassa OR74A]
  misc_feature (1)..(326): NCBI GI: 189189136 Blast Desc: CORD and CS domain containing protein [Pyrenophora tritici-repentis Pt-1C-BFP] gi|187972513|gb|EDU40012.1| CORD and CS domain containing protein [Pyrenophora tritici-repentis
  misc_feature (1)..(326): NCBI GI: 119495659 Blast Desc: CORD and CS domain protein [Neosartorya fischeri NRRL 181] gi|119412771|gb|EAW22712.1| CORD and CS domain protein [Neosartorya fischeri NRRL 181]
  misc_feature (4)..(326): NCBI GI: 238498286 Blast Desc: CORD and CS domain protein [Aspergillus flavus NRRL3357] gi|220693652|gb|EED49997.1| CORD and CS domain protein [Aspergillus flavus NRRL3357]
MAQKCVHQGCTKEYTDPEEVCTYHPGPPVFHEGQKGWKCCKPRVLTFDEFLSIPPCTQGKHSTTDFPPKIEKKELEEDIAPTQTLASKLAEAVTAAPPSRGPVAPVASTPPPPPPESEDDEPSLEIPDGKLCRRKACGVSYKKGQSRSDDENCVHHPGAPIFHEGSKGYSCCKRRVLEFDQFMKIEGCKTSKRHLFIGSGQDKNKKGNGTSGGEEVLETVRHDFYQTPSTVIASFFLKKIDKEKAVVEFKSKTLELDLPTGDTPPKRYKAAVPLFGEVDNEKSSFKIMGTKLEVNLVKADGASWPTLRSDEARGSDIIQVGRAGRV

SEQ ID NO: 11395 - DNA, 2930 bp, Muscodor strobelii
  misc_feature: SGI EST ID NO. CUFF.27465.0
  misc_feature: Variant of the nucleotide sequence at SEQ ID NO 11393
tttgcacattccaccccgccataggacaactccacatattcttccaaagctttctgccccatcaggtagcttcgtcgatccatggaagcttctttcaacctcctgctttcacttcaaactaagaatttcaacggtcttcgaaaattgcacgctcggcattgcgtctagcgcatgcagcctagacccgagtagccatggctcagaagtgtgtccatcaaggttgtaccaaggagtacaccgacccggaagaggtctgcacttaccacccaggaccgccagtctttcacgagggccagaaaggctggaaatgctgcaaaccccgcgtcctaaccttcgacgaattcctctccatcccaccttgcacccaaggcaaacacagcacgaccgacttcccgcccaaaatcgagaaaaaggaactcgaagaagacatcgcccccacccaaaccctcgcctccaagctcgccgaagcagttacagccgcaccaccctcccgcggccccgtcgcacccgtcgcgtcgacaccacctcccccacccccagaatccgaagatgatgaaccatccctcgagataccagacggcaagctctgccgtagaaaagcctgtggcgtgtcctacaagaaaggtcaatctcgatctgacgacgagaactgtgtccaccaccccggagccccgatctttcacgagggcagtaagggttattcgtgctgcaagagacgagtcctcgagtttgaccagttcatgaagatcgagggatgcaagacgagcaaacgacacttattcatcggttccggccaggataagaacaagaagggaaacggcaccagtggaggagaagaggtcctagagactgtgaggcatgacttctaccaaactcccagcacggtcatcgctagtttcttcctaaagaagatcgataaggagaaggccgtggttgaattcaagagcaagacgctagagttggatctgccgactggtgatacgccgccgaagaggtataaggcggctgttccgttgtttggggaggtggataacgagaagagtagcttcaagatcatgggcacgaagctggaggttaatcttgttaaggcggatggtgcgagttggccgacgttgaggagtgatgaggcgaggggaagtgatattattcaggttgggagggcgggacgggtgtagattgatggcttgagggaagggaagggaaggggaatgaggtgagagtgagcgtgcttatgggtacacttggtgtgtagcccgtgatgtatcctgagaaaaagacaggccgtgtcacatcagtgagaaagaggtcgtcataattgccaatcacactcgagaaaatctgagtagcttcgatacaagatatgatatacatcattttacaaatactcgcttctctcccgggcacaacgtgcaccttttcccactgctcagtcatcacatcattatcaccaagctcacctgcctccggactcagtatctcaccatctcatcactacaacacccaataatacaatcattcactaatccatgccctccatcaactcagtccgatcaagaatcatccccttatgccccaaatactccttcagcgcctcccactcccgtcctccctcgagcccttgtctccactcctccttaaacccccaagcacacgccaccctatcaaacgcagcgcgttcctcctccctagtccacctcttcctcagcggaatcccgggcgcccaactcaccctcttcatctggtcattcacagtagtaatggtgataatccccaagctagcggtgaagccgatgtaggcgaggatccctgcggtgatcatccctgttgcggaggaggatgacatggtttcttgaagaccgctgaaatttcgtgcgatgaggtacgctgctaggggggtgagactgatgaatgtgaatggtaaaagtccgacgcgcaagagtttggaccggatgaaggccggtgtggcgtatgtgctgtctattattgcaacggctgcatcgaggtttcgcgcttcgatcgcggtggagagtgcgaggtcaattacttcggcttcgggcgcggcttcggggcggttggggtttggtgaggtgtaggttaggggtgtggatccttcttttggtatgggtttgctggcgtagagctgaaagacacgcgggagagtctcaggcttgacgagtttggattggatggttatgtattgctggagcaaagcgggtgtgattcggacgggtgggtgggcgaggattaggtatgctgtttcggagattttgttcttgaggtgggtgagctttgctgagtattccattccttctgttgctacgggtggtgttctgggcgcgctagtcttggtgttggtgttgtttgtggtgtcgagggagaggagggtcgaggcggtggagtcgagctcgttgatcaggtgcgtgatctggggctgcactgagtcgtctgtgagccagtttgctagcatgtggcagacttcgagggcggctttgacgttggcttcggaggggatgccgcgctgggcgaagactttgagctcggatgttttgaggtagtttgtgatgtcggatactgaggattggctgaggctcgggggtttggcagctgggggcgcattggagcgttcgaggctggattcgaaggctgatgaaggtaaagagcgtgtctgtgtggtggtgaacggcctcgatatttggcgtgcttcgtatgttttggagatgcgtcgactcgcgaggagtggttggattgttcttcgcggttgagcagatatcgcatcgcatatgcagcagaccgaccgcggccttgccatagtcgtggatcgatgcatgctgccaagtgctaccaagaaacgtaatcgcgcggtattatgcgagctagtttacataggtatcgttgaagtgaatttcatcgcgaagttcgttggattcgtc

SEQ ID NO: 11396 - DNA, 1308 bp, Muscodor strobelii
  misc_feature: SGI cDNA ID NO. 563659
  misc_feature: Reduced expression when VOC is produced
  misc_feature: Encodes the peptide sequence at SEQ ID NO 11397
atgcatcgatccacgactatggcaaggccgcggtcggtctgctgcatatgcgatgcgatatctgctcaaccgcgaagaacaatccaaccactcctcgcgagtcgacgcatctccaaaacatacgaagcacgccaaatatcgaggccgttcaccaccacacagacacgctctttaccttcatcagccttcgaatccagcctcgaacgctccaatgcgcccccagctgccaaacccccgagcctcagccaatcctcagtatccgacatcacaaactacctcaaaacatccgagctcaaagtcttcgcccagcgcggcatcccctccgaagccaacgtcaaagccgccctcgaagtctgccacatgctagcaaactggctcacagacgactcagtgcagccccagatcacgcacctgatcaacgagctcgactccaccgcctcgaccctcctctccctcgacaccacaaacaacaccaacaccaagactagcgcgcccagaacaccacccgtagcaacagaaggaatggaatactcagcaaagctcacccacctcaagaacaaaatctccgaaacagcatacctaatcctcgcccacccacccgtccgaatcacacccgctttgctccagcaatacataaccatccaatccaaactcgtcaagcctgagactctcccgcgtgtctttcagctctacgccagcaaacccataccaaaagaaggatccacacccctaacctacacctcaccaaaccccaaccgccccgaagccgcgcccgaagccgaagtaattgacctcgcactctccaccgcgatcgaagcgcgaaacctcgatgcagccgttgcaataatagacagcacatacgccacaccggccttcatccggtccaaactcttgcgcgtcggacttttaccattcacattcatcagtctcacccccctagcagcgtacctcatcgcacgaaatttcagcggtcttcaagaaaccatgtcatcctcctccgcaacagggatgatcaccgcagggatcctcgcctacatcggcttcaccgctagcttggggattatcaccattactactgtgaatgaccagatgaagagggtgagttgggcgcccgggattccgctgaggaagaggtggactagggaggaggaacgcgctgcgtttgatagggtggcgtgtgcttgggggtttaaggaggagtggagacaagggctcgagggaggacgggagtgggaggcgctgaaggagtatttggggcataaggggatgattcttgatcggactgagttgatggagggcatggattag

SEQ ID NO: 11397 - protein, 435 aa, Muscodor strobelii
  misc_feature: SGI Peptide ID NO. 563659
  misc_feature (141)..(434): NCBI GI: 85111273 Blast Desc: NCU03088 [Neurospora crassa OR74A] gi|28925601|gb|EAA34622.1| conserved [Neurospora crassa OR74A]
  misc_feature (93)..(435): NCBI GI: 261356311 Blast Desc: conserved [Verticillium albo-atrum VaMs.102]
  misc_feature (4)..(435): NCBI GI: 156053025 Blast Desc: SS1G_06680 [Sclerotinia sclerotiorum 1980] gi|154704458|gb|EDO04197.1| SS1G_06680 [Sclerotinia sclerotiorum 1980]
  misc_feature (87)..(434): NCBI GI: 46108226 Blast Desc: FG00995.1 [Gibberella zeae PH-1]
  misc_feature (8)..(434): NCBI GI: 256734466 Blast Desc: [Nectria haematococca mpVI 77-13-4]
  misc_feature (106)..(435): NCBI GI: 240109860 Blast Desc: CPC735_033650 [Coccidioides posadasii C735 delta SOWgp]
  misc_feature (183)..(435): NCBI GI: 121701683 Blast Desc: conserved [Aspergillus clavatus NRRL 1] gi|119397249|gb|EAW07680.1| conserved [Aspergillus clavatus NRRL 1]
  misc_feature (106)..(435): NCBI GI: 119184372 Blast Desc: CIMG_07002 [Coccidioides immitis RS]
  misc_feature (33)..(434): NCBI GI: 119495623 Blast Desc: NFIA_013850 [Neosartorya fischeri NRRL 181] gi|119412754|gb|EAW22695.1| conserved [Neosartorya fischeri NRRL 181]
  misc_feature (75)..(435): NCBI GI: 212542647 Blast Desc: conserved [Penicillium marneffei ATCC 18224] gi|210066385|gb|EEA20478.1| conserved [Penicillium marneffei ATCC 18224]
  misc_feature: Useful for introducing or modulating the production of volatile compounds
MHRSTTMARPRSVCCICDAISAQPRRTIQPLLASRRISKTYEARQISRPFTTTQTRSLPSSAFESSLERSNAPPAAKPPSLSQSSVSDITNYLKTSELKVFAQRGIPSEANVKAALEVCHMLANWLTDDSVQPQITHLINELDSTASTLLSLDTTNNTNTKTSAPRTPPVATEGMEYSAKLTHLKNKISETAYLILAHPPVRITPALLQQYITIQSKLVKPETLPRVFQLYASKPIPKEGSTPLTYTSPNPNRPEAAPEAEVIDLALSTAIEARNLDAAVAIIDSTYATPAFIRSKLLRVGLLPFTFISLTPLAAYLIARNFSGLQETMSSSSATGMITAGILAYIGFTASLGIITITTVNDQMKRVSWAPGIPLRKRWTREEERAAFDRVACAWGFKEEWRQGLEGGREWEALKEYLGHKGMILDRTELMEGMD

SEQ ID NO: 11398 - DNA, 2656 bp, Muscodor strobelii
  misc_feature: SGI EST ID NO. CUFF.27465.1
  misc_feature: Variant of the nucleotide sequence at SEQ ID NO 11396
cgaacttcgcgatgaaattcacttcaacgatacctatgtaaactagctcgcataataccgcgcgattacgtttcttggtagcacttggcagcatgcatcgatccacgactatggcaaggccgcggtcggtctgctgcatatgcgatgcgatatctgctcaaccgcgaagaacaatccaaccactcctcgcgagtcgacgcatctccaaaacatacgaagcacgccaaatatcgaggccgttcaccaccacacagacacgctctttaccttcatcagccttcgaatccagcctcgaacgctccaatgcgcccccagctgccaaacccccgagcctcagccaatcctcagtatccgacatcacaaactacctcaaaacatccgagctcaaagtcttcgcccagcgcggcatcccctccgaagccaacgtcaaagccgccctcgaagtctgccacatgctagcaaactggctcacagacgactcagtgcagccccagatcacgcacctgatcaacgagctcgactccaccgcctcgaccctcctctccctcgacaccacaaacaacaccaacaccaagactagcgcgcccagaacaccacccgtagcaacagaaggaatggaatactcagcaaagctcacccacctcaagaacaaaatctccgaaacagcatacctaatcctcgcccacccacccgtccgaatcacacccgctttgctccagcaatacataaccatccaatccaaactcgtcaagcctgagactctcccgcgtgtctttcagctctacgccagcaaacccataccaaaagaaggatccacacccctaacctacacctcaccaaaccccaaccgccccgaagccgcgcccgaagccgaagtaattgacctcgcactctccaccgcgatcgaagcgcgaaacctcgatgcagccgttgcaataatagacagcacatacgccacaccggccttcatccggtccaaactcttgcgcgtcggacttttaccattcacattcatcagtctcacccccctagcagcgtacctcatcgcacgaaatttcagcggtcttcaagaaaccatgtcatcctcctccgcaacagggatgatcaccgcagggatcctcgcctacatcggcttcaccgctagcttggggattatcaccattactactgtgaatgaccagatgaagagggtgagttgggcgcccgggattccgctgaggaagaggtggactagggaggaggaacgcgctgcgtttgatagggtggcgtgtgcttgggggtttaaggaggagtggagacaagggctcgagggaggacgggagtgggaggcgctgaaggagtatttggggcataaggggatgattcttgatcggactgagttgatggagggcatggattagtgaatgattgtattattgggtgttgtagtgatgagatggtgagatactgagtccggaggcaggtgagcttggtgataatgatgtgatgactgagcagtgggaaaaggtgcacgttgtgcccgggagagaagcgagtatttgtaaaatgatgtatatcatatcttgtatcgaagctactcagattttctcgagtgtgattggcaattatgacgacctctttctcactgatgtgacacggcctgtctttttctcaggatacatcacgggctacacaccaagtgtacccataagcacgctcactctcacctcattccccttcccttcccttccctcaagccatcaatctacacccgtcccgccctcccaacctgaataatatcacttcccctcgcctcatcactcctcaacgtcggccaactcgcaccatccgccttaacaagattaacctccagcttcgtgcccatgatcttgaagctactcttctcgttatccacctccccaaacaacggaacagccgccttatacctcttcggcggcgtatcaccagtcggcagatccaactctagcgtcttgctcttgaattcaaccacggccttctccttatcgatcttctttaggaagaaactagcgatgaccgtgctgggagtttggtagaagtcatgcctcacagtctctaggacctcttctcctccactggtgccgtttcccttcttgttcttatcctggccggaaccgatgaataagtgtcgtttgctcgtcttgcatccctcgatcttcatgaactggtcaaactcgaggactcgtctcttgcagcacgaataacccttactgccctcgtgaaagatcggggctccggggtggtggacacagttctcgtcgtcagatcgagattgacctttcttgtaggacacgccacaggcttttctacggcagagcttgccgtctggtatctcgagggatggttcatcatcttcggattctgggggtgggggaggtggtgtcgacgcgacgggtgcgacggggccgcgggagggtggtgcggctgtaactgcttcggcgagcttggaggcgagggtttgggtgggggcgatgtcttcttcgagttcctttttctcgattttgggcgggaagtcggtcgtgctgtgtttgccttgggtgcaaggtgggatggagaggaattcgtcgaaggttaggacgcggggtttgcagcatttccagcctgggcagaagccgttagttagtaattggtacttagg

SEQ ID NO: 11399 - DNA, 339 bp, Muscodor strobelii
  misc_feature: SGI cDNA ID NO. 563660
  misc_feature: Elevated expression when VOC is produced
  misc_feature: Encodes the peptide sequence at SEQ ID NO 11400
atgccctcgaataaacacggtcagatcaatctgatgaaaatcaagacgatgagccaccgtcacggccgcaacgatgaaagtgcaacagcaaaattcaaccctttccgaagatttgattggaaaacgacaagaagatcagacacatgggacgggagacaagaagacagagacataaacgattatgaaagcaccctgggtccgcgcggcttcgtggtggaaagaactagaatcgaaggcaaacatgttgaggaacgtattcctttacataaagatgagagactctgggttcgagcacctatgaaaatgttatcattgctccgtagacgacgtaatggatga

SEQ ID NO: 11400 - protein, 112 aa, Muscodor strobelii
  misc_feature: SGI Peptide ID NO. 563660
  misc_feature: Useful for introducing or modulating the production of volatile compounds
MPSNKHGQINLMKIKTMSHRHGRNDESATAKFNPFRRFDWKTTRRSDTWDGRQEDRDINDYESTLGPRGFVVERTRIEGKHVEERIPLHKDERLWVRAPMKMLSLLRRRRNG

SEQ ID NO: 11401 - DNA, 4442 bp, Muscodor strobelii
  misc_feature: SGI EST ID NO. CUFF.27104.2
  misc_feature: Variant of the nucleotide sequence at SEQ ID NO 11399
aacctgttcaatgctttgtatttatctggatgcgttaaacgatgccaatatgaatttcggcatctaatcactgcacattatagagattgacagatcatatagtgctcagctagttaactcttaaagagacaaagatctcagatatttgagaaccccgcttctctctgtttaagataaaatgaaaagtcaatgatatcaaaaaggcttatttgtgagatttgggagatgacatacaacatgtctatctgtaataccatcgccaaagcacaatccgccatgtaaattggtacaggagttaaacgaatgacggttcaatcatcaaagggtaaacagacggctcccatggcgtgttgctccattacctgccactccagagtttggatacataggaaagaaagcctgaattctctaagcgcattctccccacaagcgcttgtagatcggtaatttcttcgttagtaagtcctatgtcttccagttgccatcttctaaacttatcaaactcttcacggtccgctccgtgggagatcatgagatgcattgtgtcgtggaactcgcgatggaggtcttttctatttttcgagcattcctcgaggaacatcttccatggacttttgctgtcgtaaatatagattcctttattcggatctgccttccttgatagtagatcctccactattgatagatccggtccctcatccaagctcacgaaatcagtaggagttactatcgttggccgcaaagcataatcaagcaatgggcgacccttcttctgctgcaataatcgggggttattgttaagtgttttagaaacgtaaagagacaatcttccttctatcgcagaagcgagaaaagttttgtgcttgtattcttgaaagtttcctgtggccggttctcgaagatttgtccaatggcaactcaaattaggcatgtagttagtattgatttgatcgagttcgtctagaagtcgatgagccacctcgactctagttttcatttccaagctcaaaggggccgtgttttcatcaagcgcgtcgcgctcgatcctccgaacatagtgaacgagcgaatctgccaaagcgaataccctgttaacgcttggatgacgtggaagggtagcaagattaggaacagaggcatgcgtcgctgtcaacaatgcaaccgtaactttacacaacgaaatcagactatcgaattcttttttccgtttgttcatcagctcggccagaaagtcggtctcgaggaagaaatctctaacggtgcgatgtaggaagtcgacttgcttcttcataaatggtgggtcggtcggttcaacgtaggtgacatcgcttccgggggaaaatggattgggcaatacaggaaagccctctatattgcgtacgacgttaagaaggtccttgcatcgagcatttagccgggactccatcctcttctcaatttctcccctgttcatctgagagcactgttcaaccgtcaagctcaatgagaaaccaggggtgtcccattcttgatctaaaaacccatatgcaagaagtggtaggggctgctctgcatcgaccgcgattcgaaatattcgcatagtttgttcgaagtacaccgattcgatggacgtgagcatacgtttgaaatactcttgtaaatcatcaggtatatgctcaattctattttgtaattcggtgtaattatcatcgtcacttatgcccttgagtagtgattcgacaaccagatggacccataggaaaacaccttgcgctttggctactatggtatctggcaggcctttgcacctcggatcagttgcctccaattgctggaagcgaggattcgatcggaacttgtccgtcacgtaccatttgatgtcgtctttggtgagatcctctagtttcaacgacttcgaagaatccccgaatgcaacgttaaactgattccatggacggctagagacgcaaatcttgataatgggcgatttggcgagagttgttaagcagctgataagctcttcaaagtcaccgtgataatttttagcccctgcagtgtattcatcaagtccgtcgatgaagaaacaaaagcggagtggagcggcaggatctaaagatagtgacgtcaaagcctcaaacagcgcatcagctgaccaggaatcaatttgagaatcctcggcagtccaacgggatgggaaaatggtctccatcaattctggaacctgtcgaaagatctggaaacagagtgttcgcagaaggccttcccgggatttctgtatcgaatttccaacaatccaaaaataatggctagctattattagcctttgctggccggcccactttgatagtgccgcagtcgtcttctcgtgctcaaccagaaatcgcattaaggttgattttccgcttccagccttccctcttatccagtaaattccgtgtcccgtccgtagccattgaccaaaattgtggcgattatggtcaagaacccactgtagcgtcgactggtgagcaagccgaatattatcgtggcgtattctgatttctggaaatcggagacttgctagaatgagctgctgctttcgaaccttcgggagttcggattccagactggcgatctggtcccttagcgcagacccctgaatatccataaatacagagttcacgtttttttcgcgctctgatctctcgctaccatcgaccggttttaatttttccaaggtcttctgcagatctttctgaatctcgctcagcttctgcactgtgtttgcctccatcctggcattaacattcatgagatcgtttatggcccggttagcgcttgattgctcgtctctttgaactgtcagtgtactctttgaacagaggtgaatagtattcatgccttgagatagcggccaaacagatgacagtctcaactttcagaccttgcagtctgttttgtagttgtgttatttgtccgcgagccgactcattcaagatagcctgttggaagactttaaaccgggatctctttgtcgtatctatttttaagctttcgagtagatcgacgagtttccttgacacatcctcgcaagatctgattagcttgtagagggatctctctgccttggaaccggaaatagcggttgaagtatttaacctgagctgctccaaaattgccatgaattccctagtgtccgactctatctctacattgaggtctatcgcgcctgatgcagatatatatagttcgcgagttttgaggccgattttaataccaagctggacaaattggaaaatattactcgcgataccgagcgcagcaaattctgccattgccggggagcctggactcacgaactgtggaccacaggttggattacacaatatgggaagattctggcgctcggtcaaagaacgacataagtaatcgaccttcaaggcaatttggtggtgcgaagcggggaagaactatgggctcctctccggataggcagctaaaatcaagggtattcatgttgtctaacgttgtatctgtcgtaaagatgcatcagcaagcctggcagccaatcaaattgtaggatcgggatgcaaattatgctgttgggcggctatgcaggcaatcaaattggctgagtagaaaagcggcggggtcaaaacctcgtctttttcagctgagtatcgcttcaatactaagatcatacagagcctcccaggcgccaaagagcattagtatatcgtggagtcatcattttaacagtctcaagtttcgaaaatgccctcgaataaacacggtcagatcaatctgatgaaaatcaagacgatgagccaccgtcacggccgcaacgatgaaagtgcaacagcaaaattcaaccctttccgaagatttgattggaaaacgacaagaagatcagacacatgggacgggagacaagaagacagagacataaacgattatgaaagcaccctgggtccgcgcggcttcgtggtggaaagaactagaatcgaaggcaaacatgttgaggaacgtattcctttacataaagatgagagactctgggttcgagcacctatgaaaatgttatcattgctccgtagacgacgtaatggatgaaaagagtgagccatccgtcgaatcaatgacggcaatatcattgagacccggcgagatatgaactgtcgcctatgatgacctgaacgaagatcgggttcatgtttccgccaaaatatagctgtagcatgcggtacctccgttcctgagtagctagacagcctcagaatgccgggaaccatgctgctaatgaccctttgatgctggctcagtatgccaatggaagtaggaaagattttacccgcttgaagacatattggctatggtacgggacaagggcattagtaagtaaggaaagatcctcagacccgacatagtctcaaacaatcttgaagattcatcaccttacattatgttcggattatgttcatttg

SEQ ID NO: 11402 - DNA, 2394 bp, Muscodor strobelii
  misc_feature: SGI cDNA ID NO. 563661
  misc_feature: Encodes the peptide sequence at SEQ ID NO 11403
atggaggcaaacacagtgcagaagctgagcgagattcagaaagatctgcagaagaccttggaaaaattaaaaccggtcgatggtagcgagagatcagagcgcgaaaaaaacgtgaactctgtatttatggatattcaggggtctgcgctaagggaccagatcgccagtctggaatccgaactcccgaaggttcgaaagcagcagctcattctagcaagtctccgatttccagaaatcagaatacgccacgataatattcggcttgctcaccagtcgacgctacagtgggttcttgaccataatcgccacaattttggtcaatggctacggacgggacacggaatttactggataagagggaaggctggaagcggaaaatcaaccttaatgcgatttctggttgagcacgagaagacgactgcggcactatcaaagtgggccggccagcaaaggctaataatagctagccattatttttggattgttggaaattcgatacagaaatcccgggaaggccttctgcgaacactctgtttccagatctttcgacaggttccagaattgatggagaccattttcccatcccgttggactgccgaggattctcaaattgattcctggtcagctgatgcgctgtttgaggctttgacgtcactatctttagatcctgccgctccactccgcttttgtttcttcatcgacggacttgatgaatacactgcaggggctaaaaattatcacggtgactttgaagagcttatcagctgcttaacaactctcgccaaatcgcccattatcaagatttgcgtctctagccgtccatggaatcagtttaacgttgcattcggggattcttcgaagtcgttgaaactagaggatctcaccaaagacgacatcaaatggtacgtgacggacaagttccgatcgaatcctcgcttccagcaattggaggcaactgatccgaggtgcaaaggcctgccagataccatagtagccaaagcgcaaggtgttttcctatgggtccatctggttgtcgaatcactactcaagggcataagtgacgatgataattacaccgaattacaaaatagaattgagcatatacctgatgatttacaagagtatttcaaacgtatgctcacgtccatcgaatcggtgtacttcgaacaaactatgcgaatatttcgaatcgcggtcgatgcagagcagcccctaccacttcttgcatatgggtttttagatcaagaatgggacacccctggtttctcattgagcttgacggttgaacagtgctctcagatgaacaggggagaaattgagaagaggatggagtcccggctaaatgctcgatgcaaggaccttcttaacgtcgtacgcaatatagagggctttcctgtattgcccaatccattttcccccggaagcgatgtcacctacgttgaaccgaccgacccaccatttatgaagaagcaagtcgacttcctacatcgcaccgttagagatttcttcctcgagaccgactttctggccgagctgatgaacaaacggaaaaaagaattcgatagtctgatttcgttgtgtaaagttacggttgcattgttgacagcgacgcatgcctctgttcctaatcttgctacccttccacgtcatccaagcgttaacagggtattcgctttggcagattcgctcgttcactatgttcggaggatcgagcgcgacgcgcttgatgaaaacacggcccctttgagcttggaaatgaaaactagagtcgaggtggctcatcgacttctagacgaactcgatcaaatcaatactaactacatgcctaatttgagttgccattggacaaatcttcgagaaccggccacaggaaactttcaagaatacaagcacaaaacttttctcgcttctgcgatagaaggaagattgtctctttacgtttctaaaacacttaacaataacccccgattattgcagcagaagaagggtcgcccattgcttgattatgctttgcggccaacgatagtaactcctactgatttcgtgagcttggatgagggaccggatctatcaatagtggaggatctactatcaaggaaggcagatccgaataaaggaatctatatttacgacagcaaaagtccatggaagatgttcctcgaggaatgctcgaaaaatagaaaagacctccatcgcgagttccacgacacaatgcatctcatgatctcccacggagcggaccgtgaagagtttgataagtttagaagatggcaactggaagacataggacttactaacgaagaaattaccgatctacaagcgcttgtggggagaatgcgcttagagaattcaggctttctttcctatgtatccaaactctggagtggcaggtaa

SEQ ID NO: 11403 - protein, 797 aa, Muscodor strobelii
  misc_feature: SGI Peptide ID NO. 563661
  misc_feature (1)..(746): NCBI GI: 46111055 Blast Desc: FG02409.1 [Gibberella zeae PH-1]
  misc_feature (45)..(797): NCBI GI: 256728066 Blast Desc: NECHADRAFT_83494 [Nectria haematococca mpVI 77-13-4]
  misc_feature (4)..(747): NCBI GI: 256730066 Blast Desc: NECHADRAFT_82694 [Nectria haematococca mpVI 77-13-4]
  misc_feature (44)..(797): NCBI GI: 255956529 Blast Desc: Pc21g20270 [Penicillium chrysogenum Wisconsin 54-1255] gi|211590728|emb|CAP96924.1| Pc21g20270 [Penicillium chrysogenum Wisconsin 54-1255]
  misc_feature (123)..(720): NCBI GI: 169605571 Blast Desc: SNOG_05810 [Phaeosphaeria nodorum SN15] gi|160706792|gb|EAT86874.2| SNOG_05810 [Phaeosphaeria nodorum SN15]
  misc_feature (34)..(704): NCBI GI: 261190024 Blast Desc: conserved [Ajellomyces dermatitidis SLH14081] gi|239591250|gb|EEQ73831.1| conserved [Ajellomyces dermatitidis SLH14081]
  misc_feature (17)..(662): NCBI GI: 145252046 Blast Desc: An16g02230 [Aspergillus niger] gi|134083079|emb|CAL00447.1| protein product [Aspergillus niger]
  misc_feature (70)..(720): NCBI GI: 226293863 Blast Desc: conserved [Paracoccidioides brasiliensis Pb18]
  misc_feature (7)..(747): NCBI GI: 256730922 Blast Desc: NECHADRAFT_84637 [Nectria haematococca mpVI 77-13-4]
  misc_feature (70)..(704): NCBI GI: 225684243 Blast Desc: conserved [Paracoccidioides brasiliensis Pb03]
MEANTVQKLSEIQKDLQKTLEKLKPVDGSERSEREKNVNSVFMDIQGSALRDQIASLESELPKVRKQQLILASLRFPEIRIRHDNIRLAHQSTLQWVLDHNRHNFGQWLRTGHGIYWIRGKAGSGKSTLMRFLVEHEKTTAALSKWAGQQRLIIASHYFWIVGNSIQKSREGLLRTLCFQIFRQVPELMETIFPSRWTAEDSQIDSWSADALFEALTSLSLDPAAPLRFCFFIDGLDEYTAGAKNYHGDFEELISCLTTLAKSPIIKICVSSRPWNQFNVAFGDSSKSLKLEDLTKDDIKWYVTDKFRSNPRFQQLEATDPRCKGLPDTIVAKAQGVFLWVHLVVESLLKGISDDDNYTELQNRIEHIPDDLQEYFKRMLTSIESVYFEQTMRIFRIAVDAEQPLPLLAYGFLDQEWDTPGFSLSLTVEQCSQMNRGEIEKRMESRLNARCKDLLNVVRNIEGFPVLPNPFSPGSDVTYVEPTDPPFMKKQVDFLHRTVRDFFLETDFLAELMNKRKKEFDSLISLCKVTVALLTATHASVPNLATLPRHPSVNRVFALADSLVHYVRRIERDALDENTAPLSLEMKTRVEVAHRLLDELDQINTNYMPNLSCHWTNLREPATGNFQEYKHKTFLASAIEGRLSLYVSKTLNNNPRLLQQKKGRPLLDYALRPTIVTPTDFVSLDEGPDLSIVEDLLSRKADPNKGIYIYDSKSPWKMFLEECSKNRKDLHREFHDTMHLMISHGADREEFDKFRRWQLEDIGLTNEEITDLQALVGRMRLENSGFLSYVSKLWSGR

SEQ ID NO: 11404 - DNA, 4540 bp, Muscodor strobelii
  misc_feature: SGI EST ID NO. CUFF.27103.0
  misc_feature: Variant of the nucleotide sequence at SEQ ID NO 11402
caaatgaacataatccgaacataatgtaaggtgatgaatcttcaagattgtttgagactatgtcgggtctgaggatctttccttacttactaatgcccttgtcccgtaccatagccaatatgtcttcaagcgggtaaaatctttcctacttccattggcatactgagccagcatcaaagggtcattagcagcatggttcccggcattctgaggctgtctagctactcaggaacggaggtaccgcatgctacagctatattttggcggaaacatgaacccgatcttcgttcaggtcatcataggcgacagttcatatctcgccgggtctcaatgatattgccgtcattgattcgacggatggctcactcttttcatccattacgtcgtctacggagcaatgataacattttcataggtgctcgaacccagagtctctcatctttatgtaaaggaatacgttcctcaacatgtttgccttcgattctagttctttccaccacgaagccgcgcggacccagggtgctttcataatcgtttatgtctctgtcttcttgtctcccgtcccctagtcgtactatcagttgccgcgctcgttccagtctcgaatttaggatttgcttaagctaggagatgcggatacaatgctagcatacatgtgtctgatcttcttgtcgttttccaatcaaatcttcggaaagggttgaattttgctgttgcactttcatcgttgcggccgtgacggtggctcatcgtcttgactgtttttgttcagaagtgccgtggtcgagatgtcattggctagatgtcgagtacatacttttcatcagattgatctgaccgtgtttattcgagggcattttcgaaacttgagactgttaaaatgatgactccacgatatactaatgctctttggcgcctgggaggctctgtatgatcttagtattgaagcgatactcagctgaaaaagacgaggttttgaccccgccgcttttctactcagccaatttgattgcctgcatagccgcccaacagcataatttgcatcccgatcctacaatttgattggctgccaggcttgctgatgcatctttacgacagatacaacgttagacaacatgaatacccttgattttagctgcctatccggagaggagcccatagttcttccccgcttcgcaccaccaaattgccttgaaggtcgattacttatgtcgttctttgaccgagcgccagaatcttcccatattgtgtaatccaacctgtggtccacagttcgtgagtccaggctccccggcaatggcagaatttgctgcgctcggtatcgcgagtaatattttccaatttgtccagcttggtattaaaatcggcctcaaaactcgcgaactatatatatctgcatcaggcgcgatagacctcaatgtagagatagagtcggacactagggaattcatggcaattttggagcagctcaggttaaatacttcaaccgctatttccggttccaaggcagagagatccctctacaagctaatcagatcttgcgaggatgtgtcaaggaaactcgtcgatctactcgaaagcttaaaaatagatacgacaaagagatcccggtttaaagtcttccaacaggctatcttgaatgagtcggctcgcggacaaataacacaactacaaaacagactgcaaggtctgaaagttgagactgtcatctgtttggccgctatctcaagagacgagcaatcaagcgctaaccgggccataaacgatctcatgaatgttaatgccaggatggaggcaaacacagtgcagaagctgagcgagattcagaaagatctgcagaagaccttggaaaaattaaaaccggtcgatggtagcgagagatcagagcgcgaaaaaaacgtgaactctgtatttatggatattcaggggtctgcgctaagggaccagatcgccagtctggaatccgaactcccgaaggttcgaaagcagcagctcattctagcaagtctccgatttccagaaatcagaatacgccacgataatattcggcttgctcaccagtcgacgctacagtgggttcttgaccataatcgccacaattttggtcaatggctacggacgggacacggaatttactggataagagggaaggctggaagcggaaaatcaaccttaatgcgatttctggttgagcacgagaagacgactgcggcactatcaaagtgggccggccagcaaaggctaataatagctagccattatttttggattgttggaaattcgatacagaaatcccgggaaggccttctgcgaacactctgtttccagatctttcgacaggttccagaattgatggagaccattttcccatcccgttggactgccgaggattctcaaattgattcctggtcagctgatgcgctgtttgaggctttgacgtcactatctttagatcctgccgctccactccgcttttgtttcttcatcgacggacttgatgaatacactgcaggggctaaaaattatcacggtgactttgaagagcttatcagctgcttaacaactctcgccaaatcgcccattatcaagatttgcgtctctagccgtccatggaatcagtttaacgttgcattcggggattcttcgaagtcgttgaaactagaggatctcaccaaagacgacatcaaatggtacgtgacggacaagttccgatcgaatcctcgcttccagcaattggaggcaactgatccgaggtgcaaaggcctgccagataccatagtagccaaagcgcaaggtgttttcctatgggtccatctggttgtcgaatcactactcaagggcataagtgacgatgataattacaccgaattacaaaatagaattgagcatatacctgatgatttacaagagtatttcaaacgtatgctcacgtccatcgaatcggtgtacttcgaacaaactatgcgaatatttcgaatcgcggtcgatgcagagcagcccctaccacttcttgcatatgggtttttagatcaagaatgggacacccctggtttctcattgagcttgacggttgaacagtgctctcagatgaacaggggagaaattgagaagaggatggagtcccggctaaatgctcgatgcaaggaccttcttaacgtcgtacgcaatatagagggctttcctgtattgcccaatccattttcccccggaagcgatgtcacctacgttgaaccgaccgacccaccatttatgaagaagcaagtcgacttcctacatcgcaccgttagagatttcttcctcgagaccgactttctggccgagctgatgaacaaacggaaaaaagaattcgatagtctgatttcgttgtgtaaagttacggttgcattgttgacagcgacgcatgcctctgttcctaatcttgctacccttccacgtcatccaagcgttaacagggtattcgctttggcagattcgctcgttcactatgttcggaggatcgagcgcgacgcgcttgatgaaaacacggcccctttgagcttggaaatgaaaactagagtcgaggtggctcatcgacttctagacgaactcgatcaaatcaatactaactacatgcctaatttgagttgccattggacaaatcttcgagaaccggccacaggaaactttcaagaatacaagcacaaaacttttctcgcttctgcgatagaaggaagattgtctctttacgtttctaaaacacttaacaataacccccgattattgcagcagaagaagggtcgcccattgcttgattatgctttgcggccaacgatagtaactcctactgatttcgtgagcttggatgagggaccggatctatcaatagtggaggatctactatcaaggaaggcagatccgaataaaggaatctatatttacgacagcaaaagtccatggaagatgttcctcgaggaatgctcgaaaaatagaaaagacctccatcgcgagttccacgacacaatgcatctcatgatctcccacggagcggaccgtgaagagtttgataagtttagaagatggcaactggaagacataggacttactaacgaagaaattaccgatctacaagcgcttgtggggagaatgcgcttagagaattcaggctttctttcctatgtatccaaactctggagtggcaggtaatggagcaacacgccatgggagccgtctgtttaccctttgatgattgaaccgtcattcgtttaactcctgtaccaatttacatggcggattgtgctttggcgatggtattacagatagacatgttgtatgtcatctcccaaatctcacaaataagcctttttgatatcattgacttttcattttatcttaaacagagagaagcggggttctcaaatatctgagatctttgtctctttaagagttaactagctgagcactatatgatctgtcaatctctataatgtgcagtgattagatgccgaaattcatattggcatcgtttaacgcatccagataaatacaaagcattgaacaggtt

SEQ ID NO: 11405 - DNA, 1407 bp, Muscodor strobelii
  misc_feature: SGI cDNA ID NO. 563662
  misc_feature: Encodes the peptide sequence at SEQ ID NO 11406
atgcagagcgcagcggatcaagccgacgccatcttctggaaggcttacggtacggccatcaaaagacaagtcggtcaaatctcaatcaatgagcacacggctttttatctggccactaaggctcagcgtggacctccaggaggggacgggatctctacgagatacacaaacgagggactgtatcagctggggaacaacttgcttcatgcagatcagttgttctacagcccttccactcagagtggctatatcgatcagctcgtgacgtatcttgcttgggttgatgtcggaggcaatcctaccccagccaatgtgcaacaggtcaccaacaccacgcaagacatgctcgctgcccgtactttccgcaacaagcagcttgtcgaggcacagggcgacttcaagacccagcagttagctggtcttattgggaagcagacattcgctcaatggatcccagagaatgctacagcttatacacaagctgtcaaagccctcaattccaagactgctgcctaccaaaaggctgtgaagaatgcatatggcccgctagcagatgccaagctggccgatgaagcaaagctcgccaaagcgcaggaagcaatcccagagaatgcggctccaggtttcaccatggagtgttccttgggttctcctcccagcgctagggagatcctaaacgcccaaaacaacggccagaagacagatgcgcctcctccggttcttcgtcccgcgttcaatgcccctagctatgtttctgtcatcaaggaagcccagatgaccgtcggcacccagtccgctccgaaaaactctttgacattcaccttttgcgatggtcaaaatgtcagcgagggcagtttcaaccattcgcatctatcaggtggcacaagcttcggctatattccttggatctcaatcggtgctgtaggctcctcggctgaggagaggtcctccatcagtacgtcctcggactcttcagatatcaccgtcaccatgaccttcgatgccatgacactcgcgtctatcaatccaagcgcatcttgggatcttggcaatgtgcgtgccaaatataagaagcttctccccggtgctcccgaatcggtccagacacttgtgaagcccacacagctactcctggccacccgcttgggctacaaaatcaagctcggggtgagctcctcaaagcagttcgactcagcatatcagagtgctcaaagtggcgatgtttcatttcgcatctttggtatctcttgtggaccctacatcaaaggctcggacggtgactccgagaacacccattccctcaagtgggactccacctctcaggaaatcaccattgagcccaccgatgacgctggcttcgccactatcatcggcatcgttggcgagaagatcatcaccagcgcttag

SEQ ID NO: 11406 - protein, 468 aa, Muscodor strobelii
  misc_feature: SGI Peptide ID NO. 563662
  misc_feature (6)..(462): NCBI GI: 256723703 Blast Desc: NECHADRAFT_86636 [Nectria haematococca mpVI 77-13-4]
  misc_feature (9)..(466): NCBI GI: 256728530 Blast Desc: NECHADRAFT_72470 [Nectria haematococca mpVI 77-13-4]
  misc_feature (7)..(464): NCBI GI: 46110202 Blast Desc: FG01983.1 [Gibberella zeae PH-1]
  misc_feature (29)..(464): NCBI GI: 256727239 Blast Desc: NECHADRAFT_75907 [Nectria haematococca mpVI 77-13-4]
  misc_feature (3)..(464): NCBI GI: 256726716 Blast Desc: [Nectria haematococca mpVI 77-13-4]
  misc_feature (2)..(464): NCBI GI: 256726717 Blast Desc: [Nectria haematococca mpVI 77-13-4]
MQSAADQADAIFWKAYGTAIKRQVGQISINEHTAFYLATKAQRGPPGGDGISTRYTNEGLYQLGNNLLHADQLFYSPSTQSGYIDQLVTYLAWVDVGGNPTPANVQQVTNTTQDMLAARTFRNKQLVEAQGDFKTQQLAGLIGKQTFAQWIPENATAYTQAVKALNSKTAAYQKAVKNAYGPLADAKLADEAKLAKAQEAIPENAAPGFTMECSLGSPPSAREILNAQNNGQKTDAPPPVLRPAFNAPSYVSVIKEAQMTVGTQSAPKNSLTFTFCDGQNVSEGSFNHSHLSGGTSFGYIPWISIGAVGSSAEERSSISTSSDSSDITVTMTFDAMTLASINPSASWDLGNVRAKYKKLLPGAPESVQTLVKPTQLLLATRLGYKIKLGVSSSKQFDSAYQSAQSGDVSFRIFGISCGPYIKGSDGDSENTHSLKWDSTSQEITIEPTDDAGFATIIGIVGEKIITSA

SEQ ID NO: 11407 - DNA, 690 bp, Muscodor strobelii
  misc_feature: SGI cDNA ID NO. 563663
  misc_feature: Encodes the peptide sequence at SEQ ID NO 11408
atgccgaggaaacaaatcttcaacctacatcccgaaggctgggaaaccgacccagtcgacgaatatcagaagctgggcttgatcgattactgtgcggcacaggtatacacaaactacgccctgttcttcaagctgtcggacgaggtaaagcccaagactatcccagttctgaagcgggctctggagatcacgctgagtcaatgtcgccagctatgtggcacaatcgaagagaacccagacggcgggctatggtttcacaaaaagaaggaagacacagtggagttccacgtacagtggctcgacggccccgaggacgagggtaagtacccttccatggccgagctcgagaagcgccactttactaccctgggagacttgaatatctggtgcgtaatgccaatgacgtttgaggaaaagcctgaagcgcggcctgagaacaagcccaaggtggctgccttcaaggcgaccttcattcgtggcggcttggtctttatgatgcacaaccaccatttcgccaacgacatcacggggtgggctggctcatgtcaccagctggctgagaattgtgccgcgatctggaagtcgcccaacaatccgacactgccccttgtaagcaacttctatgggacattgcgtgcatggactactcgccagtcagcaggccagaccctccagaagagcagcgcatag

SEQ ID NO: 11408 - protein, 229 aa, Muscodor strobelii
  misc_feature: SGI Peptide ID NO. 563663
  misc_feature (3)..(202): NCBI GI: 171685156 Blast Desc: protein product [Podospora anserina] gi|170942539|emb|CAP68190.1| protein product [Podospora anserina]
  misc_feature (1)..(191): NCBI GI: 67903078 Blast Desc: AN8526.2 [Aspergillus nidulans FGSC A4] gi|40747723|gb|EAA66879.1| AN8526.2 [Aspergillus nidulans FGSC A4] gi|259484476|tpe|CBF80729.1| TPA: conserved [Aspergillus FGSC
  misc_feature (1)..(200): NCBI GI: 169780802 Blast Desc: [Aspergillus oryzae RIB40] gi|83773605|dbj|BAE63732.1| protein product [Aspergillus oryzae]
  misc_feature (1)..(192): NCBI GI: 115492499 Blast Desc: ATEG_00791 [Aspergillus terreus NIH2624] gi|114197737|gb|EAU39437.1| ATEG_00791 [Aspergillus terreus NIH2624]
  misc_feature (1)..(192): NCBI GI: 75859110 Blast Desc: AN9513.2 [Aspergillus nidulans FGSC A4] gi|40747595|gb|EAA66751.1| AN9513.2 [Aspergillus nidulans FGSC A4] gi|259481958|tpe|CBF75968.1| TPA: conserved [Aspergillus FGSC
  misc_feature (1)..(192): NCBI GI: 256722494 Blast Desc: NECHADRAFT_58738 [Nectria haematococca mpVI 77-13-4]
  misc_feature (1)..(192): NCBI GI: 255936533 Blast Desc: Pc13g08680 [Penicillium chrysogenum Wisconsin 54-1255] gi|211583913|emb|CAP91937.1| Pc13g08680 [Penicillium chrysogenum Wisconsin 54-1255]
  misc_feature (7)..(192): NCBI GI: 115387779 Blast Desc: ATEG_02217 [Aspergillus terreus NIH2624] gi|114195479|gb|EAU37179.1| ATEG_02217 [Aspergillus terreus NIH2624]
  misc_feature (1)..(200): NCBI GI: 46118204 Blast Desc: FG04692.1 [Gibberella zeae PH-1]
  misc_feature (1)..(199): NCBI GI: 116199573 Blast Desc: CHGG_07942 [Chaetomium globosum CBS 148.51] gi|88179221|gb|EAQ86689.1| CHGG_07942 [Chaetomium globosum CBS 148.51]
MPRKQIFNLHPEGWETDPVDEYQKLGLIDYCAAQVYTNYALFFKLSDEVKPKTIPVLKRALEITLSQCRQLCGTIEENPDGGLWFHKKKEDTVEFHVQWLDGPEDEGKYPSMAELEKRHFTTLGDLNIWCVMPMTFEEKPEARPENKPKVAAFKATFIRGGLVFMMHNHHFANDITGWAGSCHQLAENCAAIWKSPNNPTLPLVSNFYGTLRAWTTRQSAGQTLQKSSA

SEQ ID NO: 11409 - DNA, 2040 bp, Muscodor strobelii
  misc_feature: SGI cDNA ID NO. 563664
  misc_feature: Elevated expression when VOC is produced
  misc_feature: Encodes the peptide sequence at SEQ ID NO 11410
atgaaggtcttcatatcgctattgatggcaggggctattggggtgactacgacagcgctccatagcacaaccgttagcgttagcccagttggggatggtccaaccttgacacctcagaagaactacaatggctgggttaaccccgaagatttggctcctatgccgcagtgcatcgctcagcaggaccattccacctggctgcgtgtcatgacagaatgcaccagccaacgatgcacgtcgtggtttgggatcatctgtacacaccaccaatggctgacagcgctcagttgtctcagcgaaggcttctctcccgatgtcgtccaagattatcttccatattgtggcagatcagtcctcgccaaagcacaattgtctcattgggtccgtaacatcactggccgaacgtggctagctgaagtcggcgacacaaacgggctccaacacctctcgccgtcctctctagctagtggctacgcatcgatcgacgacgtgacatacaaggcgccaacatgtctgaccagttcgcctgctgcgttatcgatggagagctttcagcatgtgatggggtcatgtagtttcactggcactaccctgcacaccgggaacgccgctcgtccttgggaatacaatccatccctacggtctatgattgctctagattctcaaactgctggttacgacctcatcgagggtagcatcaaacagggcgattatttcgataagagatgcttctgcgacgcgttctctcttaacacggaaaaggaaagctgtaccggcgggcccgggcaattagacctcacaatggaacggttatggatgaatgccacctgtgggccaacgtccttgcctgacaattggaccgacacactcaaaattactaaattcgcgtacatcccagtgggcgactggcaatggccccggtgtgtcgctgatatgccaaaggaagtgattgagctcacagataagtgtgggactgatgcatattcgtgccacatcttcgagactcgaatagaatatatcaagtggctccatggtctttgtagcaacgtgccagagtggcacggcctgccagatgattggcgtcagttggctgtcccaacgcttcaggacatgataccatggcgctggactgtcaaaccatctggtgattctgaaataaccaattcgtatgaatggaaaatcgggagcattggcttggtcaatctagcttccttcttggccgcgctgctcagcttgagaacaaatcttcaccggaccgctagtggctttgttctgaagggaactatgattgccgctcttcaactcttcgcatactggttcactgcaaatattgtccagaaatcttccagattcggagacatccctgttggtcaattggtgcttctctggtctacaatgccacgacctgcctggtttacaactttgatggctgggaatcaccctttcgaatggaggaatacctctgtagtcccgacttttctactcgctgaatggatccttcagattgtatcatcatattacatagtgatgacagtcaattatggccgacagcacaatttctactttgaagccctcgaaggagctgagagagcgacatcggcacaaatcatgtacctcggagccgtcatgtggcttgcggtcagttgcctgatcgtgttccaggaaattcgggcttcgacccgttcaaccgaagctagtagccccgacccgcaagaatgccagaacatagcatgggcgacaaggaacttagcacaagagctacaagagcgaacacctttgacgagtcggcagtgggatcatgtggcatatggcagcgtttctgtagaaattgagggtgaacaggtctggcgcgaagtattcgtgggaccacgtacaacaaacggcatcccttcgcttctactttggattgcacaatggctcttttggggcggatttattcgtctcagctcggacgagttctgtccccctcaccttggagttctcacggctatctggtctatctcgtcgatggcgggcattgctcttggagctacttggtga

SEQ ID NO: 11410 - protein, 679 aa, Muscodor strobelii
  misc_feature: SGI Peptide ID NO. 563664
  misc_feature (1)..(656): NCBI GI: 145237742 Blast Desc: An07g04360 [Aspergillus niger] gi|134075992|emb|CAK48186.1| [Aspergillus niger]
  misc_feature (32)..(652): NCBI GI: 212533639 Blast Desc: PMAA_074980 [Penicillium marneffei ATCC 18224] gi|210072340|gb|EEA26429.1| PMAA_074980 [Penicillium marneffei ATCC 18224]
  misc_feature (1)..(651): NCBI GI: 169624648 Blast Desc: SNOG_15584 [Phaeosphaeria nodorum SN15] gi|111055839|gb|EAT76959.1| SNOG_15584 [Phaeosphaeria nodorum SN15]
  misc_feature (39)..(557): NCBI GI: 256722305 Blast Desc: NECHADRAFT_54398 [Nectria haematococca mpVI 77-13-4]
  misc_feature (7)..(606): NCBI GI: 46127715 Blast Desc: FG08235.1 [Gibberella zeae PH-1]
  misc_feature: Useful for introducing or modulating the production of volatile compounds
MKVFISLLMAGAIGVTTTALHSTTVSVSPVGDGPTLTPQKNYNGWVNPEDLAPMPQCIAQQDHSTWLRVMTECTSQRCTSWFGIICTHHQWLTALSCLSEGFSPDVVQDYLPYCGRSVLAKAQLSHWVRNITGRTWLAEVGDTNGLQHLSPSSLASGYASIDDVTYKAPTCLTSSPAALSMESFQHVMGSCSFTGTTLHTGNAARPWEYNPSLRSMIALDSQTAGYDLIEGSIKQGDYFDKRCFCDAFSLNTEKESCTGGPGQLDLTMERLWMNATCGPTSLPDNWTDTLKITKFAYIPVGDWQWPRCVADMPKEVIELTDKCGTDAYSCHIFETRIEYIKWLHGLCSNVPEWHGLPDDWRQLAVPTLQDMIPWRWTVKPSGDSEITNSYEWKIGSIGLVNLASFLAALLSLRTNLHRTASGFVLKGTMIAALQLFAYWFTANIVQKSSRFGDIPVGQLVLLWSTMPRPAWFTTLMAGNHPFEWRNTSVVPTFLLAEWILQIVSSYYIVMTVNYGRQHNFYFEALEGAERATSAQIMYLGAVMWLAVSCLIVFQEIRASTRSTEASSPDPQECQNIAWATRNLAQELQERTPLTSRQWDHVAYGSVSVEIEGEQVWREVFVGPRTTNGIPSLLLWIAQWLFWGGFIRLSSDEFCPPHLGVLTAIWSISSMAGIALGATW

SEQ ID NO: 11411 - DNA, 2417 bp, Muscodor strobelii
  misc_feature: SGI EST ID NO. CUFF.27128.0
  misc_feature: Variant of the nucleotide sequence at SEQ ID NO 11409
cgcatcgaaagggtcagcaaacggtcttttcaatcttttcgaggctcaaacatccacaaagatgaaggtcttcatatcgctattgatggcaggggctattggggtgactacgacagcgctccatagcacaaccgttagcgttagcccagttggggatggtccaaccttgacacctcagaagaactacaatggctgggttaaccccgaagatttggctcctatgccgcagtgcatcgctcagcaggaccattccacctggctgcgtgtcatgacagaatgcaccagccaacgatgcacgtcgtggtttgggatcatctgtacacaccaccaatggctgacagcgctcagttgtctcagcgaaggcttctctcccgatgtcgtccaagattatcttccatattgtggcagatcagtcctcgccaaagcacaattgtctcattgggtccgtaacatcactggccgaacgtggctagctgaagtcggcgacacaaacgggctccaacacctctcgccgtcctctctagctagtggctacgcatcgatcgacgacgtgacatacaaggcgccaacatgtctgaccagttcgcctgctgcgttatcgatggagagctttcagcatgtgatggggtcatgtagtttcactggcactaccctgcacaccgggaacgccgctcgtccttgggaatacaatccatccctacggtctatgattgctctagattctcaaactgctggttacgacctcatcgagggtagcatcaaacagggcgattatttcgataagagatgcttctgcgacgcgttctctcttaacacggaaaaggaaagctgtaccggcgggcccgggcaattagacctcacaatggaacggttatggatgaatgccacctgtgggccaacgtccttgcctgacaattggaccgacacactcaaaattactaaattcgcgtacatcccagtgggcgactggcaatggccccggtgtgtcgctgatatgccaaaggaagtgattgagctcacagataagtgtgggactgatgcatgtgagctcgactcgcaaggttactgcaaagttaatcgtgcagttgaccgagcctgcttctgtcgtaacatcagttacgattcctgttcagattcgtgccacatcttcgagactcgaatagaatatatcaagtggctccatggtctttgtagcaacgtgccagagtggcacggcctgccagatgattggcgtcagttggctgtcccaacgcttcaggacatgataccatggcgctggactgtcaaaccatctggtgattctgaaataaccaattcgtatgaatggaaaatcgggagcattggcttggtcaatctagcttccttcttggccgcgctgctcagcttgagaacaaatcttcaccggaccgctagtggctttgttctgaagggaactatgattgccgctcttcaactcttcgcatactggttcactgcaaatattgtccagaaatcttccagattcggagacatccctgttggtcaattggtgcttctctggtctacaatgccacgacctgcctggtttacaactttgatggctgggaatcaccctttcgaatggaggaatacctctgtagtcccgacttttctactcgctgaatggatccttcagattgtatcatcatattacatagtgatgacagtcaattatggccgacagcacaatttctactttgaagccctcgaaggagctgagagagcgacatcggcacaaatcatgtacctcggagccgtcatgtggcttgcggtcagttgcctgatcgtgttccaggaaattcgggcttcgacccgttcaaccgaagctagtagccccgacccgcaagaatgccagaacatagcatgggcgacaaggaacttagcacaagagctacaagagcgaacacctttgacgagtcggcagtgggatcatgtggcatatggcagcgtttctgtagaaattgagggtgaacaggtctggcgcgaagtattcgtgggaccacgtacaacaaacggcatcccttcgcttctactttggattgcacaatggctcttttggggcggatttattcgtctcagctcggacgagttctgtccccctcaccttggagttctcacggctatctggtctatctcgtcgatggcgggcattgctcttggagctacttggtgacagcagatccatcgctgaactcgcaagcagttggagcatcctgttgtgaacgtgatccgctatagagcaaaataggcaattgcattgtcaggcgttacgctaggaaggttatcgttcttttcgtcatgcatgaaggttccttcggtgtagaagagctacgttatgaatagcggcataagtatgaatgcatctttcaattctgttttaagagtctttgctacccgtg

SEQ ID NO: 11412 - DNA, 459 bp, Muscodor strobelii
  misc_feature: SGI cDNA ID NO. 563665
  misc_feature: Encodes the peptide sequence at SEQ ID NO 11413
atggcgggcgataattcttctggtcgctctatcgagcctgccaccgagcaggaactcttcaatgaccctcttccgagtctcgcaatagcagacaagccactgggatctatgcggcgtcgtaccggtcgtttatccgatcgcaatgccaacgcagaagcttttgcccgcttccagcttctacgtgaagagcccgtacagccgctcaccaagactacgaccttgcctagggccataagctctgcccctagaagacgccgatcagacaacctagaagtcatcggcatttttacttctagggctacagtccttgatgttttcgctcgcaacgctgatgatatcgttgctgaagttctcgctcttgcttccgctccggccacacggcgcaatatcactcttgcgcaatattggatcgagcatccgcatacccgcagagccaatgccagcgaagcacgcctctga

SEQ ID NO: 11413 - protein, 152 aa, Muscodor strobelii
  misc_feature: SGI Peptide ID NO. 563665
MAGDNSSGRSIEPATEQELFNDPLPSLAIADKPLGSMRRRTGRLSDRNANAEAFARFQLLREEPVQPLTKTTTLPRAISSAPRRRRSDNLEVIGIFTSRATVLDVFARNADDIVAEVLALASAPATRRNITLAQYWIEHPHTRRANASEARL

SEQ ID NO: 11414 - DNA, 1200 bp, Muscodor strobelii
  misc_feature: SGI cDNA ID NO. 563666
  misc_feature: Encodes the peptide sequence at SEQ ID NO 11415
atggcaaccatctttgaccttctcagtcgataccctgttctgtccagtgtgtgtcaatatcttgacaacaaggatcgactggcgcttagtcaaacatccacagaagcccgtcaggtttccaaacccttcctacccaacatcaacaagtcgctgaagcgattctttactgatcctatggcatttcgcactgaacttggccactgcgatgcgctaattactggtagttttgctattcagttcttcaagggcgttgtctggaaggagtctgatctcgacatattcgtcaaggaaggccctggtctttcaagactgtccgattacttagtcagtaaagaaggctacacgatgatcagcgaagagaattccggtgacggagagtacaggctctctggcaccacgaattgccggagcttctccaatactgaaaaatgtaaagtccagttgatcgcctgtgccgaacctccagtccacgtgatcctcgaacacttctacacgtcttgtacgatcaatttcatctcatggaataaagctttctcgatcttcccgcgaacaacctttctatatcatgagacagtaccgatggcacctttggacgagtactactcaaatctacactctaagtatagccgccgcggctggagactccgaatcgcagatccctcttggggctccacccatctggcaaatgggtactggaaagaatttggttctaaaaaggatcagcgacgcgttggcgacgagaagacttgggtcttacctctaaacatggacggcgtcgagcagcctgctacgcccgattttgtcctcgagagctcatgtttttatgtcaagtcaatgaggaaagttgctgagagcggaaacttcttcgaacaggtcaactgttttgccattcgtgcaccaactttcacttcaccagcattgagatacaaatacacctacaacgacgacgactttcctttttggatctcaaaagtcgtcgcagagtcaagcatccttcaactcaataagctggaccaggacgttcgcactagcctattgcacggccgatcactggtacaattcatgtctgctgaaggaccccgaggtacaaacgaatgggaatttgagaagccagatggctgggactattatgacgaccttatcgaggagcatgtcaagtttacgactaaacaacgtcgacagaagaaattggctcaatag

SEQ ID NO: 11415 - protein, 399 aa, Muscodor strobelii
  misc_feature: SGI Peptide ID NO. 563666
  misc_feature (4)..(383): NCBI GI: 256721412 Blast Desc: NECHADRAFT_88423 [Nectria haematococca mpVI 77-13-4]
  misc_feature (6)..(396): NCBI GI: 154301077 Blast Desc: [Botryotinia fuckeliana B05.10] gi|150856259|gb|EDN31451.1| [Botryotinia fuckeliana B05.10]
  misc_feature (2)..(259): NCBI GI: 242209890 Blast Desc: [Postia placenta Mad-698-R] gi|220730133|gb|EED83995.1| [Postia placenta Mad-698-R]
  misc_feature (46)..(259): NCBI GI: 170085847 Blast Desc: [Laccaria bicolor S238N-H82] gi|164651699|gb|EDR15939.1| [Laccaria bicolor S238N-H82]
  misc_feature (7)..(252): NCBI GI: 169845441 Blast Desc: [Coprinopsis cinerea okayama7#130] gi|116509505|gb|EAU92400.1| [Coprinopsis cinerea okayama7#130]
  misc_feature (46)..(260): NCBI GI: 169844535 Blast Desc: [Coprinopsis cinerea okayama7#130] gi|116509728|gb|EAU92623.1| [Coprinopsis cinerea okayama7#130]
  misc_feature (12)..(337): NCBI GI: 169845439 Blast Desc: [Coprinopsis cinerea okayama7#130] gi|116509504|gb|EAU92399.1| [Coprinopsis cinerea okayama7#130]
  misc_feature (4)..(213): NCBI GI: 119194221 Blast Desc: [Coccidioides immitis RS]
  misc_feature (46)..(342): NCBI GI: 170115779 Blast Desc: [Laccaria bicolor S238N-H82] gi|164636031|gb|EDR00331.1| [Laccaria bicolor S238N-H82]
  misc_feature (153)..(381): NCBI GI: 46117372 Blast Desc: FG04528.1 [Gibberella zeae PH-1]
MATIFDLLSRYPVLSSVCQYLDNKDRLALSQTSTEARQVSKPFLPNINKSLKRFFTDPMAFRTELGHCDALITGSFAIQFFKGVVWKESDLDIFVKEGPGLSRLSDYLVSKEGYTMISEENSGDGEYRLSGTTNCRSFSNTEKCKVQLIACAEPPVHVILEHFYTSCTINFISWNKAFSIFPRTTFLYHETVPMAPLDEYYSNLHSKYSRRGWRLRIADPSWGSTHLANGYWKEFGSKKDQRRVGDEKTWVLPLNMDGVEQPATPDFVLESSCFYVKSMRKVAESGNFFEQVNCFAIRAPTFTSPALRYKYTYNDDDFPFWISKVVAESSILQLNKLDQDVRTSLLHGRSLVQFMSAEGPRGTNEWEFEKPDGWDYYDDLIEEHVKFTTKQRRQKKLAQ

SEQ ID NO: 11416 - DNA, 981 bp, Muscodor strobelii
  misc_feature: SGI cDNA ID NO. 563667
  misc_feature: Encodes the peptide sequence at SEQ ID NO 11417
atgccagaaatcggctccacaggcggcctgacgccgactcagctatcgcaattcgagcgcgatggctatctcattctcccgaaagcactaccaccgacgaccgttcaagcactcctcgctgagacacatcagctgctcacagacttcccattggagtcacaccctatgacgaggtttagcaccggccaaaaatcggcacacgtgggagacgactattttctgggctccggggataaaatcaggtttttcttcgaagaagacgcgttttcgtcatctggtgaactagtgaagcgaaaggaacaggcgatcaacaaaattggccattatctacacgccttgtcgaaaccttttgcgtctctactagacccggcgttgaatccggatctgctaggtgccagcgcaagcacaggtagtgtcgcggcgggtgggaaagagtcgcatcccgctgccattgcaagagccattggtttcgccgacccaagagtcctgcagagcatggtcatctgcaaacaacctgagataggcggagctgtacccccacatcaggactcgacattcttatatacgaacccaccaagcgcagtaggcttctggtacgcgcttgaggacgcaacgaaggaaaatggatgtctatcattcctaccaggaagtcacaaatgggcgtcaatcaagcagcgatttgtgcgctctgtggatgggaaggggacggaattcatggataatgttgggccgcagttcccagttagtgaagaatttggagaaagggacggaaaagaggagggagagtatgtccttggtgaggttaaagccggcgatttggtactgattcatggcaatttgctacataagagcgagaggaacacgagtaagaagggccgtatcatatacacgttccatgttattgagggtcaaaatgagtatgatgagaggaactggctacagccgccccaggaggggtttacgaagctgtataggagctag

SEQ ID NO: 11417 - protein, 326 aa, Muscodor strobelii
  misc_feature: SGI Peptide ID NO. 563667
  misc_feature (16)..(295): Pfam Id: PF05721 Pfam Desc: Phytanoyl-CoA dioxygenase (PhyH)
  misc_feature (4)..(324): NCBI GI: 46137483 Blast Desc: FG10257.1 [Gibberella zeae PH-1]
  misc_feature (6)..(324): NCBI GI: 85099812 Blast Desc: NCU04228 [Neurospora crassa OR74A] gi|21622370|emb|CAD37000.1| conserved [Neurospora crassa] gi|28922380|gb|EAA31616.1| NCU04228 [Neurospora crassa OR74A]
  misc_feature (9)..(325): NCBI GI: 39977991 Blast Desc: MGG_06880 [Magnaporthe grisea 70-15] gi|145013553|gb|EDJ98194.1| MGG_06880 [Magnaporthe grisea 70-15]
  misc_feature (1)..(324): NCBI GI: 116197889 Blast Desc: CHGG_07100 [Chaetomium globosum CBS 148.51] gi|88178379|gb|EAQ85847.1| CHGG_07100 [Chaetomium globosum CBS 148.51]
  misc_feature (6)..(323): NCBI GI: 156055760 Blast Desc: SS1G_05232 [Sclerotinia sclerotiorum 1980] gi|154703016|gb|EDO02755.1| SS1G_05232 [Sclerotinia sclerotiorum 1980]
  misc_feature (9)..(325): NCBI GI: 171694299 Blast Desc: protein product [Podospora anserina] gi|170947098|emb|CAP73903.1| protein product [Podospora anserina]
  misc_feature (2)..(323): NCBI GI: 154296317 Blast Desc: BC1G_12985 [Botryotinia fuckeliana B05.10] gi|150843443|gb|EDN18636.1| BC1G_12985 [Botryotinia fuckeliana B05.10]
  misc_feature (9)..(323): NCBI GI: 189188210 Blast Desc: phytanoyl-CoA dioxygenase family protein [Pyrenophora tritici-repentis Pt-1C-BFP] gi|187972050|gb|EDU39549.1| phytanoyl-CoA dioxygenase family protein [Pyrenophora Pt-1C-BFP]
  misc_feature (8)..(326): NCBI GI: 261351965 Blast Desc: phytanoyl-CoA dioxygenase family protein [Verticillium albo-atrum VaMs.102]
  misc_feature (9)..(323): NCBI GI: 255944573 Blast Desc: Pc20g05140 [Penicillium chrysogenum Wisconsin 54-1255] gi|211587789|emb|CAP85843.1| Pc20g05140 [Penicillium chrysogenum Wisconsin 54-1255]
MPEIGSTGGLTPTQLSQFERDGYLILPKALPPTTVQALLAETHQLLTDFPLESHPMTRFSTGQKSAHVGDDYFLGSGDKIRFFFEEDAFSSSGELVKRKEQAINKIGHYLHALSKPFASLLDPALNPDLLGASASTGSVAAGGKESHPAAIARAIGFADPRVLQSMVICKQPEIGGAVPPHQDSTFLYTNPPSAVGFWYALEDATKENGCLSFLPGSHKWASIKQRFVRSVDGKGTEFMDNVGPQFPVSEEFGERDGKEEGEYVLGEVKAGDLVLIHGNLLHKSERNTSKKGRIIYTFHVIEGQNEYDERNWLQPPQEGFTKLYRS

SEQ ID NO: 11418 - DNA, 1317 bp, Muscodor strobelii
  misc_feature: SGI cDNA ID NO. 563668
  misc_feature: Encodes the peptide sequence at SEQ ID NO 11419
atgggtgacgagcagcctacgctcctcgacgagcggatttggctagatggatgctgggatttcttccatcacggtcatgctggcgctatgttacaggcacgccagctcggtagcgaactttatgttggtgtacactcagacgaggaaatcatgagcaacaaaggccctacggtcatggatcttgcggaacgtctcgctgcagtagacgcctgtcgatgggttactaaatcggtggcagatgcaccgtatgtgacagagctttcattcatagggaaatatggctgcaaatacgtcgtacatggcgacgacattacatcagacagcaatggcgaggattgttatcgcttcgtaaagcaagcgggacgtttcaaagttgttaagcgcacgccgagtatatcgacgacagaccttgtaggtcgtatgctgctctgcacccgcacgcacttcatcacctcgcttgaaaagatgttggcgggtcaggaggggcatggtaccgatgacgagcggaaagccgagggagaagccatgatgactcgcattcgacagtatgctaccgatgaaggcggaaaagaacctggtgttgatgtcttcttttgggccgcttctgtcgctgctaaagagaaagacacggaagaagaatcagggacattccggcagctactcaagggtaagggccctaggccagggcagagagtcgtttacgtggatggcggattcgatctcttctctagtggccacattgagttcttgcgacaagttgtccttgccgaggaagagctagcgcggaaagacggatggtacgagaaacaggcggtcgacgagcgcgtagggaaaggcgctgattacggacctgtcttcgttatcgccggtgtgcacgacgatcaggtcatcaactactggaagggtatcaactaccctatcatgaacatctacgagcgcgggctttgcgttttacaatgtcgatatgtaaacgcggtaatatttggtgcaccatttacgcccacgaaatcatacctgactaccctaccatggggaacaccagacacggtctaccacggtcctacggcgttcatccctctcgcttacgatccttacacggcggtgaaagacatgggtatcttccagcaggtcccgaagcacaagttccaggatgtcaacgcagggaccatcgtgcagcgaatcctgaaaagtcgggatctgtatgaagagaggcagcgaaagaagggtgtcaaggcagttggcgaagcagcacaaagacatagggagatactagaagaggaacagcggattaaagaagaaaagatggggatatcataa

SEQ ID NO: 11419 - protein, 438 aa, Muscodor strobelii
  misc_feature: SGI Peptide ID NO. 563668
  misc_feature (14)..(140): Pfam Id: PF01467 Pfam Desc: Cytidylyltransferase
  misc_feature (1)..(432): NCBI GI: 156043091 Blast Desc: SS1G_10548 [Sclerotinia sclerotiorum 1980] gi|154694936|gb|EDN94674.1| SS1G_10548 [Sclerotinia sclerotiorum 1980]
  misc_feature (2)..(432): NCBI GI: 223974991 Blast Desc: [Zea mays]
  misc_feature (2)..(436): NCBI GI: 85101048 Blast Desc: NCU04289 [Neurospora crassa OR74A] gi|11611449|emb|CAC18614.1| related to phosphoethanolamine cytidylyltransferase [Neurospora crassa] NCU04289 [Neurospora
  misc_feature (2)..(412): NCBI GI: 116197811 Blast Desc: CHGG_07061 [Chaetomium globosum CBS 148.51] gi|88178340|gb|EAQ85808.1| CHGG_07061 [Chaetomium globosum CBS 148.51]
  misc_feature (2)..(419): NCBI GI: 171693757 Blast Desc: protein product [Podospora anserina] gi|170946827|emb|CAP73631.1| protein product [Podospora anserina]
  misc_feature (2)..(417): NCBI GI: 261353166 Blast Desc: ethanolamine-phosphate cytidylyltransferase [Verticillium albo-atrum VaMs.102]
  misc_feature (2)..(432): NCBI GI: 46117458 Blast Desc: FG04571.1 [Gibberella zeae PH-1]
  misc_feature (2)..(432): NCBI GI: 256729363 Blast Desc: [Nectria haematococca mpVI 77-13-4]
  misc_feature (4)..(424): NCBI GI: 225560380 Blast Desc: phosphoethanolamine [Ajellomyces capsulatus G186AR]
  misc_feature (4)..(424): NCBI GI: 240279934 Blast Desc: phosphoethanolamine [Ajellomyces capsulatus H143]
  misc_feature (12)..(419): SWISSPROT Homolog: EC 2.7.7.14 Ethanolamine-phosphate cytidylyltransferase
MGDEQPTLLDERIWLDGCWDFFHHGHAGAMLQARQLGSELYVGVHSDEEIMSNKGPTVMDLAERLAAVDACRWVTKSVADAPYVTELSFIGKYGCKYVVHGDDITSDSNGEDCYRFVKQAGRFKVVKRTPSISTTDLVGRMLLCTRTHFITSLEKMLAGQEGHGTDDERKAEGEAMMTRIRQYATDEGGKEPGVDVFFWAASVAAKEKDTEEESGTFRQLLKGKGPRPGQRVVYVDGGFDLFSSGHIEFLRQVVLAEEELARKDGWYEKQAVDERVGKGADYGPVFVIAGVHDDQVINYWKGINYPIMNIYERGLCVLQCRYVNAVIFGAPFTPTKSYLTTLPWGTPDTVYHGPTAFIPLAYDPYTAVKDMGIFQQVPKHKFQDVNAGTIVQRILKSRDLYEERQRKKGVKAVGEAAQRHREILEEEQRIKEEKMGIS

SEQ ID NO: 11420 - DNA, 3716 bp, Muscodor strobelii
  misc_feature: SGI EST ID NO. CUFF.27149.0
  misc_feature: Variant of the nucleotide sequence at SEQ ID NO 11418
caggcaacagggaactagtcaaatagctgtctcaggagggcaaccagacacctttcaggcttcaacgtaagttggaaacaaggcagaattgcgtcgctcttggaatgtcttgtaagtaaggttcaacgcacaagataccttacttagtagcaaacaccaactgacacaaagcacataattgtcatcatgggaataaacgccaagtcaaactttcgaatgattgctagactctgtgtgtggtttagcctcgggcttctaccttgattacacgtccgctcttcgtcacgatgagtagtcgctcacatagcttaattcgtccgcgcggactgaaggatgcactgagcgactgccaaaatactttagcctcagaatctaaacaaatatctttacatgaagtgtcaagacttgtgttgttcctctaccctgctatcttgtgaaatgcatctcgttatgtcatttcgccggcaaccccccaggccacatggaaacaaaataatacagtccatttccgtccctttctcttctcttctaccagcttctctagctcctatacagcttcgtaaacccctcctggggcggctgtagccagttcctctcatcatactcattttgaccctcaataacatggaacgtgtatatgatacggcccttcttactcgtgttcctctcgctcttatgtagcaaattgccatgaatcagtaccaaatcgccggctttaacctcaccaaggacatactctccctcctcttttccgtccctttctccaaattcttcactaactgggaactgcggcccaacattatccatgaattccgtccccttcccatccacagagcgcacaaatcgctgcttgattgacgcccatttgtgacttcctggtaggaatgatagacatccattttccttcgttgcgtcctcaagcgcgtaccagaagcctactgcgcttggtgggttcgtatataagaatgtcgagtcctgatgtgggggtacagctccgcctatctcaggttgtttgcagatgaccatgctctgcaggactcttgggtcggcgaaaccaatggctcttgcaatggcagcgggatgcgactctttcccacccgccgcgacactacctgtgcttgcgctggcacctagcagatccggattcaacgccgggtctagtagagacgcaaaaggtttcgacaaggcgtgtagataatggccaattttgttgatcgcctgttcctttcgcttcactagttcaccagatgacgaaaacgcgtcttcttcgaagaaaaacctgattttatccccggagcccagaaaatagtcgtctcccacgtgtgccgatttttggccggtgctaaacctcgtcatagggtgtgactccaatgggaagtctgtgagcagctgatgtgtctcagcgaggagtgcttgaacggtcgtcggtggtagtgctttcgggagaatgagatagccatcgcgctcgaattgcgatagctgagtcggcgtcaggccgcctgtggagccgatttctggcattttgaacagtcgctttcacgagcccggcaagatataacgaaacgaaactcgcaataggcctccaaaaactaacagaaatttctattacagtgtgattgcgtatagtgtcacagggaaagtgaagttgacgtcgctgattttatgtacgatgtcgtagttgaattagcttgatggcggggtcaacgacgcgcggaagtgcgcgatgaggggcggcgatgaggggcacacagtgtgtgcctggaatgtgaccatttccaagttctcggctcctcaaaccatctcgaccccttttatagacggctatttccggcttttaagtaaacaaactaaaacgttgatcagagctaccccggattgcatttgacatccgtttggttcctctcatagttatcaatcacgtctaacgtgaaggactgcagggtcctctcttattgtcggccatgggtgacgagcagcctacgctcctcgacgagcggatttggctagatggatgctgggatttcttccatcacggtcatgctggcgctatgttacaggcacgccagctcggtagcgaactttatgttggtgtacactcagacgaggaaatcatgagcaacaaaggccctacggtcatggatcttgcggaacgtctcgctgcagtagacgcctgtcgatgggttactaaatcggtggcagatgcaccgtatgtgacagagctttcattcatagggaaatatggctgcaaatacgtcgtacatggcgacgacattacatcagacagcaatggcgaggattgttatcgcttcgtaaagcaagcgggacgtttcaaagttgttaagcgcacgccgagtatatcgacgacagaccttgtaggtcgtatgctgctctgcacccgcacgcacttcatcacctcgcttgaaaagatgttggcgggtcaggaggggcatggtaccgatgacgagcggaaagccgagggagaagccatgatgactcgcattcgacagtatgctaccgatgaaggcggaaaagaacctggtgttgatgtcttcttttgggccgcttctgtcgctgctaaagagaaagacacggaagaagaatcagggacattccggcagctactcaagggtaagggccctaggccagggcagagagtcgtttacgtggatggcggattcgatctcttctctagtggccacattgagttcttgcgacaagttgtccttgccgaggaagagctagcgcggaaagacggatggtacgagaaacaggcggtcgacgagcgcgtagggaaaggcgctgattacggacctgtcttcgttatcgccggtgtgcacgacgatcaggtcatcaactactggaagggtatcaactaccctatcatgaacatctacgagcgcgggctttgcgttttacaatgtcgatatgtaaacgcggtaatatttggtgcaccatttacgcccacgaaatcatacctgactaccctaccatggggaacaccagacacggtctaccacggtcctacggcgttcatccctctcgcttacgatccttacacggcggtgaaagacatgggtatcttccagcaggtcccgaagcacaagttccaggatgtcaacgcagggaccatcgtgcagcgaatcctgaaaagtcgggatctgtatgaagagaggcagcgaaagaagggtgtcaaggcagttggcgaagcagcacaaagacatagggagatactagaagaggaacagcggattaaagaagaaaagatggggatatcataaattctagaaaaatcaatggcgcaaaaaaaggaaatggaaagctttgacgtcctagtcaatattgataatacagatagggaacaatgtaattgaggttcattcggtagcgattccgaactccagactatccgacgaatcagggatagtgtcagacgggaattgtcagttgacattcgctgtcgagtgtcgtctaatgctcagtgcgactctgcatcaccagtgaaccatagaatgaatgaacgtgtggactgtttttgcgagcatacgcatgattcgctacctggttgctgtaggttttacgtgagcatcagcttgtctcggctatgcgcaatataggtcactctccatagtgcgtgacagtatcaaacgttccaaacttggcacaacattatcaaatcatgttgatttatggcagcaattgtctgtcttctagatgac

SEQ ID NO: 11421 - DNA, 1371 bp, Muscodor strobelii
  misc_feature: SGI cDNA ID NO. 563669
  misc_feature: Encodes the peptide sequence at SEQ ID NO 11422
atggctgtgacccatacttaccagaaagaactagacaaactcgagaatttgatcttgcaacagagccctctcgacattcttcagttctgttccgactattttctccgccgtcttgcagaagaacgtgccgcgtatctccaacaacgagcttcacagtcacaggaaccggtatccaacatgtcggggactaccttcaaaagcccctttgcggccaacaccaacccgttcggatcggacggggctaagctgcaaacgacgggaccttctggacagctgctgaatgttgtcgaagaggacgagaatgatgctgtaacctcccccacaactgcttcctttggcaccagtgccgccttcagccctacttttggtggcgacgctgcgggagagggaccgccatcgtttatgagaacaccccccaacccagacagctacccggctcagtacaacttcggccgtcgtacctcggtttcagcagagtcgttgaaacccgtggctgacgccaatgacaattggtctccaccggtctatcccaagaatcagcagcagcttgagcgactgcagaaggccatagagggcaacttcttgttcagtcacttggacgaagaacagacagcatcgatcctgggtgcgttgcaagagaagtctattccatccaaggacattaaggtcatcacgcaaggagacgcgggtgattatttctacattgtggagaagggttcattcgatgtgcacgtcaactccaagggatcccttcaacccgggccagagggcatgggcgacaaagtcagcaccattcagccaggaggctcgtttggcgagttggccctgatgtacaatgctccacgagctgccaccgttgtatcggctgagcctggatgtactctttgggctcttgaccgggtgactttccgccgcatcctcctggaatcaacctttgcccgccggcgtctgtatgagagtttcctcgaggaagtgcctcttctcgcttctcttacgccttacgaacgctcgaagattgcggatgcgcttgagacacagaagttccctgccggcacctccattatcaaagagggtgatattgggcagtcgttctacctcgtggagagcggtgaggccgacgccttcaagtctggccagtcggaatcggtcaagcactacaagaagggagacttctttggagagctcgcgctgctgaacgataagcctcgtgcggccagcgttgtcagctctaccgagatcaaagtggccacgctgggcaagaatgcctttgcccgactgctgggccctgtcgagggcattatgagaagaaccagatatgtcggtgttgcctctggcgtcgaagacgtcgatcccctgcactcaggaccctaa

SEQ ID NO: 11422 - protein, 456 aa, Muscodor strobelii
  misc_feature: SGI Peptide ID NO. 563669
  misc_feature (345)..(432): Pfam Id: PF00027 Pfam Desc: Cyclic nucleotide-binding domain
  misc_feature (214)..(312): Pfam Id: PF00027 Pfam Desc: Cyclic nucleotide-binding domain
  misc_feature (5)..(43): Pfam Id: PF02197 Pfam Desc: Regulatory subunit of type II PKA R-subunit
  misc_feature (223)..(312): Pfam Id: PF00027 Pfam Desc: Cyclic nucleotide-binding domain
  misc_feature (65)..(454): NCBI GI: 110293154 Blast Desc: regulatory subunit of protein kinase A [Colletotrichum gloeosporioides]
  misc_feature (65)..(453): NCBI GI: 54036155 Blast Desc: KAPR_GLOLA RecName: Full=cAMP-dependent protein kinase regulatory subunit; Short=PKA regulatory subunit gi|13569719|gb|AAK31209.1|AF353397_1 cAMP-dependent protein
  misc_feature (1)..(454): NCBI GI: 54036139 Blast Desc: KAPR_TRIAT RecName: Full=cAMP-dependent protein kinase regulatory subunit; Short=PKA regulatory subunit gi|28194220|gb|AAO33461.1|AF473578_1 cAMP-dependent protein PKAR1
  misc_feature (1)..(453): NCBI GI: 154300904 Blast Desc: BC1G_10590 [Botryotinia fuckeliana B05.10] gi|150856338|gb|EDN31530.1| BC1G_10590 [Botryotinia fuckeliana B05.10] gi|225685573|emb|CAQ30275.1| regulatory subunit of the
  misc_feature (65)..(455): NCBI GI: 256732081 Blast Desc: [Nectria haematococca mpVI 77-13-4]
  misc_feature (60)..(455): NCBI GI: 46136785 Blast Desc: FG09908.1 [Gibberella zeae PH-1]
  misc_feature (60)..(454): NCBI GI: 39972039 Blast Desc: cAMP-dependent protein kinase regulatory subunit [Magnaporthe grisea 70-15] gi|6225582|sp|O14448.1|KAPR_MAGGR RecName: Full=cAMP-dependent protein kinase regulatory subunit;
  misc_feature (63)..(454): NCBI GI: 171692029 Blast Desc: protein product [Podospora anserina] gi|170945963|emb|CAP72764.1| protein product [Podospora anserina]
  misc_feature (60)..(453): NCBI GI: 85103516 Blast Desc: cAMP-dependent protein kinase regulatory subunit [Neurospora crassa OR74A] gi|6225583|sp|Q01386.1|KAPR_NEUCR RecName: Full=cAMP-dependent protein kinase regulatory subunit; A
  misc_feature (60)..(453): NCBI GI: 156043067 Blast Desc: SS1G_10536 [Sclerotinia sclerotiorum 1980] gi|154694924|gb|EDN94662.1| SS1G_10536 [Sclerotinia sclerotiorum 1980]
  misc_feature (109)..(428): SWISSPROT Homolog: EC 2.7.11.12 cGMP-dependent protein kinase
MAVTHTYQKELDKLENLILQQSPLDILQFCSDYFLRRLAEERAAYLQQRASQSQEPVSNMSGTTFKSPFAANTNPFGSDGAKLQTTGPSGQLLNVVEEDENDAVTSPTTASFGTSAAFSPTFGGDAAGEGPPSFMRTPPNPDSYPAQYNFGRRTSVSAESLKPVADANDNWSPPVYPKNQQQLERLQKAIEGNFLFSHLDEEQTASILGALQEKSIPSKDIKVITQGDAGDYFYIVEKGSFDVHVNSKGSLQPGPEGMGDKVSTIQPGGSFGELALMYNAPRAATVVSAEPGCTLWALDRVTFRRILLESTFARRRLYESFLEEVPLLASLTPYERSKIADALETQKFPAGTSIIKEGDIGQSFYLVESGEADAFKSGQSESVKHYKKGDFFGELALLNDKPRAASVVSSTEIKVATLGKNAFARLLGPVEGIMRRTRYVGVASGVEDVDPLHSGP

SEQ ID NO: 11423 - DNA, 3244 bp, Muscodor strobelii
  misc_feature: SGI EST ID NO. CUFF.27370.1
  misc_feature: Variant of the nucleotide sequence at SEQ ID NO 11421
tgcaggtgggtttagggtcgttcagggtggttttggctcgggtgggcttggtttcgctgggtttggcaggctttggggcttatttggctggggaactctgacatttgatcgtcccccgctgcccgactcagctaggtgcgtcctgggttgctttctttaggcgctgcctgcattcattcgacaatcccctcctcctcattcgaaaccaaacaatcgtcactctttgccacggcacgactcgtccactcacaccctcctccgcctctgcctatcgcctgcatgcgcacacgtacatattcttacatataacccgataccagctctgcatcgcctcgtttgattattcttagctcattgtgcctgtggtagaagggcctttagaacggcatatccatctcgtcccgggccgacgatactacctcgcaacttcactgcccctcttcgtaagactgtcgtttgcctataacaccaccgagacagcgcagcagaagcagcatcttcgctgttagaggcagcactgtcaagacatctatatgaccatatatactcattattagacaaactcgagaatttgatcttgcaacagagccctctcgacattcttcagttctgttccgactattttctccgccgtcttgcagaagaacgtgccgcgtatctccaacaacgagcttcacagtcacaggaaccggtatccaacatgtcggggactaccttcaaaagcccctttgcggccaacaccaacccgttcggatcggacggggctaagctgcaaacgacgggaccttctggacagctgctgaatgttgtcgaagaggacgagaatgatgctgtaacctcccccacaactgcttcctttggcaccagtgccgccttcagccctacttttggtggcgacgctgcgggagagggaccgccatcgtttatgagaacaccccccaacccagacagctacccggctcagtacaacttcggccgtcgtacctcggtttcagcagagtcgttgaaacccgtggctgacgccaatgacaattggtctccaccggtctatcccaagaatcagcagcagcttgagcgactgcagaaggccatagagggcaacttcttgttcagtcacttggacgaagaacagacagcatcgatcctgggtgcgttgcaagagaagtctattccatccaaggacattaaggtcatcacgcaaggagacgcgggtgattatttctacattgtggagaagggttcattcgatgtgcacgtcaactccaagggatcccttcaacccgggccagagggcatgggcgacaaagtcagcaccattcagccaggaggctcgtttggcgagttggccctgatgtacaatgctccacgagctgccaccgttgtatcggctgagcctggatgtactctttgggctcttgaccgggtgactttccgccgcatcctcctggaatcaacctttgcccgccggcgtctgtatgagagtttcctcgaggaagtgcctcttctcgcttctcttacgccttacgaacgctcgaagattgcggatgcgcttgagacacagaagttccctgccggcacctccattatcaaagagggtgatattgggcagtcgttctacctcgtggagagcggtgaggccgacgccttcaagtctggccagtcggaatcggtcaagcactacaagaagggagacttctttggagagctcgcgctgctgaacgataagcctcgtgcggccagcgttgtcagctctaccgagatcaaagtggccacgctgggcaagaatgcctttgcccgactgctgggccctgtcgagggcattatgagaagaaccagatatgtcggtgttgcctctggcgtcgaagacgtcgatcccctgcactcaggaccctaatcttgggtgtttacttttcgcttctttgttgctgttttgttaacttgatagattggagagggctggggagcgacccacgcggggtccgctagcattcatgagatgagctccgggtaggattggaacccattttgtgtggatccaggcggcgtttgtgggattaccctcgattcatgattttcgtatggaacaggcatttggctgcccttgttgttgataccgctaaagacaaaactctttatccctacatagcaagttcatccaccctgtggattagaatgcaattggtatcatggacctcgttgtcctgtccgtgaaatgcgcccgtaaccaactcggcaatgacttgcgtctaagcaaggcaagtccctggccagagtctaaagtctcattctgacttcatcaaataatcatccgtccgatacgctattttaaccatctgccttcgcatcctgtccctcgcgctccttctcaagccccagccctctgtctctctagaacctgctgccgtaatgcctcagtcgctatctccgtctctaggacgcgacctacgcctttcttccacgtctcctcgagagtcttcaattcgtccgcattctcactctggacacgctggcgctgcagatttaagatgtcgatctctttcttcgtatctgcgaggtctcgctcgagagaggcgaggatggactctgtctgccagtttgagacgagccaggcgtttttgccgaattggttgagtaggtcgagatggatttgccgcgtggacaagtaggtttgcgttgtgtaggcttgggagagggggggtgcgaggtctgaggaggagaggttgggggtggtggggagggtttcttgtgcttcgtagcgggttaggtcgattgcgtccaggggctgttttgaggcgattcgggagagctcggctgagattagggggctgaatttcggggtgtatggtggtgggagggtttctggaggtggtgaggatgaggagagttcggcgtctatgagggattgggcggctgtgcgctcggattgtgttggttctgcgtcgatatctggatgattattagctggaggtttacgggggagaggagggcgcatggaggaacgtacaggggagggattcgtgcactgttgtgcggattgatgaggccatgatgtggtctacgatggggttgtttcggctggtaagtttttgttcggatgtctgtagttcttgagcgcgggaaatttgatagtggtttctaccgtgggtcgtgcgatcggattgtgaatgcggttgagagctgatgatgatagtgaggctgatatcacaagcttcctgggcgcatcttcagtcgcggttgtagtcgc

SEQ ID NO: 11424 - DNA, 624 bp, Muscodor strobelii
  misc_feature: SGI cDNA ID NO. 563670
  misc_feature: Encodes the peptide sequence at SEQ ID NO 11425
atggcctcatcaatccgcacaacagtgcacgaatccctcccctatatcgacgcagaaccaacacaatccgagcgcacagccgcccaatccctcatagacgccgaactctcctcatcctcaccacctccagaaaccctcccaccaccatacaccccgaaattcagccccctaatctcagccgagctctcccgaatcgcctcaaaacagcccctggacgcaatcgacctaacccgctacgaagcacaagaaaccctccccaccacccccaacctctcctcctcagacctcgcaccccccctctcccaagcctacacaacgcaaacctacttgtccacgcggcaaatccatctcgacctactcaaccaattcggcaaaaacgcctggctcgtctcaaactggcagacagagtccatcctcgcctctctcgagcgagacctcgcagatacgaagaaagagatcgacatcttaaatctgcagcgccagcgtgtccagagtgagaatgcggacgaattgaagactctcgaggagacgtggaagaaaggcgtaggtcgcgtcctagagacggagatagcgactgaggcattacggcagcaggttctagagagacagagggctggggcttga

SEQ ID NO: 11425 - protein, 207 aa, Muscodor strobelii
  misc_feature: SGI Peptide ID NO. 563670
  misc_feature (7)..(205): NCBI GI: 85103519 Blast Desc: NCU01167 [Neurospora crassa OR74A] gi|18376250|emb|CAD21364.1| conserved [Neurospora crassa] gi|28923080|gb|EAA32297.1| [Neurospora crassa OR74A]
  misc_feature (9)..(207): NCBI GI: 156043069 Blast Desc: SS1G_10537 [Sclerotinia sclerotiorum 1980] gi|154694925|gb|EDN94663.1| SS1G_10537 [Sclerotinia sclerotiorum 1980]
  misc_feature (9)..(207): NCBI GI: 154300906 Blast Desc: BC1G_10591 [Botryotinia fuckeliana B05.10] gi|150856339|gb|EDN31531.1| BC1G_10591 [Botryotinia fuckeliana B05.10]
  misc_feature (10)..(204): NCBI GI: 121702497 Blast Desc: conserved [Aspergillus clavatus NRRL 1] gi|119397656|gb|EAW08087.1| conserved [Aspergillus clavatus NRRL 1]
  misc_feature (10)..(201): NCBI GI: 256731703 Blast Desc: [Nectria haematococca mpVI 77-13-4]
  misc_feature (10)..(204): NCBI GI: 212528216 Blast Desc: BCAS2 family protein [Penicillium marneffei ATCC 18224] gi|210073663|gb|EEA27750.1| BCAS2 family protein [Penicillium marneffei ATCC 18224]
  misc_feature (10)..(201): NCBI GI: 46136783 Blast Desc: FG09907.1 [Gibberella zeae PH-1]
  misc_feature (3)..(203): NCBI GI: 39972041 Blast Desc: MGG_07336 [Magnaporthe grisea 70-15] gi|145019849|gb|EDK04077.1| MGG_07336 [Magnaporthe grisea 70-15]
  misc_feature (10)..(201): NCBI GI: 242766985 Blast Desc: BCAS2 family protein [Talaromyces stipitatus ATCC 10500] gi|218724475|gb|EED23892.1| BCAS2 family protein [Talaromyces stipitatus ATCC 10500]
  misc_feature (10)..(201): NCBI GI: 115389300 Blast Desc: conserved [Aspergillus terreus NIH2624] gi|114194551|gb|EAU36251.1| conserved [Aspergillus terreus NIH2624]
MASSIRTTVHESLPYIDAEPTQSERTAAQSLIDAELSSSSPPPETLPPPYTPKFSPLISAELSRIASKQPLDAIDLTRYEAQETLPTTPNLSSSDLAPPLSQAYTTQTYLSTRQIHLDLLNQFGKNAWLVSNWQTESILASLERDLADTKKEIDILNLQRQRVQSENADELKTLEETWKKGVGRVLETEIATEALRQQVLERQRAGA

SEQ ID NO: 11426 - DNA, 2752 bp, Muscodor strobelii
  misc_feature: SGI EST ID NO. CUFF.27371.2
  misc_feature: Variant of the nucleotide sequence at SEQ ID NO 11424
actacaaccgcgactgaagatgcgcccaggaagcttgtgatatcagcctcactatcatcatcagctctcaaccgcattcacaatccgatcgcacgacccacggtagaaaccactatcaaatttcccgcgctcaagaactacagacatccgaacaaaaacttaccagccgaaacaaccccatcgtagaccacatcatggcctcatcaatccgcacaacagtgcacgaatccctcccctatatcgacgcagaaccaacacaatccgagcgcacagccgcccaatccctcatagacgccgaactctcctcatcctcaccacctccagaaaccctcccaccaccatacaccccgaaattcagccccctaatctcagccgagctctcccgaatcgcctcaaaacagcccctggacgcaatcgacctaacccgctacgaagcacaagaaaccctccccaccacccccaacctctcctcctcagacctcgcaccccccctctcccaagcctacacaacgcaaacctacttgtccacgcggcaaatccatctcgacctactcaaccaattcggcaaaaacgcctggctcgtctcaaactggcagacagagtccatcctcgcctctctcgagcgagacctcgcagatacgaagaaagagatcgacatcttaaatctgcagcgccagcgtgtccagagtgagaatgcggacgaattgaagactctcgaggagacgtggaagaaaggcgtaggtcgcgtcctagagacggagatagcgactgaggcattacggcagcaggttctagagagacagagggctggggcttgagaaggagcgcgagggacaggatgcgaaggcagatggttaaaatagcgtatcggacggatgattatttgatgaagtcagaatgagactttagactctggccagggacttgccttgcttagacgcaagtcattgccgagttggttacgggcgcatttcacggacaggacaacgaggtccatgataccaattgcattctaatccacagggtggatgaacttgctatgtagggataaagagttttgtctttagcggtatcaacaacaagggcagccaaatgcctgttccatacgaaaatcatgaatcgagggtaatcccacaaacgccgcctggatccacacaaaatgggttccaatcctacccggagctcatctcatgaatgctagcggaccccgcgtgggtcgctccccagccctctccaatctatcaagttaacaaaacagcaacaaagaagcgaaaagtaaacacccaagattagggtcctgagtgcaggggatcgacgtcttcgacgccagaggcaacaccgacatatctggttcttctcataatgccctcgacagggcccagcagtcgggcaaaggcattcttgcccagcgtggccactttgatctcggtagagctgacaacgctggccgcacgaggcttatcgttcagcagcgcgagctctccaaagaagtctcccttcttgtagtgcttgaccgattccgactggccagacttgaaggcgtcggcctcaccgctctccacgaggtagaacgactgcccaatatcaccctctttgataatggaggtgccggcagggaacttctgtgtctcaagcgcatccgcaatcttcgagcgttcgtaaggcgtaagagaagcgagaagaggcacttcctcgaggaaactctcatacagacgccggcgggcaaaggttgattccaggaggatgcggcggaaagtcacccggtcaagagcccaaagagtacatccaggctcagccgatacaacggtggcagctcgtggagcattgtacatcagggccaactcgccaaacgagcctcctggctgaatggtgctgactttgtcgcccatgccctctggcccgggttgaagggatcccttggagttgacgtgcacatcgaatgaacccttctccacaatgtagaaataatcacccgcgtctccttgcgtgatgacctgcgcgcaaagccttatcagtaacatcgttttaaggtagtcaaattacagtatataccttaatgtccttggatggaatagacttctcttgcaacgcacccaggatcgatgctgtctgttcttcgtccaagtgactgaacaagaagttgccctctatggccttctgcagtcgctcaagctgctgctgattcttgggatagaccggtggagaccaattgtcattggcgtcagccacgggtttcaacgactctgctgaaaccgaggtacgacggccgaagttgtactgagccgggtagctgtctgggttggggggtgttctcataaacgatggcggtccctctcccgcagcgtcgccaccaaaagtagggctgaaggcggcactggtgccaaaggaagcagttgtgggggaggttacagcatcattctcgtcctcttcgacaacattcagcagctgtccagaaggtcccgtcgtttgcagcttagccccgtccgatccgaacgggttggtgttggccgcaaaggggcttttgaaggtagtccccgacatgttggataccggttcctgtgactgtgaagctcgttgttggagatacgcggcacgttcttctgcaagacggcggagaaaatagtcggaacagaactgaagaatgtcgagagggctctgttgcaagatcaaattctcgagtttgtctagttctttctggtaagtatgggtcacagccatgtcgatgtaatctacgcgtcaaacggaagaagag

SEQ ID NO: 11427 - DNA, 2340 bp, Muscodor strobelii
  misc_feature: SGI cDNA ID NO. 563671
  misc_feature: Encodes the peptide sequence at SEQ ID NO 11428
atgtcagtcatgttgcaaacaccctcccgggcgtcgacggcctcgtcatcgagctttcagcccatctcccgccagaacaccatgtcttcatacgatggaactcggtccgccaggcagtccaagagatactccatgtctgctctgtacatgtccatgtctgccaacgagaccgagctcgagatagacgatgacttggccaaagcccagaaagcgttgcgcgatctcaaatctaagatttcttcccaatctaaaaagaactttgtcctagagaaagacgtcagatacttagactcccgcattgcattgttgattcagaaccgcatggcgctagaggagcaaaacgaagtcgccagccacctcgaagacgctactgatttgcaagaaggcgcattcccaaacgatgacaagacgcaaaaatacggcaatctgctgtttctgctgcagtctgaacctcggcacattgcacatctctgccgacttgtgtccatggctgaaatcgattcgcttctgcaaacagtcatgttcaccatctacggaaaccagtacgagagtcgagaagagcatctgctcctgacaatgttccagtctgtactgacgtaccaattcgatacgacacccgagtattcctcgctccttcgtgccaatacacccgtctctcggatgatgaccacgtacactcggcgtggccctggccaatccttcctccgcaccgtgctggcggatagaatcaacagtctgatagagctgaaggacttggatttggagatcaaccctctcaaggtctacgagcgcatgtgccaacagatcgaggaagacaccggcagcctgcctgcttccttaccgaaagggataacaggcgagcaggcagccgagaaccctcaagtgcaggccatcatcgagccgcgcctgaccatgcttacggagattgccaacggttttcttaacacgatcatcgacggcttagaggatgctccgtacggaattcggtggatttgcaagcagatccggagtttgacgaagcggaagtacccagatgctaatgaccaagtcatatgcacgctcatcggtggcttcttctttttgcgctttatcaatccggctatcgtcacgcccaaatcatatatgctgattgatgggatgcccgccgagaagccgcgtcgtacccttacgtacattgccaagatgttgcagaatctcgccaataaaccatcctatgcgaaggagccttatatggccaaattgtctcctttcatccagcaaaataaagatcgcgtcaacaagttcatgcttgacttatgtgaagtccaggatttctacgaaagtttggagatggacaattatgtggcattatccaagaaggatctggagctctccatcacgctcaacgaaatttacgccatgcacgggctcattgagaagcacggcggagaactgtgtaaagatgaaaattcccacctagcgctgattatgtccgagcttggacgtgctcctgcgcaagtcccgcgaaaagagaacagggctattaacctccccctcttcagtcgttgggaacaggctcttgatgacttgacggcggctttggacatcacacaggaagagattttctttatggaggccaagacgatcatcgtacagattatgcggtccatccctgcaagcaacgccgtagcaagaagaccgcttcgtctagagaggattgctgatgccgctgcaacctcacgaaatgatgcagtcatggtacggaaaggcatcagagccatggagctcctaagccagcttcaagaaatgagggtgatcgacaagtccgatcaatttggtctgctgcgcgatgaggttgaacaggagctacagcatcttgggtcgctcaaagaaggtgttctcactgagacttcgaagcttgaagaagtctataagactatccgagatcacaatgcttatcttgtaggccaactcgaaacttacaagagctacctacacaacgttcgtagccaatcggaaggcaccaagcgaaaacaacagaagcatcaagtgttggggccgtacaaattcacccaccagcagttagagaaggaaggcgtgattcagaagagtaatgttccggacaataggagagccaacatttacttcaatttcacaagtcctctgcccggcaccttcgtcatttcgttacactacaaaggacgcaatcgaggcttgctcgagcttgatttgaaactcgatgatttactcgagatgcagaaggacaaccaggacgacctggacctggagtatgtgcaattcaacgttacgaaagtcttggctttgttgaacaagcgctttgcgcgaaagaaagggtggtaa

SEQ ID NO: 11428 - protein, 779 aa, Muscodor strobelii
  misc_feature: SGI Peptide ID NO. 563671
  misc_feature (193)..(401): Pfam Id: PF00616 Pfam Desc: GTPase-activator protein for Ras-like GTPase
  misc_feature (578)..(703): Pfam Id: PF03836 Pfam Desc: RasGAP C-terminus
  misc_feature (581)..(703): Pfam Id: PF03836 Pfam Desc: RasGAP C-terminus
  misc_feature (28)..(779): NCBI GI: 116203639 Blast Desc: conserved [Chaetomium globosum CBS 148.51] gi|88175831|gb|EAQ83299.1| conserved [Chaetomium globosum CBS 148.51]
  misc_feature (1)..(779): NCBI GI: 154313314 Blast Desc: BC1G_05354 [Botryotinia fuckeliana B05.10] gi|150849423|gb|EDN24616.1| BC1G_05354 [Botryotinia fuckeliana B05.10]
  misc_feature (28)..(779): NCBI GI: 46105454 Blast Desc: FG00355.1 [Gibberella zeae PH-1]
  misc_feature (28)..(779): NCBI GI: 164425679 Blast Desc: NCU06122 [Neurospora crassa OR74A] gi|157071020|gb|EAA30748.2| NCU06122 [Neurospora crassa OR74A]
  misc_feature (28)..(779): NCBI GI: 39943670 Blast Desc: conserved [Magnaporthe grisea 70-15] gi|145014534|gb|EDJ99102.1| conserved [Magnaporthe grisea 70-15]
  misc_feature (69)..(779): NCBI GI: 171679481 Blast Desc: protein product [Podospora anserina] gi|170939366|emb|CAP64594.1| protein product [Podospora anserina]
  misc_feature (1)..(779): NCBI GI: 119491951 Blast Desc: GTPase activating protein Sar1, [Neosartorya fischeri NRRL 181] gi|119411630|gb|EAW21573.1| GTPase activating protein Sar1, [Neosartorya fischeri NRRL 181]
  misc_feature (1)..(779): NCBI GI: 146323390 Blast Desc: GTPase activating protein Sar1 [Aspergillus fumigatus Af293] gi|129558314|gb|EAL92591.2| GTPase activating protein Sar1, [Aspergillus fumigatus Af293] gi|159127643|gb|EDP52758.1|
  misc_feature (19)..(779): NCBI GI: 240105014 Blast Desc: GTPase-activator protein for Ras-like GTPase containing protein [Coccidioides posadasii C735 delta SOWgp]
  misc_feature (19)..(779): NCBI GI: 238840962 Blast Desc: ras-GAP [Microsporum canis CBS 113480]
MSVMLQTPSRASTASSSSFQPISRQNTMSSYDGTRSARQSKRYSMSALYMSMSANETELEIDDDLAKAQKALRDLKSKISSQSKKNFVLEKDVRYLDSRIALLIQNRMALEEQNEVASHLEDATDLQEGAFPNDDKTQKYGNLLFLLQSEPRHIAHLCRLVSMAEIDSLLQTVMFTIYGNQYESREEHLLLTMFQSVLTYQFDTTPEYSSLLRANTPVSRMMTTYTRRGPGQSFLRTVLADRINSLIELKDLDLEINPLKVYERMCQQIEEDTGSLPASLPKGITGEQAAENPQVQAIIEPRLTMLTEIANGFLNTIIDGLEDAPYGIRWICKQIRSLTKRKYPDANDQVICTLIGGFFFLRFINPAIVTPKSYMLIDGMPAEKPRRTLTYIAKMLQNLANKPSYAKEPYMAKLSPFIQQNKDRVNKFMLDLCEVQDFYESLEMDNYVALSKKDLELSITLNEIYAMHGLIEKHGGELCKDENSHLALIMSELGRAPAQVPRKENRAINLPLFSRWEQALDDLTAALDITQEEIFFMEAKTIIVQIMRSIPASNAVARRPLRLERIADAAATSRNDAVMVRKGIRAMELLSQLQEMRVIDKSDQFGLLRDEVEQELQHLGSLKEGVLTETSKLEEVYKTIRDHNAYLVGQLETYKSYLHNVRSQSEGTKRKQQKHQVLGPYKFTHQQLEKEGVIQKSNVPDNRRANIYFNFTSPLPGTFVISLHYKGRNRGLLELDLKLDDLLEMQKDNQDDLDLEYVQFNVTKVLALLNKRFARKKGW

SEQ ID NO: 11429 - DNA, 4359 bp, Muscodor strobelii
  misc_feature: SGI EST ID NO. CUFF.27720.0
  misc_feature: Variant of the nucleotide sequence at SEQ ID NO 11427
gtccgcgggcacacgtcgacgtcccctgtcccctgcttcactggcctcctcttatctgggcctccccttcctcgtcgccccgtttcagtccctccgtctcaaccacctctcatcttgtgcgacatttcaccgcccgtgagagcgagacctgtgtcttgtgtctcgacggagaagtaaagaatcagaaaaaagtgaaaacaatcaaattacccagtcaatcaatcaatcgaatcgaatccactcttcggcgacgactctcaagatacccggccaacgctcaaaagcgcgaacacaccatagccgtccgctctcgaattgctgcatactcatcatacccaccaaagccttgagtttatatatcggccacagcatttgtatctatcctcggccattctttttcgagctcaagtcgtcgagtccttaacattagcatcagctatctcgagcccggcttcatacacccactccctccctctccctgtgaacacggctgtccgagttagcgacgactggcccgcatcgttgctgtcgcccgctaccgaaatcccctcgtgccgccgacacgcccgccttgtcccactagcctcacctcattccgcaccagtcgtcgtgcaagccacggctgcctacgacccgcgaatcacctgctgccgcccggtccaagagacattgtctcccttgttcgcggataccccgagtcagaaacgcgcagctcgcaaccgctttgggttctgccggcttgaccacgttctcattgtgcattgtggcgcggaactcgagcctccatcgcatctcagtcattattccatgaattagctcaagggagaacccccattgctgcgcgcactccctcactctgctacggcgttgacgtcgatagagctccgctactaatcatacacttaatcatatatcttttggtatttagcgttcagcgtccagcgtccagcgttcacgcgactgagagccatactgcttgccttgctccggctctatttttggcaccatcacggctgatacgttcgcacggcaactggtctgaagcagccgcgcgtagtgtcacaaggcggctgtgactagccggtatacatcgacgctcgctctgcagcatcgatcacaaccgatcatgtcagtcatgttgcaaacaccctcccgggcgtcgacggcctcgtcatcgagctttcagcccatctcccgccagaacaccatgtcttcatacgatggaactcggtccgccaggcagtccaagagatactccatgtctgctctgtacatgtccatgtctgccaacgagaccgagctcgagatagacgatgacttggccaaaggtattattcaatagtccgaaaaactcactcggatagtagtcgcgctaacagcaacccgcatagcccagaaagcgttgcgcgatctcaaatctaagatttcttcccaatctaaaaagaactttgtcctagagaaagacgtcagatacttagactcccgcattgcattgttgattcagaaccgcatggcgctagaggagcaaaacgaagtcgccagccacctcgaagacgctactgatttgcaagaaggcgcattcccaaacgatgacaagacgcaaaaatacggcaatctgctgtttctgctgcagtctgaacctcggcacattgcacatctctgccgacttgtgtccatggctgaaatcgattcgcttctgcaaacagtcatgttcaccatctacggaaaccagtacgagagtcgagaagagcatctgctcctgacaatgttccagtctgtactgacgtaccaattcgatacgacacccgagtattcctcgctccttcgtgccaatacacccgtctctcggatgatgaccacgtacactcggcgtggccctggccaatccttcctccgcaccgtgctggcggatagaatcaacagtctgatagagctgaaggacttggatttggagatcaaccctctcaaggtctacgagcgcatgtgccaacagatcgaggaagacaccggcagcctgcctgcttccttaccgaaagggataacaggcgagcaggcagccgagaaccctcaagtgcaggccatcatcgagccgcgcctgaccatgcttacggagattgccaacggttttcttaacacgatcatcgacggcttagaggatgctccgtacggaattcggtggatttgcaagcagatccggagtttgacgaagcggaagtacccagatgctaatgaccaagtcatatgcacgctcatcggtggcttcttctttttgcgctttatcaatccggctatcgtcacgcccaaatcatatatgctgattgatgggatgcccgccgagaagccgcgtcgtacccttacgtacattgccaagatgttgcagaatctcgccaataaaccatcctatgcgaaggagccttatatggccaaattgtctcctttcatccagcaaaataaagatcgcgtcaacaagttcatgcttgacttatgtgaagtccaggatttctacgaaagtttggagatggacaattatgtggcattatccaagaaggatctggagctctccatcacgctcaacgaaatttacgccatgcacgggctcattgagaagcacggcggagaactgtgtaaagatgaaaattcccacctagcgctgattatgtccgagcttggacgtgctcctgcgcaagtcccgcgaaaagagaacagggctattaacctccccctcttcagtcgttgggaacaggctcttgatgacttgacggcggctttggacatcacacaggaagagattttctttatggaggccaagacgatcatcgtacagattatgcggtccatccctgcaagcaacgccgtagcaagaagaccgcttcgtctagagaggattgctgatgccgctgcaacctcacgaaatgatgcagtcatggtacggaaaggcatcagagccatggagctcctaagccagcttcaagaaatgagggtgatcgacaagtccgatcaatttggtctgctgcgcgatgaggttgaacaggagctacagcatcttgggtcgctcaaagaaggtgttctcactgagacttcgaagcttgaagaagtctataagactatccgagatcacaatgcttatcttgtaggccaactcgaaacttacaagagctacctacacaacgttcgtagccaatcggaaggcaccaagcgaaaacaacagaagcatcaagtgttggggccgtacaaattcacccaccagcagttagagaaggaaggcgtgattcagaagagtaatgttccggacaataggagagccaacatttacttcaatttcacaagtcctctgcccggcaccttcgtcatttcgttacactacaaaggacgcaatcgaggcttgctcgagcttgatttgaaactcgatgatttactcgagatgcagaaggacaaccaggacgacctggacctggagtatgtgcaattcaacgttacgaaagtcttggctttgttgaacaagcgctttgcgcgaaagaaagggtggtaaggcgcgtctgtggacatgcttacttgcctttctatgcgacgacttcatcggcttgccatgtgttacattcttcgatcggcgcggcgttgatggctttttacgacttgataccaactttcatttgatataatggatctgtggcacttagcaatctcttatgtttcatgcaaccttattacattcccccacgatcttattacctatcaggtctgtattttataccattcatgcgatgagagcaatgtatgagcaacggcagacatacgtagcggggagggtaggaaactgcgaggatgaaatgggcggataactttagttgtctacctcacggacgtacggacttggctctttcgtgactatgccgacgatcttatcgccaatgccacatcaatactccattgcgtgctgcgctgcattgagtatgtcgacggcttgaagaagggaacggtataggacgggaagagacggttcattctgagagcgcgctgcccattgcttctaccaaggtggatgattgggttgggatggagaggttatgtcggtcttgtaatatatatgaggattggcgacgagagaggtcttagtggcgagggacttatttgggttacgtggggcttttatatgaatctcacgatgaaaatagcttgtgacttacgcggattccgcaacttaagcgctttggtggttcgtgcgctgcgctcgcttatgtgtaatattatttatgtcttcatgccgttttgatgtgttattgtgtattgtgattatgtgatggttcgtgtcagctttatacttcatgttgaagatgattgcggtgagtagcaaggctcttg

SEQ ID NO: 11430 - DNA, 1617 bp, Muscodor strobelii
  misc_feature: SGI cDNA ID NO. 563672
  misc_feature: Encodes the peptide sequence at SEQ ID NO 11431
atggccgacggttatgctcgagttacaggacgtccgcaagcagttatcgtccatgttgatgtcggcactcaggctcttggccagggagtccacaacgcaagtattggtcgagcacctgtgttcatctttgccggcctatgtccgtataccgagtctggcgaactcccaggctctcggaccgaatatatgcactggcttcaggaggctccagaccagaaggccattgtcagacagtattgtagatacgtgggcgaacttcgaactggtctcaacgtgaagcagacagtctctcgtgcgctgcagtttgccaacaccgctccgaaaggaccggtgtatgtcgctagtgcgcgagaagttcttgccgaagaaatacaaccatatacacttgaacaagaccaatgggctccagtcggaccatcggcactcccgtctgacgctattcgagacatcgcttccgcactcgtgcacgcaaaacgcccgcttgtcatcaccggatactctggtcgcgatcggcgcaatccggaactgcttgttgccttagctgatctcattccagggatacgtgtccatgacacgggcggcagtgacatgtgttttccgatgtcccatattgcttcggaaggctttcgactagcctctcacgaatgcacgcaagatgcagacgtcattcttctagtcgactgtgacgtcccatggattccgtcgaagaacccgccgtcaaaaggcgcgaagatataccatattgatagcgatcctttaaatcagcagatacccgtgtcattcttccctgctcatggtcgttggaaagcagacagttatactgctcttagccagctcatcgattacatcaacagtgacgattcacttgctaaagcccttgaagatcctcaatacgtagctcgaaaagaaaagcgtgctgcaatacacgatgcgcatcttgcgcagatcgcttctgagcccaaattagatgatcaagaatcactcaatgcacataacgtcggagctcttctgaagacaagcttgcctgaagctaccttcgttatcgaagctgtgactgcggcacagatcctgtctgatcagctacaatccgatcgtccgggtagctggatcaattgcggtgggacgggtattggatggagtaacggtgcagcccttggtgttgaaatggcactagcaaatactacgaaagacggacaaccaccgcgcatggtttgtcaggttgttggtgatggaagttttatgtgcgctgctccatcaagtgcactttggatagctagcaaatatgagatcccaatcttgactgtcgttttgaacaatgggggttggaaagctcctcgaaactcaacggcaattgtctaccccgatggtctcaatgcaacggcaactgacgaggaaacaaatgtttctttccgtcctacgccgaactatgctgcattggctgaggcagcggctgggtcagagctaggatggaataatacctcagaaaatgacagtgtaccgaaatggatgaaaggtatgcgagttaaaacagtaaaagagttcaccgaagcactgcaacttgcccatcacagggtaagcaaagagagaaagggcatgttgctcgaagtcttgatgtag

SEQ ID NO: 11431 - protein, 538 aa, Muscodor strobelii
  misc_feature: SGI Peptide ID NO. 563672
  misc_feature (350)..(536): Pfam Id: PF02775 Pfam Desc: Thiamine pyrophosphate enzyme, C-terminal TPP binding domain
  misc_feature (147)..(279): Pfam Id: PF00205 Pfam Desc: Thiamine pyrophosphate enzyme, central domain
  misc_feature (350)..(483): Pfam Id: PF02775 Pfam Desc: Thiamine pyrophosphate enzyme, C-terminal TPP binding domain
  misc_feature (147)..(252): Pfam Id: PF00205 Pfam Desc: Thiamine pyrophosphate enzyme, central domain
  misc_feature (1)..(488): NCBI GI: 225678081 Blast Desc: acetolactate synthase catalytic subunit [Paracoccidioides brasiliensis Pb03]
  misc_feature (1)..(502): NCBI GI: 226280332 Blast Desc: acetolactate synthase [Paracoccidioides brasiliensis Pb01]
  misc_feature (1)..(488): NCBI GI: 226287574 Blast Desc: acetolactate synthase [Paracoccidioides brasiliensis Pb18]
  misc_feature (1)..(530): NCBI GI: 240278316 Blast Desc: acetolactate synthase [Ajellomyces capsulatus H143]
  misc_feature (1)..(530): NCBI GI: 261199290 Blast Desc: thiamine pyrophosphate enzyme [Ajellomyces dermatitidis SLH14081] gi|239594254|gb|EEQ76835.1| thiamine pyrophosphate enzyme [Ajellomyces dermatitidis SLH14081]
  misc_feature (1)..(530): NCBI GI: 239615419 Blast Desc: thiamine pyrophosphate enzyme [Ajellomyces dermatitidis ER-3]
  misc_feature (1)..(530): NCBI GI: 154275098 Blast Desc: conserved [Ajellomyces capsulatus NAm1] gi|150414840|gb|EDN10202.1| conserved [Ajellomyces capsulatus NAm1]
  misc_feature (1)..(530): NCBI GI: 225557634 Blast Desc: acetolactate synthase [Ajellomyces capsulatus G186AR]
  misc_feature (1)..(488): NCBI GI: 119481589 Blast Desc: acetolactate synthase [Neosartorya fischeri NRRL 181] gi|119408977|gb|EAW18926.1| acetolactate synthase [Neosartorya fischeri NRRL 181]
  misc_feature (1)..(488): NCBI GI: 71002028 Blast Desc: thiamine pyrophosphate enzyme [Aspergillus fumigatus Af293] gi|66853333|gb|EAL93657.1| thiamine pyrophosphate enzyme, [Aspergillus fumigatus Af293] gi|159129754|gb|EDP54868.1| enzyme,
  misc_feature (1)..(446): SWISSPROT Homolog: EC 4.1.1.7 Benzoylformate decarboxylase
MADGYARVTGRPQAVIVHVDVGTQALGQGVHNASIGRAPVFIFAGLCPYTESGELPGSRTEYMHWLQEAPDQKAIVRQYCRYVGELRTGLNVKQTVSRALQFANTAPKGPVYVASAREVLAEEIQPYTLEQDQWAPVGPSALPSDAIRDIASALVHAKRPLVITGYSGRDRRNPELLVALADLIPGIRVHDTGGSDMCFPMSHIASEGFRLASHECTQDADVILLVDCDVPWIPSKNPPSKGAKIYHIDSDPLNQQIPVSFFPAHGRWKADSYTALSQLIDYINSDDSLAKALEDPQYVARKEKRAAIHDAHLAQIASEPKLDDQESLNAHNVGALLKTSLPEATFVIEAVTAAQILSDQLQSDRPGSWINCGGTGIGWSNGAALGVEMALANTTKDGQPPRMVCQVVGDGSFMCAAPSSALWIASKYEIPILTVVLNNGGWKAPRNSTAIVYPDGLNATATDEETNVSFRPTPNYAALAEAAAGSELGWNNTSENDSVPKWMKGMRVKTVKEFTEALQLAHHRVSKERKGMLLEVLM

SEQ ID NO: 11432 - DNA, 354 bp, Muscodor strobelii
  misc_feature: SGI EST ID NO. CUFF.27158.0
  misc_feature: Variant of the nucleotide sequence at SEQ ID NO 11430
gcaaatactacgaaagacggacaaccaccgcgcatggtttgtcaggttgttggtgatggaagttttatgtgcgctgctccatcaagtgcactttggatagctagcaaatatgagatcccaatcttgactgtcgttttgaacaatgggggttggaaagctcctcgaaactcaacggcaattgtctaccccgatggtctcaatgcaacggcaactgacgaggaaacaaatgtttctttccgtcctacgccgaactatgctgcattggctgaggcagcggctgggtcagagctaggatggaataatacctcagaaaatgacagtgtaccgaaatggatgaaaggtatgcgagttaaa

SEQ ID NO: 11433 - DNA, 1668 bp, Muscodor strobelii
  misc_feature: SGI cDNA ID NO. 563673
  misc_feature: Encodes the peptide sequence at SEQ ID NO 11434
atgtcatcatccgaacaggcaataagacggctcagctgcggaccgccaacgcaagacgataccaggttcgtcacaggcgaacttggcggtatcccaatgtttgaaatcaccgtcgagcagctgcagttccacctttcaaatagtcatttcacttcagctcaatatacagagttctgcctgaagagaattcacgaagtcaatccttacgtcgaggcagtcattgaagtcaatcccgacgcactggctattgctcatgagctcgatctcgaaaggaacgttgccagtataagaggaccgcttcatggcatccccatactcgtcaaagacaacatggccacggaagacaagatgcagaccacagctggatcgtgggccttgctgggtagcgtggttccgaaggatgctttcgttgtgtcgaaactccgcgacgctggtgcgatcatcctcggacatgcaaatatgtgtgagtgggcttctctgagatcgaaggaagaatctacgggcttcagcccaagaggtggtcaagtgagaaatccatatgacttgaggaaaagtccggctggctccagctcaggctccgcggtgtcagtgtcggctaacctggtgccaattgccctcggaacagagacagacacatctatcatcgccccagctgctctaaatggcattgttggtatcaagccaacgataggattaacatctcggtctggagtgattccaatcagtcgcaacatggatagcgtaggtccgttcggaaggactgttgcagatgctgtggttgtactggatgctatcgtgggagaagatggcgaggactccttcacgatggtaccagaaagaaaatcagatgtgtcatacagtcgatttctatccacttcttccgcgctcaaaggtgctcgcttcggacttcctatgaaacgatgctgggatctggtgcccccaagttgcaaaagcgtcgcgaccaatgtcttcaatgcaattaaatgtgcaggagccgaaatcatcgaagttgatattccgagcatagaagaacgtgtcaacgagaatgggacttgggattggcaacatggcgatccgcctcactcccagtggacggtcgttaaagtggatggatacaacgacatcaattcatatcttgaaaacttagctgagagtcctgtcaggtctttggaagatgttatcaagtacaacaaagataacacaggtacagagggcggcctaccttgtaccataccagcatttcccgacggtcaaacgaatttcgaggacattgccgagtcaaaaggcgtcgaagacgacacatataagtccgcattggcacacattcaccaacaaactcgagaaaatggtatagacagtgccctcaagtctggtaatcatggatcaacagggctcaatgccctactcttctgcgatcgacatggaatcggtcagcagtatgcagcacaagctggttatcccgtcatctgcatcccaattggtctagataatcacgggatgcccgtcagtttatctcttcaacagacagcgtggaaggaagcagagttgatcaagtgggctagtgcgatcgaagatctgtggaatcaggaaaatggatggcgggagactcctacctttcgtaacctttatgcgaaaaacatacctgtcgagagtgttgtcaatgactaa

SEQ ID NO: 11434 - protein, 555 aa, Muscodor strobelii
  misc_feature: SGI Peptide ID NO. 563673
  misc_feature (54)..(517): Pfam Id: PF01425 Pfam Desc: Amidase
  misc_feature (54)..(346): Pfam Id: PF01425 Pfam Desc: Amidase
  misc_feature (29)..(549): NCBI GI: 121700416 Blast Desc: amidase family protein [Aspergillus clavatus NRRL 1] gi|119396615|gb|EAW07047.1| amidase family protein [Aspergillus clavatus NRRL 1]
  misc_feature (30)..(549): NCBI GI: 115399428 Blast Desc: conserved [Aspergillus terreus NIH2624] gi|114192186|gb|EAU33886.1| conserved [Aspergillus terreus NIH2624]
  misc_feature (30)..(549): NCBI GI: 70992933 Blast Desc: amidase family protein [Aspergillus fumigatus Af293] gi|66848948|gb|EAL89277.1| amidase family protein [Aspergillus fumigatus Af293]
  misc_feature (30)..(549): NCBI GI: 255954539 Blast Desc: Pc21g09860 [Penicillium chrysogenum Wisconsin 54-1255] gi|211589733|emb|CAP95883.1| Pc21g09860 [Penicillium chrysogenum Wisconsin 54-1255]
  misc_feature (30)..(549): NCBI GI: 159130232 Blast Desc: amidase family protein [Aspergillus fumigatus A1163]
  misc_feature (30)..(549): NCBI GI: 119473329 Blast Desc: amidase family protein [Neosartorya fischeri NRRL 181] gi|119406721|gb|EAW16672.1| amidase family protein [Neosartorya fischeri NRRL 181]
  misc_feature (30)..(549): NCBI GI: 242789754 Blast Desc: amidase family protein [Talaromyces stipitatus ATCC 10500] gi|218718016|gb|EED17436.1| amidase family protein [Talaromyces stipitatus ATCC 10500]
  misc_feature (19)..(549): NCBI GI: 154302426 Blast Desc: BC1G_09997 [Botryotinia fuckeliana B05.10] gi|150855485|gb|EDN30677.1| BC1G_09997 [Botryotinia fuckeliana B05.10]
  misc_feature (30)..(552): NCBI GI: 189209027 Blast Desc: glutamyl-tRNA(Gln) amidotransferase subunit A [Pyrenophora tritici-repentis Pt-1C-BFP] gi|187976939|gb|EDU43565.1| glutamyl-tRNA(Gln) amidotransferase A
  misc_feature (30)..(549): NCBI GI: 145231345 Blast Desc: An02g00190 [Aspergillus niger] gi|134056059|emb|CAK96234.1| protein product [Aspergillus niger]
  misc_feature (15)..(549): SWISSPROT Homolog: EC 3.5.1.4 Amidase
MSSSEQAIRRLSCGPPTQDDTRFVTGELGGIPMFEITVEQLQFHLSNSHFTSAQYTEFCLKRIHEVNPYVEAVIEVNPDALAIAHELDLERNVASIRGPLHGIPILVKDNMATEDKMQTTAGSWALLGSVVPKDAFVVSKLRDAGAIILGHANMCEWASLRSKEESTGFSPRGGQVRNPYDLRKSPAGSSSGSAVSVSANLVPIALGTETDTSIIAPAALNGIVGIKPTIGLTSRSGVIPISRNMDSVGPFGRTVADAVVVLDAIVGEDGEDSFTMVPERKSDVSYSRFLSTSSALKGARFGLPMKRCWDLVPPSCKSVATNVFNAIKCAGAEIIEVDIPSIEERVNENGTWDWQHGDPPHSQWTVVKVDGYNDINSYLENLAESPVRSLEDVIKYNKDNTGTEGGLPCTIPAFPDGQTNFEDIAESKGVEDDTYKSALAHIHQQTRENGIDSALKSGNHGSTGLNALLFCDRHGIGQQYAAQAGYPVICIPIGLDNHGMPVSLSLQQTAWKEAELIKWASAIEDLWNQENGWRETPTFRNLYAKNIPVESVVND

SEQ ID NO: 11435 - DNA, 1734 bp, Muscodor strobelii
  misc_feature: SGI EST ID NO. CUFF.27161.0
  misc_feature: Variant of the nucleotide sequence at SEQ ID NO 11433
gtcaaagacaacatggccacggaagacaagatgcagaccacagctggatcgtgggccttgctgggtagcgtggttccgaaggatgctttcgttgtgtcgaaactccgcgacgctggtgcgatcatcctcggacatgcaaatatgtgtgagtgggcttctctgagatcgaaggaagaatctacgggcttcagcccaagaggtggtcaagtgagaaatccatatgacttgaggaaaagtccggctggctccagctcaggctccgcggtgtcagtgtcggctaacctggtgccaattgccctcggaacagagacagacacatctatcatcgccccagctgctctaaatggcattgttggtatcaagccaacgataggattaacatctcggtctggagtgattccaatcagtcgcaacatggatagcgtaggtccgttcggaaggactgttgcagatgctgtggttgtactggatgctatcgtgggagaagatggcgaggactccttcacgatggtaccagaaagaaaatcagatgtgtcatacagtcgatttctatccacttcttccgcgctcaaaggtgctcgcttcggacttcctatgaaacgatgctgggatctggtgcccccaagttgcaaaagcgtcgcgaccaatgtcttcaatgcaattaaatgtgcaggagccgaaatcatcgaagttgatattccgagcatagaagaacgtgtcaacgagaatgggacttgggattggcaacatggcgatccgcctcactcccagtggacggtcgttaaagtggatggatacaacgacatcaattcatatcttgaaaacttagctgagagtcctgtcaggtctttggaagatgttatcaagtacaacaaagataacacaggtacagagggcggcctaccttgtaccataccagcatttcccgacggtcaaacgaatttcgaggacattgccgagtcaaaaggcgtcgaagacgacacatataagtccgcattggcacacattcaccaacaaactcgagaaaatggtatagacagtgccctcaagtctggtaatcatggatcaacagggctcaatgccctactcttctgcgatcgacatggaatcggtcagcagtatgcagcacaagctggttatcccgtcatctgcatcccaattggtctagataatcacgggatgcccgtcagtttatctcttcaacagacagcgtggaaggaagcagagttgatcaagtgggctagtgcgatcgaagatctgtggaatcaggaaaatggatggcgggagactcctacctttcgtaacctttatgcgaaaaacatacctgtcgagagtgttgtcaatgactaagactatgcataccaatacgactagtgtcaagaaatgggctacttatttggcatcatcaacttaggcaattcggcatggttccaaggacatgatacaggagtttacgagcatctatataccggcattcttcgccaatttattcggcaggtagtctgaagttaagtcccattatttctatatgagcgtctttagcactactaaaagcttccatgatcagccgtctctcatctcgagagaagccactcatctgtcttgatatcagtcgtgctcgaatccatccctttaggcaagatagtcgaggaattagcttgtctggactgtcaattatcaacatggacaatgattggtcaacgagatatattgagttcaagctgaagagcttat

SEQ ID NO: 11436 - DNA, 1983 bp, Muscodor strobelii
  misc_feature: SGI cDNA ID NO. 563674
  misc_feature: Elevated expression when VOC is produced
  misc_feature: Encodes the peptide sequence at SEQ ID NO 11437
atgtcgggaaaagaacgtgatgtagatgttgtcgcggccacgcacggtgatgccccggcacatcaagacaaagctccagtgaccgaaaagggtgtaagcgatgttggtgttttgaatcaatccagctccacgggcgggtccgactccgatgaacctctccgaggacccaacggcgaggagtatccctccaagcaggatctcgaaacccttcgtcgcgtcaaaggttatatcagtcctatcatctacacaattgctttcgtcgaactctgtgaacgtttcgcctactatggaaccaccgctgttttcgtcaactatatccagcaaccgctgcctgctggctctgctaccggcgctggtggaacatatggacagtctggtgctcttggtaaaggacagcaagcttctaccggattgacgacttttaaccaattctgggcctacttgatgccattgcttggcggatacttatctgactcttattggggcaaatacaagactatccacgttgccattattattgcaacgtttggtcatttcatcttaatcattgctgcgataccgccagtcattaagaaacccgatgcggcgttgggaatcttctctttagggttgattttctttggcattggtgttggctttttcaaggctaacatctcgccgatgatcgccgagcagtatgaagcgagtcaccctcgaccgacggtcgagacgctgaaatcaggggagcgcgttatcaaagaccccgtgatgaccatctcggtgatatacctgagatactatttcttcatcaatgttggatctctcgtcggccagatcagcatggtctacgcagagaaatacgtcggcttctatctatcattcaccctgccaacagcactcttcctcttctgcccaattgtcctcattgttttcaagaataaatatgttcggaatccaccgacaggtagtgtttatgggaaattctttggtttgatcggcctaagcatgaagggtcgctggagtgccaacccggtccgcctgatcaagaacatccgagagccaggcttctttgagcgagtgaagccaagcaacattcccgaatctgagcgcccagaatggatgactttcgacgataattgggttgacgaagtccgaagaggcgtgaaggcttgccaagtcttcttcctttaccccatttactggcttccctataaccaactgaacaacaatctgatatcacaggcggcaacgatggtgcttggaggtgtgcctaatgacgttgtgaacaacctcgaccctattgccttgcttatcttcattcccatttttgacaagatcttctatccattccttcgcaagatcgggatcaatcttacaccaatcaaaaagatatctcttggatttttatttggcacaatctcaatggtagtcggcgccattattcaacacgaaatttattggcaatcgccatgtcgagaaatatcaggttacggacatgcagctagttgcaaaacagctcttggctacgccgcggatgagaatgttaacgagaggatttataagcctcctctgaccgtctggattcagacgcctgcatacgtcttgattgctttctccgagattttcgcgtcggtaacgggtcttgaatatgccttcacgaaagcaccgaaaaacatgcgaggtttcatcacaagtatcttttggtttgcacaagctttctcgtcggcccttggccaggcatttgttcctttatccaccgatcctgtgcttgtgtggttgtacacaacagtcgccatcatcgcagctcttggtggcttggcattccacttcatattcagaggtcttgacgaggaagaagaggcgcttaatgccctaccagacagtgtcttcgttggcgctaagaaccaggatgaagacttcgcagccgtggaggcgaagcaggctgaggcaaatcggattcggcatgcacaaggccttgatgagaaactcaagaccgacgcttga

SEQ ID NO: 11437 - protein, 660 aa, Muscodor strobelii
  misc_feature: SGI Peptide ID NO. 563674
  misc_feature (84)..(572): Pfam Id: PF07690 Pfam Desc: Major Facilitator Superfamily
  misc_feature (164)..(564): Pfam Id: PF00854 Pfam Desc: POT family
  misc_feature (374)..(564): Pfam Id: PF00854 Pfam Desc: POT family
  misc_feature (164)..(232): Pfam Id: PF00854 Pfam Desc: POT family
  misc_feature (18)..(625): NCBI GI: 39940612 Blast Desc: MGG_04934 [Magnaporthe grisea 70-15] gi|145010831|gb|EDJ95487.1| MGG_04934 [Magnaporthe grisea 70-15]
  misc_feature (47)..(623): NCBI GI: 169621528 Blast Desc: SNOG_13974 [Phaeosphaeria nodorum SN15] gi|111057479|gb|EAT78599.1| SNOG_13974 [Phaeosphaeria nodorum SN15]
  misc_feature (2)..(642): NCBI GI: 189206323 Blast Desc: peptide transporter PTR2-A [Pyrenophora tritici-repentis Pt-1C-BFP] gi|187975589|gb|EDU42215.1| peptide transporter PTR2-A [Pyrenophora tritici-repentis Pt-1C-BFP]
  misc_feature (1)..(632): NCBI GI: 121701539 Blast Desc: MFS peptide transporter, putaitve [Aspergillus clavatus NRRL 1] gi|119397177|gb|EAW07608.1| MFS peptide transporter, putaitve [Aspergillus clavatus NRRL 1]
  misc_feature (1)..(632): NCBI GI: 119495503 Blast Desc: MFS peptide transporter, putaitve [Neosartorya fischeri NRRL 181] gi|119412697|gb|EAW22638.1| MFS peptide transporter, putaitve [Neosartorya fischeri NRRL 181]
  misc_feature (1)..(632): NCBI GI: 146322620 Blast Desc: MFS peptide transporter, putaitve [Aspergillus fumigatus Af293] gi|129557758|gb|EAL90554.2| MFS peptide transporter, putaitve [Aspergillus fumigatus Af293]
  misc_feature (1)..(632): NCBI GI: 159131347 Blast Desc: MFS peptide transporter, [Aspergillus fumigatus A1163]
  misc_feature (22)..(631): NCBI GI: 119183030 Blast Desc: CIMG_06494 [Coccidioides immitis RS]
  misc_feature (22)..(631): NCBI GI: 240109472 Blast Desc: proton-dependent oligopeptide transport (POT) family protein [Coccidioides posadasii C735 delta SOWgp]
  misc_feature (59)..(632): NCBI GI: 121714833 Blast Desc: oligopeptide transporter [Aspergillus clavatus NRRL 1] gi|119403182|gb|EAW13600.1| oligopeptide transporter [Aspergillus clavatus NRRL 1]
  misc_feature: Useful for introducing or modulating the production of volatile compounds
MSGKERDVDVVAATHGDAPAHQDKAPVTEKGVSDVGVLNQSSSTGGSDSDEPLRGPNGEEYPSKQDLETLRRVKGYISPIIYTIAFVELCERFAYYGTTAVFVNYIQQPLPAGSATGAGGTYGQSGALGKGQQASTGLTTFNQFWAYLMPLLGGYLSDSYWGKYKTIHVAIIIATFGHFILIIAAIPPVIKKPDAALGIFSLGLIFFGIGVGFFKANISPMIAEQYEASHPRPTVETLKSGERVIKDPVMTISVIYLRYYFFINVGSLVGQISMVYAEKYVGFYLSFTLPTALFLFCPIVLIVFKNKYVRNPPTGSVYGKFFGLIGLSMKGRWSANPVRLIKNIREPGFFERVKPSNIPESERPEWMTFDDNWVDEVRRGVKACQVFFLYPIYWLPYNQLNNNLISQAATMVLGGVPNDVVNNLDPIALLIFIPIFDKIFYPFLRKIGINLTPIKKISLGFLFGTISMVVGAIIQHEIYWQSPCREISGYGHAASCKTALGYAADENVNERIYKPPLTVWIQTPAYVLIAFSEIFASVTGLEYAFTKAPKNMRGFITSIFWFAQAFSSALGQAFVPLSTDPVLVWLYTTVAIIAALGGLAFHFIFRGLDEEEEALNALPDSVFVGAKNQDEDFAAVEAKQAEANRIRHAQGLDEKLKTDA

SEQ ID NO: 11438 - DNA, 2806 bp, Muscodor strobelii
  misc_feature: SGI EST ID NO. CUFF.27165.0
  misc_feature: Variant of the nucleotide sequence at SEQ ID NO 11436
caactacttccaatgttttctcttgatcacaattgtaaataacatccatctcgagattagcccagactaacaggagttctttaaacgatcctacagtgaagcacacatgtactaagagatgaacacgtaggggggaagatacgatacatggatgtacaaggtatcattgtgacataacattttacacaaccctaggcgagcaggtgatctggatgcaaagatcagaaataaagtcacagctcccccaaccctccaattccgttttcccatcaacagctaccatacagcatccatagcttccagcccgccatgtcgggaaaagaacgtgatgtagatgttgtcgcggccacgcacggtgatgccccggcacatcaagacaaagctccagtgaccgaaaagggtgtaagcgatgttggtgttttgaatcaatccagctccacgggcgggtccgactccgatgaacctctccgaggacccaacggcgaggagtatccctccaagcaggatctcgaaacccttcgtcgcgtcaaaggttatatcagtcctatcatctacacaattgctttcgtcgaactctgtgaacgtttcgcctactatggaaccaccgctgttttcgtcaactatatccagcaaccgctgcctgctggctctgctaccggcgctggtggaacatatggacagtctggtgctcttggtaaaggacagcaagcttctaccggattgacgacttttaaccaattctgggcctacttgatgccattgcttggcggatacttatctgactcttattggggcaaatacaagactatccacgttgccattattattgcaacgtttggtcatttcatcttaatcattgctgcgataccgccagtcattaagaaacccgatgcggcgttgggaatcttctctttagggttgattttctttggcattggtgttggctttttcaaggctaacatctcgccgatgatcgccgagcagtatgaagcgagtcaccctcgaccgacggtcgagacgctgaaatcaggggagcgcgttatcaaagaccccgtgatgaccatctcggtgatatacctgagatactatttcttcatcaatgttggatctctcgtcggccagatcagcatggtctacgcagagaaatacgtcggcttctatctatcattcaccctgccaacagcactcttcctcttctgcccaattgtcctcattgttttcaagaataaatatgttcggaatccaccgacaggtagtgtttatgggaaattctttggtttgatcggcctaagcatgaagggtcgctggagtgccaacccggtccgcctgatcaagaacatccgagagccaggcttctttgagcgagtgaagccaagcaacattcccgaatctgagcgcccagaatggatgactttcgacgataattgggttgacgaagtccgaagaggcgtgaaggcttgccaagtcttcttcctttaccccatttactggcttccctataaccaactgaacaacaatctgatatcacaggcggcaacgatggtgcttggaggtgtgcctaatgacgttgtgaacaacctcgaccctattgccttgcttatcttcattcccatttttgacaagatcttctatccattccttcgcaagatcgggatcaatcttacaccaatcaaaaagatatctcttggatttttatttggcacaatctcaatggtagtcggcgccattattcaacacgaaatttattggcaatcgccatgtcgagaaatatcaggttacggacatgcagctagttgcaaaacagctcttggctacgccgcggatgagaatgttaacgagaggatttataagcctcctctgaccgtctggattcagacgcctgcatacgtcttgattgctttctccgagattttcgcgtcggtaacgggtcttgaatatgccttcacgaaagcaccgaaaaacatgcgaggtttcatcacaagtatcttttggtttgcacaagctttctcgtcggcccttggccaggcatttgttcctttatccaccgatcctgtgcttgtgtggttgtacacaacagtcgccatcatcgcagctcttggtggcttggcattccacttcatattcagaggtcttgacgaggaagaagaggcgcttaatgccctaccagacagtgtcttcgttggcgctaagaaccaggatgaagacttcgcagccgtggaggcgaagcaggctgaggcaaatcggattcggcatgcacaaggccttgatgagaaactcaagaccgacgcttgaaccaaagctgtgcagctttttattccctgatgcgttgttatgctgagataggatgtatcgagatggagaacgtgcatagcatgtagtgggttgccaattccgaatgataaccctttgattggattttgttcggattgcattccttaggttttacgatatacccggtgcgggcttttagtgctctgccctcgatgtagttggcttcatattgatagctgcatttcaatagtcaaagagcactttgatgtctttcttttacctctgacatcgggcgcaatcgggcttgaaatcgtagatgatcttcgtcctccgtcctctgattatatatcttcaaagcgtaggccatgatgtattctattcattcttcaaccgtcatgtcttatctcaacactcattattgaggttgcgttggttctctctttgggggctgttgcaggaaagggcacgaaccccaccttggccgaaatcgccgaagtcaatactctaacagagcaatatacatcaaaatgtccat

SEQ ID NO: 11439 - DNA, 1500 bp, Muscodor strobelii
  misc_feature: SGI cDNA ID NO. 563675
  misc_feature: Elevated expression when VOC is produced
  misc_feature: Encodes the peptide sequence at SEQ ID NO 11440
atgatgctacaaagtatctgggccatcttaactctttgtgcgatatgcgtgtctggggattgttcatcagttagtgagaaggtcgcaaatttcgctgaacaattgaggcccaagttatctgagaatgcttcaataaattttccaggttcggacgggtatgccaactcaacggctcggtggtctgtcttccacgcgccggtttttgctgttacggtttcagtttcgactgaggaagatgttcgccaaacggtaatattagcaaacgagaattctctaccgttccttgccgtggctgggcatcatggagccattaactctttgggagctttgaactgcggggtcggtgtagacttgaagagactcaacagggtagaagttcaacccggtgctgacactgccctgattgggggtggtgcaatgtcgcgagatgtgagccacgcactgtgggaatatgggaaatggaccgtcacggccgtctgcgactgcacttcactcttgggaccaggccttgggggcgggcatggctggctacaaggtaactttggtcttactagtgaccaaattgtcgaagccaatctcgtacttggaaatggatctattattgcagtttctgctgactctcacgcggacctgttttggggtcttcgaggcgctggccacaacttcggtattgtgacctccgtccgatccaaaatctacgatgtcccagatgacgattcctggacagtcgcacagtactcgtttactcaagacaagctagagtcacttttcggggtcttgaatgggtttgtcaatgatggcgaacaatcagtcgagcttcgacactggacgacgctatctcacaatctcattgtcgatcctgtcaatgcatcattcaccacatggcttgtcttcgagggcactgaagaagaggcggcaccgtatacttcacaattagaagctgttggccccgtcttagcgaagttgacaccgacgaactacattggagtgagtcccttgactctgaacaattgctcagatgcgtccccatcggaccctacttacaatgtcctccgtttccccatcgatctgaagagctttaacatcactgctacgcgggaagcttacgagctattgaacaacgttacaatcacttatccggggttgaatggctctacaatcttgctcgagggttatgctgtgaaggccgtccaagagatcccaaatgacagcactgcgtatccagacagattcaataatcttttagtggcgccggtgatcagattcgcttcaggtctgcctctcactgaagaagcacaaaatgcaggacatagcctaagacgtatactcctggagggtagcggatcgactcagcttcatgcttacgtaaactacgcggttggtgaagagtctttcaagacttggtatggatatgaggattggagaatcgagaaactgaagaatcttaagtcaacttacgatcgtgctcgccaattcagcttctatgcgcccataccataa

SEQ ID NO: 11440 - protein, 499 aa, Muscodor strobelii
  misc_feature: SGI Peptide ID NO. 563675
  misc_feature (68)..(204): Pfam Id: PF01565 Pfam Desc: FAD binding domain
  misc_feature (22)..(498): NCBI GI: 156032953 Blast Desc: SS1G_13552 [Sclerotinia sclerotiorum 1980] gi|154698955|gb|EDN98693.1| SS1G_13552 [Sclerotinia sclerotiorum 1980]
  misc_feature (12)..(498): NCBI GI: 119473675 Blast Desc: FAD binding domain protein [Neosartorya fischeri NRRL 181] gi|119406866|gb|EAW16816.1| FAD binding domain protein [Neosartorya fischeri NRRL 181]
  misc_feature (14)..(498): NCBI GI: 70985799 Blast Desc: FAD-dependent oxygenase [Aspergillus fumigatus Af293] gi|66846034|gb|EAL86367.1| FAD-dependent oxygenase, [Aspergillus fumigatus Af293] gi|159128459|gb|EDP53574.1| FAD-dependent A1163]
  misc_feature (33)..(499): NCBI GI: 145234607 Blast Desc: An03g00460 [Aspergillus niger] gi|134057623|emb|CAK38023.1| protein product [Aspergillus niger]
  misc_feature (34)..(498): NCBI GI: 239609939 Blast Desc: FAD binding domain-containing protein [Ajellomyces dermatitidis ER-3]
  misc_feature (34)..(498): NCBI GI: 261198773 Blast Desc: FAD binding domain-containing protein [Ajellomyces dermatitidis SLH14081] gi|239594940|gb|EEQ77521.1| FAD binding domain-containing protein [Ajellomyces dermatitidis SLH14081]
  misc_feature (17)..(498): NCBI GI: 240107435 Blast Desc: FAD binding domain containing protein [Coccidioides posadasii C735 delta SOWgp]
  misc_feature (5)..(499): NCBI GI: 238491442 Blast Desc: FAD-dependent oxygenase, [Aspergillus flavus NRRL3357] gi|220697371|gb|EED53712.1| FAD-dependent oxygenase, [Aspergillus flavus NRRL3357]
  misc_feature (32)..(498): NCBI GI: 225681473 Blast Desc: conserved [Paracoccidioides brasiliensis Pb03]
  misc_feature (3)..(498): NCBI GI: 119191099 Blast Desc: CIMG_05597 [Coccidioides immitis RS]
  misc_feature: Useful for introducing or modulating the production of volatile compounds
MMLQSIWAILTLCAICVSGDCSSVSEKVANFAEQLRPKLSENASINFPGSDGYANSTARWSVFHAPVFAVTVSVSTEEDVRQTVILANENSLPFLAVAGHHGAINSLGALNCGVGVDLKRLNRVEVQPGADTALIGGGAMSRDVSHALWEYGKWTVTAVCDCTSLLGPGLGGGHGWLQGNFGLTSDQIVEANLVLGNGSIIAVSADSHADLFWGLRGAGHNFGIVTSVRSKIYDVPDDDSWTVAQYSFTQDKLESLFGVLNGFVNDGEQSVELRHWTTLSHNLIVDPVNASFTTWLVFEGTEEEAAPYTSQLEAVGPVLAKLTPTNYIGVSPLTLNNCSDASPSDPTYNVLRFPIDLKSFNITATREAYELLNNVTITYPGLNGSTILLEGYAVKAVQEIPNDSTAYPDRFNNLLVAPVIRFASGLPLTEEAQNAGHSLRRILLEGSGSTQLHAYVNYAVGEESFKTWYGYEDWRIEKLKNLKSTYDRARQFSFYAPIP

SEQ ID NO: 11441 - DNA, 3767 bp, Muscodor strobelii
  misc_feature: SGI EST ID NO. CUFF.27194.0
  misc_feature: Variant of the nucleotide sequence at SEQ ID NO 11439
gtgtcagcaatatgttgtatggaagagcatatagaggcagctagcgttcttgcgaacgcggggaatcaaagtctgtgtttcctgccgtcttcgtgcgttgtctgtatatcttcgctatcttgaaagagaccaaaatgatgctacaaagtatctgggccatcttaactctttgtgcgatatgcgtgtctggggattgttcatcagttagtgagaaggtcgcaaatttcgctgaacaattgaggcccaagttatctgagaatgcttcaataaattttccaggttcggacgggtatgccaactcaacggctcggtggtctgtcttccacgcgccggtttttgctgttacggtttcagtttcgactgaggaagatgttcgccaaacggtaatattagcaaacgagaattctctaccgttccttgccgtggctgggcatcatggagccattaactctttgggagctttgaactgcggggtcggtgtagacttgaagagactcaacagggtagaagttcaacccggtgctgacactgccctgattgggggtggtgcaatgtcgcgagatgtgagccacgcactgtgggaatatgggaaatggaccgtcacggccgtctgcgactgcacttcactcttgggaccaggccttgggggcgggcatggctggctacaaggtaactttggtcttactagtgaccaaattgtcgaagccaatctcgtacttggaaatggatctattattgcagtttctgctgactctcacgcggacctgttttggggtcttcgaggcgctggccacaacttcggtattgtgacctccgtccgatccaaaatctacgatgtcccagatgacgattcctggacagtcgcacagtactcgtttactcaagacaagctagagtcacttttcggggtcttgaatgggtttgtcaatgatggcgaacaatcagtcgagcttcgacactggacgacgctatctcacaatctcattgtcgatcctgtcaatgcatcattcaccacatggcttgtcttcgagggcactgaagaagaggcggcaccgtatacttcacaattagaagctgttggccccgtcttagcgaagttgacaccgacgaactacattggagtgagtcccttgactctgaacaattgctcagatgcgtccccatcggaccctacttacaatgtcctccgtttccccatcgatctgaagagctttaacatcactgctacgcgggaagcttacgagctattgaacaacgttacaatcacttatccggggttgaatggctctacaatcttgctcgagggttatgctgtgaaggccgtccaagagatcccaaatgacagcactgcgtatccagacagattcaataatcttttagtggcgccggtgatcagattcgcttcaggtctgcctctcactgaagaagcacaaaatgcaggacatagcctaagacgtatactcctggagggtagcggatcgactcagcttcatgcttacgtaaactacgcggttggtgaagagtctttcaagacttggtatggatatgaggattggagaatcgagaaactgaagaatcttaagtcaacttacgatcgtgctcgccaattcagcttctatgcgcccataccataagttgatagtccattttagctcttgaacatgcgttctcagcactgttatctaatgtcgcattggactgaataatgaatgcggtgatttatgcgagaatcaatgagtattgagtactatattgtaattatgtacgaatgttgaattgtgcttagaatagatgccgccaaatgctagtagcgctgagatgcttattgttctgtagataactcgatcataagattgcagtccaagtctaacatgacacaaggtgtgtcttccgatacccgatcttgtataggcaaagaaagtctataaacgagccttttcaggctgccatatttcattgagaagtcggctagggttgacacgctctggccgtgcgtcttcaagagatgcaatacctgatagtctcatgccagtgataaattcatcagcgtatactatgacctagtcagtgacgttgaggtcgttgtggtgaaacaatgaagacatcattgtcacaagacacaaaatgggcgaggagaaacagtaagacgaacaacatcaaaagaatagggcaaaacttacaatcaacacatctacccacacctttctctccatacgcaccaagagcataataaaacggccgcccaatacccaccgctgttgccccaagacaaatagccttcaacacatccgaaccatcgcgacacccaccatcaacaaagacctcgagccgctcgagtacttgcggataataagtgcgtatctcaagcaacgtcgtcagcgcatcctgcgcatcatgcatctgccgcccgccatgattgctcaataagatcccatcgcaacccgcgtccgcagccttcaaagcgtcttcagcgtttccaatacccttgagaacgaccgggccatcccactctttcttgatccaggtgagatcttcccatgtgagcgtgaggttgaactgcgcattcgaaataggcgacagcccaccaaatcccgctttctcggcatactcacttaactcaggggaagtggcaagtgcttcctcggcttgcagtctacgatccggcgtccgcttgcctagcacggctgtgtcaactgtaacccagagactgcggtacacgcccgttgcgcgggctcgatgaatacgctggattgctagcgcgcggtctgcggggatatagagctggaagtgaagctgtgcctctactccctgttcctcatcctgccgtgatgcagcaatctttgctttctcgtctgcgaacgcggcagcgatgtcttcaagaggtgctgtagattctgtactaatcacaccgtggaccccgcgtcgcgcaagagcacgaacagcgcccacctcaccatctgcgtgtacccgtcccatctgtcccatgggggacatatagaacgggaacccgcatgaaaatccaagaatactcgaccgtggctttacattcgagatatcttggaatatccggggtctgaaagtaatccgctgccatgaagagagatttccccggtgtgctgaaccgtcgtgtgctgagcctgatatgtacgtatatgagtcgatgggcaagacgacttgtgcagctgcctcgaagtccacgggcgatactatagtggcgatatgcggcactttcgttttctttcctgatgctgcttcggatgagttggagctggcgctgttcaacggtaacgcggcgcgtagcgtagcacgtgcttctgcatcgattgatccgatccaggcattttttggtaggtattctaagacatctggtccgtggatctttcggaactctgttgtggcgtcctggatatgctcattagcttaggcctttcattcacatttcgacaatcgtgtttctgaaagaagatgattgtttcggttactttcatttcacagtacagatgtacatgaaactattcttacggtaccgccttgtcgcagcaaaatcccagggccgcctgggtgctgtccgaggtatcctgtgacgtcgtacactttatcgttgatgacgatccagcatcccgttgctgagcgacgactcgcgatctcgtctgcactgatgatctttctcctttcttgccgcatttttgaatatgttacacaacgactttcagttgaacggctaaataaggacgattggagcctttcgaatagtctcccggctcgtt

SEQ ID NO: 11442 - DNA, 1515 bp, Muscodor strobelii
  misc_feature: SGI cDNA ID NO. 563676
  misc_feature: Encodes the peptide sequence at SEQ ID NO 11443
atgcggcaagaaaggagaaagatcatcagtgcagacgagatcgcgagtcgtcgctcagcaacgggatgctggatcgtcatcaacgataaagtgtacgacgtcacaggatacctcggacagcacccaggcggccctgggattttgctgcgacaaggcggtaccgacgccacaacagagttccgaaagatccacggaccagatgtcttagaatacctaccaaaaaatgcctggatcggatcaatcgatgcagaagcacgtgctacgctacgcgccgcgttaccgttgaacagcgccagctccaactcatccgaagcagcatcaggaaagaaaacgaaagtgccgcatatcgccactatagtatcgcccgtggacttcgaggcagctgcacaagtcgtcttgcccatcgactcatatacgtacatatcaggctcagcacacgacggttcagcacaccggggaaatctctcttcatggcagcggattactttcagaccccggatattccaagatatctcgaatgtaaagccacggtcgagtattcttggattttcatgcgggttcccgttctatatgtcccccatgggacagatgggacgggtacacgcagatggtgaggtgggcgctgttcgtgctcttgcgcgacgcggggtccacggtgtgattagtacagaatctacagcacctcttgaagacatcgctgccgcgttcgcagacgagaaagcaaagattgctgcatcacggcaggatgaggaacagggagtagaggcacagcttcacttccagctctatatccccgcagaccgcgcgctagcaatccagcgtattcatcgagcccgcgcaacgggcgtgtaccgcagtctctgggttacagttgacacagccgtgctaggcaagcggacgccggatcgtagactgcaagccgaggaagcacttgccacttcccctgagttaagtgagtatgccgagaaagcgggatttggtgggctgtcgcctatttcgaatgcgcagttcaacctcacgctcacatgggaagatctcacctggatcaagaaagagtgggatggcccggtcgttctcaagggtattggaaacgctgaagacgctttgaaggctgcggacgcgggttgcgatgggatcttattgagcaatcatggcgggcggcagatgcatgatgcgcaggatgcgctgacgacgttgcttgagatacgcacttattatccgcaagtactcgagcggctcgaggtctttgttgatggtgggtgtcgcgatggttcggatgtgttgaaggctatttgtcttggggcaacagcggtgggtattgggcggccgttttattatgctcttggtgcgtatggagagaaaggtgtgggtagatgtgttgatttatacgctgatgaatttatcactggcatgagactatcaggtattgcatctcttgaagacgcacggccagagcgtgtcaaccctagccgacttctcaatgaaatatggcagcctgaaaaggctcgtttatag

SEQ ID NO: 11443 - protein, 504 aa, Muscodor strobelii
  misc_feature: SGI Peptide ID NO. 563676
  misc_feature (8)..(82): Pfam Id: PF00173 Pfam Desc: Cytochrome b5-like Heme/Steroid binding domain
  misc_feature (129)..(489): Pfam Id: PF01070 Pfam Desc: FMN-dependent dehydrogenase
  misc_feature (9)..(504): NCBI GI: 189205965 Blast Desc: L-lactate dehydrogenase [Pyrenophora tritici-repentis Pt-1C-BFP] gi|187975410|gb|EDU42036.1| L-lactate dehydrogenase [Pyrenophora tritici-repentis Pt-1C-BFP]
  misc_feature (9)..(501): NCBI GI: 169610864 Blast Desc: SNOG_08540 [Phaeosphaeria nodorum SN15] gi|111062588|gb|EAT83708.1| SNOG_08540 [Phaeosphaeria nodorum SN15]
  misc_feature (111)..(499): NCBI GI: 255946616 Blast Desc: Pc22g00300 [Penicillium chrysogenum Wisconsin 54-1255] gi|211591092|emb|CAP97318.1| Pc22g00300 [Penicillium chrysogenum Wisconsin 54-1255]
  misc_feature (7)..(488): NCBI GI: 46109860 Blast Desc: FG01812.1 [Gibberella zeae PH-1]
  misc_feature (2)..(488): NCBI GI: 154278643 Blast Desc: conserved [Ajellomyces capsulatus NAm1] gi|150413720|gb|EDN09103.1| conserved [Ajellomyces capsulatus NAm1]
  misc_feature (1)..(488): NCBI GI: 226287846 Blast Desc: cytochrome b2 [Paracoccidioides brasiliensis Pb18]
  misc_feature (2)..(488): NCBI GI: 225560517 Blast Desc: cytochrome b2 [Ajellomyces capsulatus G186AR]
  misc_feature (7)..(488): NCBI GI: 119501134 Blast Desc: mitochondrial cytochrome b2, [Neosartorya fischeri NRRL 181] gi|119415489|gb|EAW25427.1| mitochondrial cytochrome b2, [Neosartorya fischeri NRRL 181]
  misc_feature (13)..(496): NCBI GI: 67901994 Blast Desc: AN7984.2 [Aspergillus nidulans FGSC A4] gi|40739597|gb|EAA58787.1| AN7984.2 [Aspergillus nidulans FGSC A4] gi|259480735|tpe|CBF73650.1| TPA: conserved [Aspergillus FGSC
  misc_feature (2)..(488): NCBI GI: 240280076 Blast Desc: cytochrome b2 [Ajellomyces capsulatus H143]
  misc_feature (6)..(492): SWISSPROT Homolog: EC 1.1.2.3 L-lactate dehydrogenase (cytochrome)
MRQERRKIISADEIASRRSATGCWIVINDKVYDVTGYLGQHPGGPGILLRQGGTDATTEFRKIHGPDVLEYLPKNAWIGSIDAEARATLRAALPLNSASSNSSEAASGKKTKVPHIATIVSPVDFEAAAQVVLPIDSYTYISGSAHDGSAHRGNLSSWQRITFRPRIFQDISNVKPRSSILGFSCGFPFYMSPMGQMGRVHADGEVGAVRALARRGVHGVISTESTAPLEDIAAAFADEKAKIAASRQDEEQGVEAQLHFQLYIPADRALAIQRIHRARATGVYRSLWVTVDTAVLGKRTPDRRLQAEEALATSPELSEYAEKAGFGGLSPISNAQFNLTLTWEDLTWIKKEWDGPVVLKGIGNAEDALKAADAGCDGILLSNHGGRQMHDAQDALTTLLEIRTYYPQVLERLEVFVDGGCRDGSDVLKAICLGATAVGIGRPFYYALGAYGEKGVGRCVDLYADEFITGMRLSGIASLEDARPERVNPSRLLNEIWQPEKARL

SEQ ID NO: 11444 - DNA, 3260 bp, Muscodor strobelii
  misc_feature: SGI EST ID NO. CUFF.27195.1
  misc_feature: Variant of the nucleotide sequence at SEQ ID NO 11442
ggagactattcgaaaggctccaatcgtccttatttagccgttcaactgaaagtcgttgtgtaacatattcaaaaatgcggcaagaaaggagaaagatcatcagtgcagacgagatcgcgagtcgtcgctcagcaacgggatgctggatcgtcatcaacgataaagtgtacgacgtcacaggatacctcggacagcacccaggcggccctgggattttgctgcgacaaggcggtaccgacgccacaacagagttccgaaagatccacggaccagatgtcttagaatacctaccaaaaaatgcctggatcggatcaatcgatgcagaagcacgtgctacgctacgcgccgcgttaccgttgaacagcgccagctccaactcatccgaagcagcatcaggaaagaaaacgaaagtgccgcatatcgccactatagtatcgcccgtggacttcgaggcagctgcacaagtcgtcttgcccatcgactcatatacgtacatatcaggctcagcacacgacggttcagcacaccggggaaatctctcttcatggcagcggattactttcagaccccggatattccaagatatctcgaatgtaaagccacggtcgagtattcttggattttcatgcgggttcccgttctatatgtcccccatgggacagatgggacgggtacacgcagatggtgaggtgggcgctgttcgtgctcttgcgcgacgcggggtccacggtgtgattagtacagaatctacagcacctcttgaagacatcgctgccgcgttcgcagacgagaaagcaaagattgctgcatcacggcaggatgaggaacagggagtagaggcacagcttcacttccagctctatatccccgcagaccgcgcgctagcaatccagcgtattcatcgagcccgcgcaacgggcgtgtaccgcagtctctgggttacagttgacacagccgtgctaggcaagcggacgccggatcgtagactgcaagccgaggaagcacttgccacttcccctgagttaagtgagtatgccgagaaagcgggatttggtgggctgtcgcctatttcgaatgcgcagttcaacctcacgctcacatgggaagatctcacctggatcaagaaagagtgggatggcccggtcgttctcaagggtattggaaacgctgaagacgctttgaaggctgcggacgcgggttgcgatgggatcttattgagcaatcatggcgggcggcagatgcatgatgcgcaggatgcgctgacgacgttgcttgagatacgcacttattatccgcaagtactcgagcggctcgaggtctttgttgatggtgggtgtcgcgatggttcggatgtgttgaaggctatttgtcttggggcaacagcggtgggtattgggcggccgttttattatgctcttggtgcgtatggagagaaaggtgtgggtagatgtgttgatttatacgctgatgaatttatcactggcatgagactatcaggtattgcatctcttgaagacgcacggccagagcgtgtcaaccctagccgacttctcaatgaaatatggcagcctgaaaaggctcgtttatagactttctttgcctatacaagatcgggtatcggaagacacaccttgtgtcatgttagacttggactgcaatcttatgatcgagttatctacagaacaataagcatctcagcgctactagcatttggcggcatctattctaagcacaattcaacattcgtacataattacaatatagtactcaatactcattgattctcgcataaatcaccgcattcattattcagtccaatgcgacattagataacagtgctgagaacgcatgttcaagagctaaaatggactatcaacttatggtatgggcgcatagaagctgaattggcgagcacgatcgtaagttgacttaagattcttcagtttctcgattctccaatcctcatatccataccaagtcttgaaagactcttcaccaaccgcgtagtttacgtaagcatgaagctgagtcgatccgctaccctccaggagtatacgtcttaggctatgtcctgcattttgtgcttcttcagtgagaggcagacctgaagcgaatctgatcaccggcgccctaatcgctgtcaatatcagctagcttcgctctcgatgtagacatactcacactaaaagattattgaatctgtctggatacgcagtgctgtcatttgggatctcttggacggccttcacagcataaccctcgagcaagattgtagagccattcaaccccggataagtgattgtaacgttgttcaatagctcgtaagcttcccgcgtagcagtgatgttaaagctcttcagatcgatggggaaacggaggacattgtaagtagggtccgatggggacgcatctgagcaattgttcagagtcaagggactcactccaatgtagttcgtcggtgtcaacttcgctaagacggggccaacagcttctaattgtgaagtatacggtgccgcctcttcttcagtgccctcgaagacaagccatgtggtgaatgatgcctgtaaaaattcaatcacttgtcccaaagaatactctttcaccttacattgacaggatcgacaatgagattgtgagatagcgtcgtccagtgtcgaagctcgactgattgttcgccatcattgacaaacccattcaagaccccgaaaagtgactctagcttgtcttgagtaaacgagtactgtgcgactgtccaggaatcgtcatctgggacatcgtagattttggatcggacggaggtcacaataccgaagttgtggccagcgcctcgaagaccccaaaacaggtccgcgtgagagtcagcagaaactgcaataatagatccatttccaagtacgagattggcttcgacaatttggtcactagtaagaccaaagttaccttgtagccagccatgcccgcccccaaggcctggtcccaagagtgaagtgcagtcgcagacggccgtgactatggatactcaatacatcgaaactcgacacgagtatgtttgggtatgatctcaccggtccatttcccatattcccacagtgcgtggctcacatctcgcgacattgcaccacccccaatcagggcagtgtcagcaccgggttgaacttctaccctgttgagtctcttcaagtctacaccgaccccgcagttcaaagctcccaaagagttaatggctccatgatgcccagccacggcaaggaacggtagag

SEQ ID NO: 11445 - DNA, 255 bp, Muscodor strobelii
  misc_feature: SGI cDNA ID NO. 563677
  misc_feature: Encodes the peptide sequence at SEQ ID NO 11446
agtgctgataagattgttgaggccggcgctgtagctgccgacggtgatgctgagatggccggccaagaggagaatggcgaggctggcggcgaggacgagatgtccgaggacggaagtgtcgatctcgagaatgaaagcgaagacgagctcgaggacgaaatggagggcgagattgaaggcgctgctgaaggtggcgatgacgctatggatgtggacgatgcccctgctgaggcaaagggagttgccgcccactag

SEQ ID NO: 11446 - protein, 84 aa, Muscodor strobelii
  misc_feature: SGI Peptide ID NO. 563677
  misc_feature (2)..(77): NCBI GI: 85090794 Blast Desc: NCU09436 [Neurospora crassa OR74A] gi|74614968|sp|Q7S1X9.1|ASF1_NEUCR RecName: Full=Histone chaperone asf-1; AltName: Full=Anti-silencing function protein 1
SADKIVEAGAVAADGDAEMAGQEENGEAGGEDEMSEDGSVDLENESEDELEDEMEGEIEGAAEGGDDAMDVDDAPAEAKGVAAH

SEQ ID NO: 11447 - DNA, 518 bp, Muscodor strobelii
  misc_feature: SGI EST ID NO. CUFF.27182.0
  misc_feature: Variant of the nucleotide sequence at SEQ ID NO 11445
gtgctgataagattgttgaggccggcgctgtagctgccgacggtgatgctgagatggccggccaagaggagaatggcgaggctggcggcgaggacgagatgtccgaggacggaagtgtcgatctcgagaatgaaagcgaagacgagctcgaggacgaaatggagggcgagattgaaggcgctgctgaaggtggcgatgacgctatggatgtggacgatgcccctgctgaggcaaagggagttgccgcccactagccgtgacgatgaccacgacgatacgataccccttgtttggcatggattcagagttgtggacgccagagatgttccaatgcgtccaactgatagcttggatgtggtacgaaattacgaattgtcctgttttgcgcttccgctgtcaatggaaatagcataaaagaggctgaggaaataccattagagtaactaaaacacggattggccccttcctgtcggaatcgggcctcttatgcagagatatccacgatgccactccagagt

SEQ ID NO: 11448 - DNA, 966 bp, Muscodor strobelii
  misc_feature: SGI cDNA ID NO. 563678
  misc_feature: Elevated expression when VOC is produced
  misc_feature: Encodes the peptide sequence at SEQ ID NO 11449
atgtggttcttcgaagagaaccagcgaaggacgggtaatccttggtctcttcgacagaccgctgtgtaccaaaagctcgaccttttgacgggtatctcggtattcatattcctgcagccatcatcttatatagaaaaacggcttggcgatactttgcgtgcaataatgcctagcgcttctctgaatgggctgaacaatatttttctgcatgtcatgttgctttctactacactcgcgaattggcgtcgttacatcgctacccaggcatctgaattagaacagcttgaagagaagaccatgttctgcaaggccgatcgccttgatcagaatgacttcaccttacagttctccgaccgccaaaatctgcagaatattcgacgaacgctcgctaaagcggcgcgattattggattgctcgatccaaataggggagcatatgaaggaaatctatgggaatcaaagcctctatcattttcataagtccaacggggctctgcttcacgagttagaagattatacaagcgaagctcgctatcaccgtggcgcggtgtccgatctcctgctacgatctacggacacttgtaatatgttggctagcattctccagtatcgtgtcggaaattcaggtttagaagacacgaagacactggtcacaattgcctcccagggtgagacgggtagcaaagttgctctgaaaacagcgactaatgcagcggctctcacatttacagccaccgtttacctcccagcttcactactcacgggtgtatttaattccaatctagtagacgtcaagaatggccatttcatactagctcaagagttttggaagtttttggttgttttgattcccttagcattaggaactgttgctcttgttgtcacttatcaatggcatttatggcgatcatacaggagaaagacagcaggtgcgacggtaccacgacttggcggatctattgtatga

SEQ ID NO: 11449 - protein, 321 aa, Muscodor strobelii
  misc_feature: SGI Peptide ID NO. 563678
  misc_feature (3)..(306): NCBI GI: 169604708 Blast Desc: SNOG_05370 [Phaeosphaeria nodorum SN15] gi|111066641|gb|EAT87761.1| SNOG_05370 [Phaeosphaeria nodorum SN15]
  misc_feature (2)..(298): NCBI GI: 169765736 Blast Desc: [Aspergillus oryzae RIB40] gi|83765194|dbj|BAE55337.1| protein product [Aspergillus oryzae]
  misc_feature (12)..(304): NCBI GI: 259487134 Blast Desc: TPA: conserved [Aspergillus nidulans FGSC A4]
  misc_feature (12)..(285): NCBI GI: 67522663 Blast Desc: AN1788.2 [Aspergillus nidulans FGSC A4] gi|40744808|gb|EAA63964.1| AN1788.2 [Aspergillus nidulans FGSC A4]
  misc_feature (5)..(292): NCBI GI: 154300068 Blast Desc: BC1G_11223 [Botryotinia fuckeliana B05.10] gi|150856836|gb|EDN32028.1| BC1G_11223 [Botryotinia fuckeliana B05.10]
  misc_feature (3)..(291): NCBI GI: 67540596 Blast Desc: AN6468.2 [Aspergillus nidulans FGSC A4] gi|40739300|gb|EAA58490.1| AN6468.2 [Aspergillus nidulans FGSC A4] gi|259479298|tpe|CBF69405.1| TPA: conserved [Aspergillus FGSC
  misc_feature (4)..(298): NCBI GI: 145243186 Blast Desc: An11g01260 [Aspergillus niger] gi|134078804|emb|CAK45863.1| protein product [Aspergillus niger]
  misc_feature (4)..(313): NCBI GI: 238490898 Blast Desc: conserved [Aspergillus flavus NRRL3357] gi|220697099|gb|EED53440.1| conserved [Aspergillus flavus NRRL3357]
  misc_feature (13)..(312): NCBI GI: 67541198 Blast Desc: AN6769.2 [Aspergillus nidulans FGSC A4] gi|40739397|gb|EAA58587.1| AN6769.2 [Aspergillus nidulans FGSC A4]
  misc_feature (13)..(312): NCBI GI: 259480362 Blast Desc: TPA: conserved [Aspergillus nidulans FGSC A4]
  misc_feature: Useful for introducing or modulating the production of volatile compounds
MWFFEENQRRTGNPWSLRQTAVYQKLDLLTGISVFIFLQPSSYIEKRLGDTLRAIMPSASLNGLNNIFLHVMLLSTTLANWRRYIATQASELEQLEEKTMFCKADRLDQNDFTLQFSDRQNLQNIRRTLAKAARLLDCSIQIGEHMKEIYGNQSLYHFHKSNGALLHELEDYTSEARYHRGAVSDLLLRSTDTCNMLASILQYRVGNSGLEDTKTLVTIASQGETGSKVALKTATNAAALTFTATVYLPASLLTGVFNSNLVDVKNGHFILAQEFWKFLVVLIPLALGTVALVVTYQWHLWRSYRRKTAGATVPRLGGSIV

SEQ ID NO: 11450 - DNA, 2136 bp, Muscodor strobelii
  misc_feature: SGI EST ID NO. CUFF.27219.1
  misc_feature: Variant of the nucleotide sequence at SEQ ID NO 11448
ctgtactcaacattccaaagcgcggacgtagtatgacacccattcggaatgctctatctattgtcaggcctgacacttcttattggaatcgagcaagagcctacatgcatggactttgaagcagtacataggtcgtctccgccgagttgaacaaccacgtgaaactcgaaagcctaacgttcagcctaccttcatcgcctgaacatgtgcctccagacgagcagtgtgggtcgcggcaaggcgcaagcttcacttgcactgcattcatctgcctaaggtatttgaacctcaaattctgcaattttggcagtgaagttccagtacacgagtttgttctcgctcgacaaattctacccagttaatttctcacgtacttccggtagatatcttgagtttcgacaagcgacggcagagcattattgcataggccacattctacctaacagcgaatatgttggcgtctatagaacaatcgtcgtcccacctttggacttgtgatgtcgaactgggaagcaagcaggtcttcgaggatgctaatcggctctttgcaaaagtaggagatgagctagaagtgtggacagtttccaccaatggattgatgacgaagcacttgttggatgacaagaacttgattcaccagcatcttcagatcaacaataatgaaaagcattcattttagtgggtttttatgttaacacgaggtgacggtgtcgctatatggccaggggaagatttctttaccattgtggtccacctcgcgaaggatcagacgaacatggcaaactaaccgaatagcagcgttatacgtcaagcgaatacatggagtaggtttcgcataagctatggaagtttccaggctctgctgtcttctaagggtgttttcccttttttcttgaatactctacctgacttcggataccgcaaccgggacaacaacagcacatggaataatttccactggcgccagactgggggaggcctacagaaatgtacgtaaaattgtacgaaaacctcctcgtgcatttttgcttagatggaaatcaagttgaaatttgttacaccatgtggttcttcgaagagaaccagcgaaggacgggtaatccttggtctcttcgacagaccgctgtgtaccaaaagctcgaccttttgacgggtatctcggtattcatattcctgcagccatcatcttatatagaaaaacggcttggcgatactttgcgtgcaataatgcctagcgcttctctgaatgggctgaacaatatttttctgcatgtcatgttgctttctactacactcgcgaattggcgtcgttacatcgctacccaggcatctgaattagaacagcttgaagagaagaccatgttctgcaaggccgatcgccttgatcagaatgacttcaccttacagttctccgaccgccaaaatctgcagaatattcgacgaacgctcgctaaagcggcgcgattattggattgctcgatccaaataggggagcatatgaaggaaatctatgggaatcaaagcctctatcattttcataagtccaacggggctctgcttcacgagttagaagattatacaagcgaagctcgctatcaccgtggcgcggtgtccgatctcctgctacgatctacggacacttgtaatatgcattctccagtatcgtgtcggaaattcaggtttagaagacacgaagacactggtcacaattgcctcccagggtgagacgggtagcaaagttgctctgaaaacagcgactaatgcagcggctctcacatttacagccaccgtttacctcccagcttcactactcacgggtgtatttaattccaatctagtagacgtcaagaatggccatttcatactagctcaagagttttggaagtttttggttgttttgattcccttagcattaggaactgttgctcttgttgtcacttatcaatggcatttatggcgatcatacaggagaaagacagcaggtgcgacggtaccacgacttggcggatctattgtatgatcgaacagggataaaatgcaaagaaaatcgttcttagaaagacaccacaaagaaactgggcactcaaactggaaattacataactagtaatagagtacagtaaatgaagatcgcgt

SEQ ID NO: 11451 - DNA, 534 bp, Muscodor strobelii
  misc_feature: SGI cDNA ID NO. 563679
  misc_feature: Encodes the peptide sequence at SEQ ID NO 11452
atgaaggaagttatctcccgctttcaacggaccctcgaatctattagacactctgctattggatctgaaaatgaccacttctacgtctacgagcagcttcgagatgtgatctcgcagggtttgattgttgagttggtcagccctcacatgcttgaccacgcgctcaatgccgcagtttcgagtctcatgtcagatggtattcgcttgttttgtatactggcccttatggaccgagtagagcttctaccggtgtttctcgcccattgcatacttgactccaagctaccgattacagatttgacaagacttgaaacggtggccccagatcttgacgccaacttctttgataaacttcagtggcagttcatcccttgggtgtttatgataaacgccggccatctgatttttcataagaaaacaattcttcccttcatatctgagaggaccatcgctgagggtgcgggcggcgtcatcagtgttgttagaattcatcctctccagcagaacttcctaccgggcaaggtgtgtccctag

SEQ ID NO: 11452 - protein, 177 aa, Muscodor strobelii
  misc_feature: SGI Peptide ID NO. 563679
  misc_feature (21)..(175): NCBI GI: 116200846 Blast Desc: CHGG_10968 [Chaetomium globosum CBS 148.51] gi|88175682|gb|EAQ83150.1| CHGG_10968 [Chaetomium globosum CBS 148.51]
  misc_feature (68)..(170): NCBI GI: 171685536 Blast Desc: protein product [Podospora anserina] gi|170942729|emb|CAP68382.1| protein product [Podospora anserina]
  misc_feature (26)..(163): NCBI GI: 169618894 Blast Desc: SNOG_12639 [Phaeosphaeria nodorum SN15] gi|111058817|gb|EAT79937.1| SNOG_12639 [Phaeosphaeria nodorum SN15]
  misc_feature (60)..(168): NCBI GI: 256722402 Blast Desc: NECHADRAFT_82208 [Nectria haematococca mpVI 77-13-4]
MKEVISRFQRTLESIRHSAIGSENDHFYVYEQLRDVISQGLIVELVSPHMLDHALNAAVSSLMSDGIRLFCILALMDRVELLPVFLAHCILDSKLPITDLTRLETVAPDLDANFFDKLQWQFIPWVFMINAGHLIFHKKTILPFISERTIAEGAGGVISVVRIHPLQQNFLPGKVCP

SEQ ID NO: 11453 - DNA, 2994 bp, Muscodor strobelii
  misc_feature: SGI cDNA ID NO. 563680
  misc_feature: Encodes the peptide sequence at SEQ ID NO 11454
atgagtgaagcggaacaacggagactgaaagtggtacttttcgagacggaattactatcacgaccgaaggttcagcggcatcccaatattgcttcactgaagggtttctcctgggataatttgctcggtggatacgcgccatgcctagtaatggagcttgcgacaatgggaaccgctcgcgaattcacatcagatgagcgactctcagactcaaagaagcttttactgtgccatggtgtagcttgcggcctcagatttatacacgccgctaatatagtccatggtgatgtcaagcaagataatgtcttgatatacgcgaatgaaaattctccggatggctttgtggctaagataactgacttcgagcgatctcctcagagcactagcaatcttgtgtacacgggaacttggttgtacaacgcacccgaaatacggtgtaatagtctcagtacaccggaacccaaatctctgtggctgtgcgatgtcttctctttcggattgttatcagtagaagttttgtcttcgaggtcgtggaaaagcgttttagacgatcaacaaaatggactcattagaccaaatattccgccaaagactacacaaacggtagaaacgcatcatattccgaacggaaatggaacgctattactagttcatgccctaattgaaaaacccggaggattctctgacgcacttaagaccatttgtaaaggtatctcagcggtcacacttcctgatgatcctctgcgacggcttcctctcgggtgggatatggttttgtcgcttttaccgccggaaacacgtgatgaacaagctacaaatgatcgaccagatctcataatcgactacgacgattcctactcgttcctagagatcaatgcgtcaaagggtaatttcttcgaagggcatgttggcgatgcactatattttgatctagaacgaatggctaataactccagcttgggatggcagcagggaaaagcatggttcgatttattcctgttatactcacttggccgctttggctcgttcaatggggtccgcgatgccttagaacttctcactagagctgccattgctcagttctcccctgtgttcatttcagcaaagcgcatatttcaagcaaacaattgccccattccggaaattttcagagttggcccacaagaccatcgactccgtgaagaaatcgccgagattgaaagccttacgagtgatgaatactattctgctatggtccaaaagttcttacccaccacgctcaagggattagctatgaaaaagttgccaccttattggagtcctgacatggaagaacacaggctgagcctagtcgacaatatacaactgactagcgatggcatgtccaccgatgaattccgataccatgcgcaagagaatcttcttctccactgcagtgttatcagtggcaaccatgcagcgtgcgacatgcttctgcgccttggatgtaacatcgacgctacgatgcctggtggcatgacgccactccacctagcttgtcgttgtgtcgagctggagattattagactcttactcagcaagggtgctgatatatccctgagtgacgatcaaaacatttcgcctcttcactggctaatcctactacctaaggaacatgtacaatctatgactcaattgtatctcagctctagtaaagatgggcttagcgcgagcacgtcttctgaggccaagcgcttcttctgcgacgatcttggactgcagcttttcggtacgcctctccgttgggccattttgtgtcgcaactttacagtgatcagaattttgctggatttaggacttactccatctctggacaaaaggtggccccgtaactatatcgcgacggctgtggagattgtctgtgcaaagagtacagagtaccttttagaatttggccacatgctatctgcaagtcaaaaacaagatctatttacaggaataggagcaagtaaagacgacttcactttatgggtaatgcacgggacttgctatcgccacgcttttggtgaggtcctggatctcctagtccgctctggggccagacttccgctcaactcaagcgacctgccccaatgggaacccactcctctgtgctgggccgtcactcgcttctgtattcctctcataaatgaactgctccagagaggtgcggagatcaacgatcggagcagctttcacgcagcacttagatgggcttttgcttctgccgaggccaccggtccaaggcataaggtaatcgacactatcaacctgctcttagagaacaatgcggtgtatgggtctaggccgccactctacgaggcttgtggcttccacgtgaacgcggatggctttaggatgatgataaagaagcaccctgaaagcgtccattttaagcaccgcgagaaaacccctttactacgttatctcagcatcgccacggaacatgacattttatctaaagtccaagctctagtagagggaggcgctgatgtcaatgtagaatcacagcattattatgcagaaatgaagaaagagagcgactgctgctatacgcctttggcctattctttggtcagccaggaatggctgacggcggaatatcttctagaccatggagctactgctaagctgggcgtgaaaggaggccatgaacataccgttctacatattctggtttccaaggctgctgaagtagagacgctgaataacgcctctcagtcgattatgatcctcgatctaatctcatgcaccctaagacatcaatcattggaggttagaggtctcatcaatatgaaggaccatgacggcatcagtccgctaagattggccgttacactcagtcttcctaatgtcgttagaattctagtcgcacagaggtttggcgccgaaagagcaatcatcgaggaggcacaggagattgcagatagcatgacgatggaccaggggacgagagaaaccaagtatatccttgaagaagcattgaacaggttgtag

SEQ ID NO: 11454 - protein, 997 aa, Muscodor strobelii
  misc_feature: SGI Peptide ID NO. 563680
  misc_feature (497)..(529): Pfam Id: PF00023 Pfam Desc: Ankyrin repeat
  misc_feature (26)..(121): Pfam Id: PF00069 Pfam Desc: Protein kinase domain
  misc_feature (26)..(121): Pfam Id: PF07714 Pfam Desc: Protein tyrosine kinase
  misc_feature (6)..(187): NCBI GI: 46140199 Blast Desc: FG11614.1 [Gibberella zeae PH-1]
  misc_feature (469)..(958): NCBI GI: 123437955 Blast Desc: ankyrin repeat protein [Trichomonas vaginalis G3] gi|121891508|gb|EAX96837.1| ankyrin repeat protein, [Trichomonas vaginalis G3]
  misc_feature (4)..(174): NCBI GI: 256722226 Blast Desc: NECHADRAFT_52370 [Nectria haematococca mpVI 77-13-4]
  misc_feature (3)..(173): NCBI GI: 46119405 Blast Desc: FG04770.1 [Gibberella zeae PH-1]
  misc_feature (469)..(883): NCBI GI: 189501781 Blast Desc: Aasi_0340 [Candidatus Amoebophilus asiaticus 5a2] gi|189497222|gb|ACE05769.1| Aasi_0340 [Candidatus Amoebophilus asiaticus 5a2]
  misc_feature (6)..(168): NCBI GI: 261352524 Blast Desc: conserved [Verticillium albo-atrum VaMs.102]
  misc_feature (468)..(958): NCBI GI: 189502738 Blast Desc: Aasi_1435 [Candidatus Amoebophilus asiaticus 5a2] gi|189498179|gb|ACE06726.1| Aasi_1435 [Candidatus Amoebophilus asiaticus 5a2]
  misc_feature (468)..(958): NCBI GI: 189502738 Blast Desc: Aasi_1435 [Candidatus Amoebophilus asiaticus 5a2] gi|189498179|gb|ACE06726.1| Aasi_1435 [Candidatus Amoebophilus asiaticus 5a2]
  misc_feature (18)..(185): NCBI GI: 225557070 Blast Desc: serine/threonine-protein kinase [Ajellomyces capsulatus G186AR]
  misc_feature (18)..(185): NCBI GI: 240277615 Blast Desc: serine/threonine protein kinase [Ajellomyces capsulatus H143]
MSEAEQRRLKVVLFETELLSRPKVQRHPNIASLKGFSWDNLLGGYAPCLVMELATMGTAREFTSDERLSDSKKLLLCHGVACGLRFIHAANIVHGDVKQDNVLIYANENSPDGFVAKITDFERSPQSTSNLVYTGTWLYNAPEIRCNSLSTPEPKSLWLCDVFSFGLLSVEVLSSRSWKSVLDDQQNGLIRPNIPPKTTQTVETHHIPNGNGTLLLVHALIEKPGGFSDALKTICKGISAVTLPDDPLRRLPLGWDMVLSLLPPETRDEQATNDRPDLIIDYDDSYSFLEINASKGNFFEGHVGDALYFDLERMANNSSLGWQQGKAWFDLFLLYSLGRFGSFNGVRDALELLTRAAIAQFSPVFISAKRIFQANNCPIPEIFRVGPQDHRLREEIAEIESLTSDEYYSAMVQKFLPTTLKGLAMKKLPPYWSPDMEEHRLSLVDNIQLTSDGMSTDEFRYHAQENLLLHCSVISGNHAACDMLLRLGCNIDATMPGGMTPLHLACRCVELEIIRLLLSKGADISLSDDQNISPLHWLILLPKEHVQSMTQLYLSSSKDGLSASTSSEAKRFFCDDLGLQLFGTPLRWAILCRNFTVIRILLDLGLTPSLDKRWPRNYIATAVEIVCAKSTEYLLEFGHMLSASQKQDLFTGIGASKDDFTLWVMHGTCYRHAFGEVLDLLVRSGARLPLNSSDLPQWEPTPLCWAVTRFCIPLINELLQRGAEINDRSSFHAALRWAFASAEATGPRHKVIDTINLLLENNAVYGSRPPLYEACGFHVNADGFRMMIKKHPESVHFKHREKTPLLRYLSIATEHDILSKVQALVEGGADVNVESQHYYAEMKKESDCCYTPLAYSLVSQEWLTAEYLLDHGATAKLGVKGGHEHTVLHILVSKAAEVETLNNASQSIMILDLISCTLRHQSLEVRGLINMKDHDGISPLRLAVTLSLPNVVRILVAQRFGAERAIIEEAQEIADSMTMDQGTRETKYILEEALNRL

SEQ ID NO: 11455 - DNA, 2085 bp, Muscodor strobelii
  misc_feature: SGI EST ID NO. CUFF.27214.0
  misc_feature: Variant of the nucleotide sequence at SEQ ID NO 11453
aaattggagtcctactgcaagcaaccggtcaaatatgcattcccaatctgcgtcaaattctgcgtcaaaaagcacgaatcaggctgacagtctcagtctaagacccaatttaccatcgctttcaaaaacttattccgaagcagttgcagatcaactaacatacacggactgtagcacatccaatgctgagaatcttacgttgttaacgaatctgtcacgagtggtagttcagcgtgatattaccgaatttgccttatcccctatgcttggagaaggtagccaggttatcggacatggggcaacttatcgtgtttcgaaaactcttgctggacccatacttgctacaacgcgatctctcctggcagtcaaggttgctcaggtgactatacctcgaactgcgcgagatattgggatgagtgaagcggaacaacggagactgaaagtggtacttttcgagacggaattactatcacgaccgaaggttcagcggcatcccaatattgcttcactgaagggtttctcctgggataatttgctcggtggatacgcgccatgcctagtaatggagcttgcgacaatgggaaccgctcgcgaattcacatcagatgagcgactctcagactcaaagaagcttttactgtgccatggtgtagcttgcggcctcagatttatacacgccgctaatatagtccatggtgatgtcaagcaagataatgtcttgatatacgcgaatgaaaattctccggatggctttgtggctaagataactgacttcgagcgatctcctcagagcactagcaatcttgtgtacacgggaacttggttgtacaacgcacccgaaatacggtgtaatagtctcagtacaccggaacccaaatctctgtggctgtgcgatgtcttctctttcggattgttatcagtagaagttttgtcttcgaggtcgtggaaaagcgttttagacgatcaacaaaatggactcattagaccaaatattccgccaaagactacacaaacggtagaaacgcatcatattccgaacggaaatggaacgctattactagttcatgccctaattgaaaaacccggaggattctctgacgcacttaagaccatttgtaaaggtatctcagcggtcacacttcctgatgatcctctgcgacggcttcctctcgggtgggatatggttttgtcgcttttaccgccggaaacgtaagtttcatttcgtgtatgggatcgttgatgcataccgaaataagaactgaagttatgctaatgcttttagacgtgatgaacaagctacaaatgatcgaccagatctcataatcgactacgacgattcctactcgttcctagagatcaatgcgtcaaagggtaatttcttcgaagggcatgttggcgatgcactatattttgatctagaacgaatggctaataactccagcttgggatggcagcagggaaaagcatggttcgatttattcctgttatactcacttggccgctttggctcgttcaatggggtccgcgatgccttagaacttctcactagagctgccattgctcagttctcccctgtgttcatttcagcaaagcgcatatttcaagcaaacaattgccccattccggaaattttcagagttggcccacaagaccatcgactccgtgaagaaatcgccgagattgaaagccttacgagtgatgaatactattctgctatggtccaaaagttcttacccaccacgctcaagggattagctatgaaaaagttgccaccttattggagtcctgacatggaagaacacaggctgagcctagtcgacaatatacaactgactagcgatggcatgtccaccgatgaattccgataccatgcgcaagagaatcttcttctccactgcagtgttatcagtggcaaccatgcagcgtgcgacatgcttctgcgccttggatgtaacatcgacgctacgatgcctggtggcatgacgccactccacctagcttgtcgttgtgtcgagctggagattattagactcttactcagcaagggtgctgatatatccctgagtgacgatcaaaacatttcgc

SEQ ID NO: 11456 - DNA, 777 bp, Muscodor strobelii
  misc_feature: SGI cDNA ID NO. 563681
  misc_feature: Reduced expression when VOC is produced
  misc_feature: Encodes the peptide sequence at SEQ ID NO 11457
atgacatccctaaccaccataaccactctcctaacagagaaaccctacacaacagcggccctcctcaccaccgccgcagctctccccttcctcatcacaacatatctcgactaccgccactacatatccatggggccacacgggctaccagacacattatggggctattaccggcaactacgaatgcgtcccctcgctctccccctctcatcaaccaccatcccagcaccgtacgatctttctgccgtatctttatccctcggacccaactcaacaaaatcattcctctccactcccctcaaaccccgttcgggaacgcgtccagaaatctgccccttcgtagccccacagcgccaagaaacccaagccgctacctcatcaatgaaagaacgcatgaacacctacctagacatcctcgtatcttccaaccctcacttatatcaacgcgacctaagtagactcgagggccccgtccccgcagtccaagtcataggaaacaacccacctccatgtctaaagaccacacgcggtgaactaatacacatccatcctcccgatggcagcacgcatctcgttgcttcgctggcggatagcaagaccatcatcgagaaggagtggggacagcgacatagactcagtgggaagatgctcggttgggggtatacgcttatctatgcgccgagagacgatgaggagtttgagatctggaaggagattatcggggctgtggttaagttcgtgggtatggagatgggcgtcgaggtgaagattccttag

SEQ ID NO: 11457 - protein, 258 aa, Muscodor strobelii
  misc_feature: SGI Peptide ID NO. 563681
  misc_feature (20)..(247): NCBI GI: 256730932 Blast Desc: NECHADRAFT_84660 [Nectria haematococca mpVI 77-13-4]
  misc_feature (35)..(254): NCBI GI: 121715644 Blast Desc: conserved [Aspergillus clavatus NRRL 1] gi|119403588|gb|EAW14005.1| conserved [Aspergillus clavatus NRRL 1]
  misc_feature (20)..(244): NCBI GI: 46125977 Blast Desc: FG07366.1 [Gibberella zeae PH-1]
  misc_feature (10)..(256): NCBI GI: 169774959 Blast Desc: [Aspergillus oryzae RIB40] gi|238496407|ref|XP_002379439.1| conserved [Aspergillus flavus NRRL3357] gi|83769810|dbj|BAE59945.1| protein product oryzae]
  misc_feature (34)..(254): NCBI GI: 115384514 Blast Desc: [Aspergillus terreus NIH2624] gi|114196496|gb|EAU38196.1| [Aspergillus terreus NIH2624]
  misc_feature (37)..(247): NCBI GI: 163742819 Blast Desc: RG210_11895 [Phaeobacter gallaeciensis 2.10] gi|161383783|gb|EDQ08168.1| RG210_11895 [Phaeobacter gallaeciensis 2.10]
  misc_feature (7)..(247): NCBI GI: 67900798 Blast Desc: AN7386.2 [Aspergillus nidulans FGSC A4] gi|40742567|gb|EAA61757.1| AN7386.2 [Aspergillus nidulans FGSC A4] gi|259483253|tpe|CBF78486.1| TPA: conserved [Aspergillus FGSC
  misc_feature (35)..(247): NCBI GI: 39976449 Blast Desc: MGG_05849 [Magnaporthe grisea 70-15] gi|145011910|gb|EDJ96566.1| MGG_05849 [Magnaporthe grisea 70-15]
  misc_feature (4)..(255): NCBI GI: 242815938 Blast Desc: conserved [Talaromyces stipitatus ATCC 10500] gi|218715008|gb|EED14431.1| conserved [Talaromyces stipitatus ATCC 10500]
  misc_feature (4)..(255): NCBI GI: 242815942 Blast Desc: conserved [Talaromyces stipitatus ATCC 10500] gi|218715009|gb|EED14432.1| conserved [Talaromyces stipitatus ATCC 10500]
  misc_feature: Useful for introducing or modulating the production of volatile compounds
MTSLTTITTLLTEKPYTTAALLTTAAALPFLITTYLDYRHYISMGPHGLPDTLWGYYRQLRMRPLALPLSSTTIPAPYDLSAVSLSLGPNSTKSFLSTPLKPRSGTRPEICPFVAPQRQETQAATSSMKERMNTYLDILVSSNPHLYQRDLSRLEGPVPAVQVIGNNPPPCLKTTRGELIHIHPPDGSTHLVASLADSKTIIEKEWGQRHRLSGKMLGWGYTLIYAPRDDEEFEIWKEIIGAVVKFVGMEMGVEVKIP

SEQ ID NO: 11458 - DNA, 400 bp, Muscodor strobelii
  misc_feature: SGI EST ID NO. CUFF.27261.0
  misc_feature: Variant of the nucleotide sequence at SEQ ID NO 11456
ataaccactctcctaacagagaaaccctacacaacagcggccctcctcaccaccgccgcagctctccccttcctcatcacaacatatctcgactaccgccactacatatccatggggccacacgggctaccagacacattatggggctattaccggcaactacgaatgcgtcccctcgctctccccctctcatcaaccaccatcccagcaccgtacgatctttctgccgtatctttatccctcggacccaactcaacaaaatcattcctctccactcccctcaaaccccgttcgggaacgcgtccagaaatctgccccttcgtagccccacagcgccaagaaacccaagccgctacctcatcaatgaaagaacgcatgaacacctacctagacatcctcg

SEQ ID NO: 11459 - DNA, 558 bp, Muscodor strobelii
  misc_feature: SGI cDNA ID NO. 563682
  misc_feature: Encodes the peptide sequence at SEQ ID NO 11460
atgcagaaccccacggagcactacgtcgacgaagacaccaagttgaccctgcacggtcttcagcagtactacatcaagcttgatgagcgcgagaagaaccgcaagctgaatgagcttctggatgacctgcagttcaaccaggtcatcatcttcgtgaagagcaccatccgtgctaccgagcttgacaagttgctccgcgaatgcaacttcccctctatctctgtgcactccggcgttagtcaagaggagcgcatcaaacgatacaaggagttcaaggagttcaacaagcgcatttgcgtggccaccgatgtcttcggacgtggtatcgacatcgagcgtatcaacttggcaatcaactatgatctgcctggtgatgctgactcttacctccatcgtgtcggtcgtgctggtcgtttcggtaccaagggtctcgctatctcgtttgtgagcactgagggagatcaggaagtcctgaagtccatcgagaagcgcttcgaggttgctcttcccgagttccccaaggatggcattgatgctagcacctacatggcgtcttag

SEQ ID NO: 11460 - protein, 185 aa, Muscodor strobelii
  misc_feature: SGI Peptide ID NO. 563682
  misc_feature (64)..(140): Pfam Id: PF00271 Pfam Desc: Helicase conserved C-terminal domain
  misc_feature (1)..(185): NCBI GI: 171684483 Blast Desc: protein product [Podospora anserina] gi|170942202|emb|CAP67854.1| protein product [Podospora anserina]
  misc_feature (1)..(185): NCBI GI: 261353233 Blast Desc: ATP-dependent RNA helicase SUB2 [Verticillium albo-atrum VaMs.102]
  misc_feature (1)..(185): NCBI GI: 164423323 Blast Desc: ATP-dependent RNA helicase [Neurospora crassa OR74A] gi|157070045|gb|EAA35657.2| ATP-dependent RNA helicase [Neurospora crassa OR74A]
  misc_feature (1)..(185): NCBI GI: 116193535 Blast Desc: ATP-dependent RNA helicase [Chaetomium globosum CBS 148.51] gi|118577976|sp|Q2H4D0.1|SUB2_CHAGB RecName: Full=ATP-dependent RNA helicase SUB2 gi|88182398|gb|EAQ89866.1|
  misc_feature (1)..(185): NCBI GI: 46128571 Blast Desc: FG08663.1 [Gibberella zeae PH-1]
  misc_feature (1)..(185): NCBI GI: 256733636 Blast Desc: [Nectria haematococca mpVI 77-13-4]
  misc_feature (1)..(185): NCBI GI: 145610002 Blast Desc: conserved [Magnaporthe grisea 70-15] gi|152112305|sp|A4RBS3.1|SUB2_MAGGR RecName: Full=ATP-dependent RNA helicase SUB2 gi|145017381|gb|EDK01744.1| conserved grisea
  misc_feature (1)..(185): NCBI GI: 149210155 Blast Desc: MGCH7_ch7g559 [Magnaporthe grisea 70-15] gi|86196514|gb|EAQ71152.1| MGCH7_ch7g559 [Magnaporthe grisea 70-15]
  misc_feature (1)..(184): NCBI GI: 212537399 Blast Desc: ATP dependent RNA helicase (Sub2), [Penicillium marneffei ATCC 18224] gi|210068597|gb|EEA22688.1| ATP dependent RNA helicase (Sub2), [Penicillium marneffei ATCC 18224]
  misc_feature (1)..(184): NCBI GI: 242809323 Blast Desc: ATP dependent RNA helicase (Sub2), [Talaromyces stipitatus ATCC 10500] gi|218715970|gb|EED15392.1| ATP dependent RNA helicase (Sub2), [Talaromyces stipitatus ATCC 10500]
MQNPTEHYVDEDTKLTLHGLQQYYIKLDEREKNRKLNELLDDLQFNQVIIFVKSTIRATELDKLLRECNFPSISVHSGVSQEERIKRYKEFKEFNKRICVATDVFGRGIDIERINLAINYDLPGDADSYLHRVGRAGRFGTKGLAISFVSTEGDQEVLKSIEKRFEVALPEFPKDGIDASTYMAS

SEQ ID NO: 11461 - DNA, 1045 bp, Muscodor strobelii
  misc_feature: SGI EST ID NO. CUFF.27265.0
  misc_feature: Variant of the nucleotide sequence at SEQ ID NO 11459
cgccaccctctcggacgagatcaagcccatctgccgcaagttcatgcagaaccccacggagcactacgtcgacgaagacaccaagttgaccctgcacggtcttcagcagtactacatcaagcttgatgagcgcgagaagaaccgcaagctgaatgagcttctggatgacctgcagttcaaccaggtcatcatcttcgtgaagagcaccatccgtgctaccgagcttgacaagttgctccgcgaatgcaacttcccctctatctctgtgcactccggcgttagtcaagaggagcgcatcaaacgatacaaggagttcaaggagttcaacaagcgcatttgcgtggccaccgatgtcttcggacgtggtatcgacatcgagcgtatcaacttggcaatcaactatgatctgcctggtgatgctgactcttacctccatcgtgtcggtcgtgctggtcgtttcggtaccaagggtctcgctatctcgtttgtgagcactgagggagatcaggaagtcctgaagtccatcgagaagcgcttcgaggttgctcttcccgagttccccaaggatggcattgatgctagcacctacatggcgtcttagagcaccagttcgcgtgtcgtctcggagaaattgaaaggatgaaagatgattacaacggttaagacgggtttgacgacaacggagcatcaaaagcaatgatgctttccgaatgattggctgcaagatgtaaaagtatcaacactcaaggaaaatgtctgtctgggaatttctttaggtggtctaggggaacgcagggtaactcgcgcgtacagtccatgaacaccatgccacttcgcgatccagaaccgggatgagcgctcatgtttggcaggattctgtagtttctaggagtctaggcacctactcatgaatcgttcatcacaatggacttcgttcttcattttgcgatccgaatgttgtgtcgttcgtgacatataacacagtaatttcagaatgtcgtgaaaggaaaaagcagagaatggtcatatttacaaagtatccaaa

SEQ ID NO: 11462 - DNA, 750 bp, Muscodor strobelii
  misc_feature: SGI cDNA ID NO. 563683
  misc_feature: Encodes the peptide sequence at SEQ ID NO 11463
atgaaagcaattaccgtatttagtttcttgccgtcagtggtagtggcactgagtctttaccgctcacctaccatcgcaccaaccaagaccattaatcgaagggactcatggggtggcgcagtgtctttgggaccaacgaaatcgcgcattaccaaagctgtcactacaattacgcctggcacagcaccatcgacccaatcaggcgagctttttctgtggccgggtatgtccaacggcacaggagacttggtgcagacaactcttgagtcttggcctgacaactcgtggtgtggtgccaaaaccggtgaatggtgcattcggtgctcactatttggttccttcggccaacttgatgggacagcttctccggtaccaggatcaatgtcggtcgagattctctatgagctgcaaagtgacggaacaacatggaagcagacggcaaaggatgttgcgaccgggacgcaactcagcacgttctcctataacagtggtccttacatgactggttatggcacaggcacggagtgtgatgggggctgcacaggtacgattgcggcacagaagtacacgaataccgttatcacattggctgcagcggattcatcatttggtagcactatcggcaccagtcaaggcgcgacatactcagggttgtcaactagtgacaacaagatttggactattgcaacaatcaatataccagcgaatgacttgatcgaatatctagatagtagtgcaaccactttgtga

SEQ ID NO: 11463 - protein, 249 aa, Muscodor strobelii
  misc_feature: SGI Peptide ID NO. 563683
  misc_feature (31)..(235): NCBI GI: 119473611 Blast Desc: NFIA_001310 [Neosartorya fischeri NRRL 181] gi|119406834|gb|EAW16784.1| conserved [Neosartorya fischeri NRRL 181]
  misc_feature (31)..(235): NCBI GI: 255941334 Blast Desc: Pc16g11320 [Penicillium chrysogenum Wisconsin 54-1255] gi|211586059|emb|CAP93802.1| Pc16g11320 [Penicillium chrysogenum Wisconsin 54-1255]
  misc_feature (33)..(235): NCBI GI: 154296200 Blast Desc: BC1G_12927 [Botryotinia fuckeliana B05.10] gi|150843491|gb|EDN18684.1| BC1G_12927 [Botryotinia fuckeliana B05.10]
  misc_feature (35)..(235): NCBI GI: 256726760 Blast Desc: NECHADRAFT_105885 [Nectria haematococca mpVI 77-13-4]
  misc_feature (37)..(236): NCBI GI: 256723305 Blast Desc: NECHADRAFT_97189 [Nectria haematococca mpVI 77-13-4]
  misc_feature (1)..(238): NCBI GI: 46115884 Blast Desc: FG03784.1 [Gibberella zeae PH-1]
  misc_feature (42)..(236): NCBI GI: 255939850 Blast Desc: Pc16g03280 [Penicillium chrysogenum Wisconsin 54-1255] gi|211585317|emb|CAP92998.1| Pc16g03280 [Penicillium chrysogenum Wisconsin 54-1255]
  misc_feature (37)..(236): NCBI GI: 67904660 Blast Desc: AN9317.2 [Aspergillus nidulans FGSC A4] gi|40747228|gb|EAA66384.1| AN9317.2 [Aspergillus nidulans FGSC A4] gi|259488152|tpe|CBF87391.1| TPA: conserved [Aspergillus FGSC
  misc_feature (1)..(236): NCBI GI: 145234841 Blast Desc: An03g01670 [Aspergillus niger] gi|134057743|emb|CAK38140.1| protein product [Aspergillus niger]
  misc_feature (38)..(234): NCBI GI: 115384802 Blast Desc: [Aspergillus terreus NIH2624] gi|114196640|gb|EAU38340.1| [Aspergillus terreus NIH2624]
MKAITVFSFLPSVVVALSLYRSPTIAPTKTINRRDSWGGAVSLGPTKSRITKAVTTITPGTAPSTQSGELFLWPGMSNGTGDLVQTTLESWPDNSWCGAKTGEWCIRCSLFGSFGQLDGTASPVPGSMSVEILYELQSDGTTWKQTAKDVATGTQLSTFSYNSGPYMTGYGTGTECDGGCTGTIAAQKYTNTVITLAAADSSFGSTIGTSQGATYSGLSTSDNKIWTIATINIPANDLIEYLDSSATTL

SEQ ID NO: 11464 - DNA, 429 bp, Muscodor strobelii
  misc_feature: SGI cDNA ID NO. 563684
  misc_feature: Encodes the peptide sequence at SEQ ID NO 11465
atgctatccttacgcgatcaactctgggcaacggcgaaggcggctttcgaagagtacggcgacatgagccctgaatccgtgatcgcctatcggagtccagattgtgttcatcgtatgttgccagccacatccggcattccagatcggaccaacaaacaatactcggatttcgtaatgaagttgaaacaacaagtttccaactttcgactcagcatccaggacgacttcgggccctttatagatgagcagaatcgtacagtagttgcgcatattaagtctctgggcgatactacctctggttccatagaagcagagtatttcatggcattgaagatgaatgatgatggcactaagattattgagtttgtggaattcatagacactgcgaagacgtttgaatttacgactagactcaaattagaggtgtga

SEQ ID NO: 11465 - protein, 142 aa, Muscodor strobelii
  misc_feature: SGI Peptide ID NO. 563684
  misc_feature (19)..(129): NCBI GI: 67904524 Blast Desc: AN9249.2 [Aspergillus nidulans FGSC A4] gi|40747160|gb|EAA66316.1| [Aspergillus nidulans FGSC A4] gi|259488070|tpe|CBF87245.1| TPA: conserved [Aspergillus nidulans
  misc_feature (1)..(138): NCBI GI: 169615669 Blast Desc: SNOG_10995 [Phaeosphaeria nodorum SN15] gi|160703014|gb|EAT81494.2| SNOG_10995 [Phaeosphaeria nodorum SN15]
  misc_feature (7)..(138): NCBI GI: 169613254 Blast Desc: SNOG_09757 [Phaeosphaeria nodorum SN15] gi|160702686|gb|EAT83022.2| SNOG_09757 [Phaeosphaeria nodorum SN15]
  misc_feature (10)..(134): NCBI GI: 189194940 Blast Desc: [Pyrenophora tritici-repentis Pt-1C-BFP] gi|187979687|gb|EDU46313.1| [Pyrenophora tritici-repentis Pt-1C-BFP]
  misc_feature (10)..(138): NCBI GI: 189201171 Blast Desc: [Pyrenophora tritici-repentis Pt-1C-BFP] gi|187984021|gb|EDU49509.1| [Pyrenophora tritici-repentis Pt-1C-BFP]
  misc_feature (1)..(138): NCBI GI: 115385675 Blast Desc: [Aspergillus terreus NIH2624] gi|114187831|gb|EAU29531.1| [Aspergillus terreus NIH2624]
  misc_feature (1)..(139): NCBI GI: 259488076 Blast Desc: TPA: conserved [Aspergillus nidulans FGSC A4]
  misc_feature (1)..(139): NCBI GI: 67904536 Blast Desc: AN9255.2 [Aspergillus nidulans FGSC A4] gi|40747166|gb|EAA66322.1| AN9255.2 [Aspergillus nidulans FGSC A4]
  misc_feature (2)..(139): NCBI GI: 259488073 Blast Desc: TPA: conserved [Aspergillus nidulans FGSC A4]
  misc_feature (2)..(139): NCBI GI: 67904530 Blast Desc: AN9252.2 [Aspergillus nidulans FGSC A4] gi|40747163|gb|EAA66319.1| AN9252.2 [Aspergillus nidulans FGSC A4]
MLSLRDQLWATAKAAFEEYGDMSPESVIAYRSPDCVHRMLPATSGIPDRTNKQYSDFVMKLKQQVSNFRLSIQDDFGPFIDEQNRTVVAHIKSLGDTTSGSIEAEYFMALKMNDDGTKIIEFVEFIDTAKTFEFTTRLKLEV

SEQ ID NO: 11466 - DNA, 498 bp, Muscodor strobelii
  misc_feature: SGI EST ID NO. CUFF.27237.0
  misc_feature: Variant of the nucleotide sequence at SEQ ID NO 11464
tacacagtcagcgcaatgctatccttacgcgatcaactctgggcaacggcgaaggcggctttcgaagagtacggcgacatgagccctgaatccgtgatcgcctatcggagtccagattgtgttcatcgtatgttgccagccacatccggcattccagatcggaccaacaaacaatactcggatttcgtaatgaagttgaaacaacaagtttccaactttcgactcagcatccaggacgacttcgggccctttatagatgagcagaatcgtacagtagttgcgcatattaagtctctgggcgatactacctctggttccatagaagcagagtatttcatggcattgaagatgaatgatgatggcactaagattattgagtttgtggaattcatagacactgcgaagacgtttgaatttacgactagactcaaattagaggtgtgatacacttataattagacgagctgttgagtacggcgcaaataacaaggaccgttg

SEQ ID NO: 11467 - DNA, 813 bp, Muscodor strobelii
  misc_feature: SGI cDNA ID NO. 563685
  misc_feature: Encodes the peptide sequence at SEQ ID NO 11468
atgtcattatcagcggcagcatggattccctctgtgacagggaaatcctctcgcaccatcaacgtcctcctcataaatcctaactctacatcatccatgacagcagcttgcctacgcagcatcgaagccacactgccttcagatgtaaccgtgcatggattcacggcgccaaccacggctccgagtgcaatcgagaataaagtcgacgcggtactatccgcagcagaatgctttagggcactcgcaacgatgatccgggaggatcctaagcgcttcgatgcttttcttgttgcatgtttctccgcgcatccgttaatagtcatgctcagagaagaatacgagcaaccaacaatcgggataatggaagctgcgctatacgcttcgcgtatgtgtggtgaaaagctcagtgtcttaacgacgagtgagcgatccagcatctatcacgctaaagctatcgccgagtacggtctcgctactcactcggtcggctgcgaaacatgcaatgtcgcggtgcttgagttggagtcgaaacctaaggatgttgtgtatgctgggctcataacagccgccaaaaggcttgtcgaaaagggcgctgactgcatctgtctaggatgcgccgggatggcagaaatgcaggcagtgtgcaggaaagctgtcgacatggagaatcgcaaagccatggtcgtggacggcgtcgctatgggtgttcatttcctcactgcactagtccgagaaaatctcaggacaccgaagggtggcgcttattggagctcaggtgctcaacgagagaaaagagggcaaaaaatcgtgtga

SEQ ID NO: 11468 - protein, 270 aa, Muscodor strobelii
  misc_feature: SGI Peptide ID NO. 563685
  misc_feature (19)..(244): Pfam Id: PF01177 Pfam Desc: Asp/Glu/Hydantoin racemase
  misc_feature (93)..(208): Pfam Id: PF01177 Pfam Desc: Asp/Glu/Hydantoin racemase
  misc_feature (9)..(268): NCBI GI: 169611358 Blast Desc: SNOG_08789 [Phaeosphaeria nodorum SN15] gi|111062837|gb|EAT83957.1| SNOG_08789 [Phaeosphaeria nodorum SN15]
  misc_feature (17)..(270): NCBI GI: 115436938 Blast Desc: ATEG_09061 [Aspergillus terreus NIH2624] gi|114188498|gb|EAU30198.1| ATEG_09061 [Aspergillus terreus NIH2624]
  misc_feature (17)..(270): NCBI GI: 67902860 Blast Desc: AN8417.2 [Aspergillus nidulans FGSC A4] gi|40747883|gb|EAA67039.1| AN8417.2 [Aspergillus nidulans FGSC A4] gi|259484353|tpe|CBF80499.1| TPA: conserved [Aspergillus FGSC
  misc_feature (9)..(267): NCBI GI: 254576315 Blast Desc: hydantoin racemase [Pichia angusta]
  misc_feature (9)..(270): NCBI GI: 145248547 Blast Desc: An13g03920 [Aspergillus niger] gi|134081277|emb|CAK41783.1| protein product [Aspergillus niger]
  misc_feature (20)..(261): NCBI GI: 19115408 Blast Desc: hydantoin racemase family () [Schizosaccharomyces pombe 972h-] gi|1351671|sp|Q09921.1|YAKA_SCHPO RecName: Full=Uncharacterized protein C1F7.10 gi|1067212|emb|CAA91957.1|
  misc_feature (37)..(257): NCBI GI: 213401129 Blast Desc: hydantoin racemase [Schizosaccharomyces japonicus yFS275] gi|211999384|gb|EEB05044.1| hydantoin racemase [Schizosaccharomyces japonicus yFS275]
  misc_feature (1)..(269): NCBI GI: 50304109 Blast Desc: protein product [Kluyveromyces lactis] gi|49641136|emb|CAH02397.1| KLLA0B10670p [Kluyveromyces lactis]
  misc_feature (20)..(255): NCBI GI: 213409287 Blast Desc: hydantoin racemase [Schizosaccharomyces japonicus yFS275] gi|212003461|gb|EEB09121.1| hydantoin racemase [Schizosaccharomyces japonicus yFS275]
  misc_feature (16)..(249): NCBI GI: 71023729 Blast Desc: UM05947.1 [Ustilago maydis 521] gi|46101478|gb|EAK86711.1| UM05947.1 [Ustilago maydis 521]
  misc_feature (20)..(255): SWISSPROT Homolog: EC 5.1.99.5 Hydantoin racemase
MSLSAAAWIPSVTGKSSRTINVLLINPNSTSSMTAACLRSIEATLPSDVTVHGFTAPTTAPSAIENKVDAVLSAAECFRALATMIREDPKRFDAFLVACFSAHPLIVMLREEYEQPTIGIMEAALYASRMCGEKLSVLTTSERSSIYHAKAIAEYGLATHSVGCETCNVAVLELESKPKDVVYAGLITAAKRLVEKGADCICLGCAGMAEMQAVCRKAVDMENRKAMVVDGVAMGVHFLTALVRENLRTPKGGAYWSSGAQREKRGQKIV

SEQ ID NO: 11469 - DNA, 559 bp, Muscodor strobelii
  misc_feature: SGI EST ID NO. CUFF.27249.0
  misc_feature: Variant of the nucleotide sequence at SEQ ID NO 11467
caactagtgtattgaacacgcattgtctatttgcaaattgtgatagtcagatcaacgctttgatatcgcctgttgaagttcaggctcaccagcagtgctcaatcattatcacgttccagtgacgagaaaaagatcaaatatcatgtcattatcagcggcagcatggattccctctgtgacagggaaatcctctcgcaccatcaacgtcctcctcataaatcctaactctacatcatccatgacagcagcttgcctacgcagcatcgaagccacactgccttcagatgtaaccgtgcatggattcacggcgccaaccacggctccgagtgcaatcgagaataaagtcgacgcggtactatccgcagcagaatgctttagggcactcgcaacgatgatccgggaggatcctaagcgcttcgatgcttttcttgttgcatgtttctccgcgcatccgttaatagtcatgctcagagaagaatacgagcaaccaacaatcgggataatggaagctgcgctatacgcttcgcgtatgtgtggtgaaaagctcagtgtcttaacg

SEQ ID NO: 11470 - DNA, 1533 bp, Muscodor strobelii
  misc_feature: SGI cDNA ID NO. 563686
  misc_feature: Encodes the peptide sequence at SEQ ID NO 11471
atgttagacctaataatccgaaacggcagagttgtcactgcgtcagaagttcttcctcttggcgtggaagtcggggttgaagatggcgtagtagcggtcgtaggctacaaacttgaagctggcagtgaaactcagattgttgatgcagaaggtgcctatattacacctggaggagtcgattcacacgcacacatcgaccaagacaattccccgaccggtgatacctgggaaagcgcctcccggtctgccatcgcaggcggtaacaccactgtaatagcgtttgcgacccaagagaggcacgaacagagcgttttcccgtcagtcgaagactaccataagaaagcggacggaaatgcattttgtgattatggatttcatgtgatcatcacgaacccaagcgaacatgttctaaagaatgagttcccagcactcgttgagcaaggaattaccagcgttaaactttacatgacctatgagcccaagaagctaggcgatggagaattattcaatgttatgatgcgagcgcgcgctcttggaataacgacaatggtgcatgctgaaaataatgatatgattgagcaaatcacgaaacgacttgcggcacatggtaatatagacagttactttcattccgttgcgcgtcctcagattgcagagaccgaagcaacataccgagctattagcctagctgaggtgaccgatgcacctattcttatcgtgcacatgtccgcccctgtggcagtcaaacatgtcagcgatgctcagcagagactgctcccgatccacgcagaagcatgtccccattatctttacctactatcaaggtctttgcgatcggggctgaacgactttgaaggtgcgaagggcatatgcgcgcctccattacgacacgatcccagagacttggagtacctctggctggccctcgcaaatggcacatttacagttgtctcttccgatcatgcgccatcggccttcgaccacccctgcggcaaaatgaagggattttgctctacggacggtcactcaaagcgatgcggcgacttccggaaagtgcccaatggtctaccgggaatcgaaacccgtttacctctcctattccatagaacacagtcgctcacagagccagagtcagatgggctcgtacgcatttcactacccaggttcgtccaattgacctcaacaaaccctgcaaagctctacggtctcgacaatcgaaaaggcagtctcgcacctggctttgacgccgatatcgtcatttggtaccctgaagaggacaaaaaattcatcattcgtaacactgatctccatcatcgtatcgattatacaccgtttgagggcattgaagttcgaaactggcctcgcaaggtattccttcgtggtaaattggcttgggatcacgacaatggtggtgcgaaggcaatcaaaggcgatggtcagtttctcaagagaggcaaatcgaatattcttactggcatgatgggtcgaacagcaaccggtatggctaatggggaatggggatattggatgtga

SEQ ID NO: 11471 - protein, 510 aa, Muscodor strobelii
  misc_feature: SGI Peptide ID NO. 563686
  misc_feature (53)..(422): Pfam Id: PF01979 Pfam Desc: Amidohydrolase family
  misc_feature (53)..(420): Pfam Id: PF07969 Pfam Desc: Amidohydrolase family
  misc_feature (388)..(422): Pfam Id: PF01979 Pfam Desc: Amidohydrolase family
  misc_feature (357)..(420): Pfam Id: PF07969 Pfam Desc: Amidohydrolase family
  misc_feature (3)..(510): NCBI GI: 169611360 Blast Desc: SNOG_08790 [Phaeosphaeria nodorum SN15] gi|111062838|gb|EAT83958.1| SNOG_08790 [Phaeosphaeria nodorum SN15]
  misc_feature (2)..(489): NCBI GI: 145248545 Blast Desc: An13g03910 [Aspergillus niger] gi|134081276|emb|CAK41782.1| protein product [Aspergillus niger]
  misc_feature (2)..(489): NCBI GI: 115436942 Blast Desc: conserved [Aspergillus terreus NIH2624] gi|114188499|gb|EAU30199.1| conserved [Aspergillus terreus NIH2624]
  misc_feature (2)..(489): NCBI GI: 67902862 Blast Desc: AN8418.2 [Aspergillus nidulans FGSC A4] gi|40747884|gb|EAA67040.1| AN8418.2 [Aspergillus nidulans FGSC A4] gi|259484354|tpe|CBF80500.1| TPA: conserved [Aspergillus FGSC
  misc_feature (2)..(487): NCBI GI: 115398682 Blast Desc: ATEG_05752 [Aspergillus terreus NIH2624] gi|114191813|gb|EAU33513.1| ATEG_05752 [Aspergillus terreus NIH2624]
  misc_feature (2)..(487): NCBI GI: 145240131 Blast Desc: An08g05950 [Aspergillus niger] gi|134077226|emb|CAK45567.1| protein product [Aspergillus niger]
  misc_feature (2)..(487): NCBI GI: 242770587 Blast Desc: allantoinase, [Talaromyces stipitatus ATCC 10500] gi|218725207|gb|EED24624.1| allantoinase, [Talaromyces stipitatus ATCC 10500]
  misc_feature (2)..(487): NCBI GI: 212541775 Blast Desc: aminohydrolase, [Penicillium marneffei ATCC 18224] gi|210065949|gb|EEA20042.1| aminohydrolase, [Penicillium marneffei ATCC 18224]
  misc_feature (3)..(489): NCBI GI: 260941279 Blast Desc: CLUG_05584 [Clavispora lusitaniae ATCC 42720] gi|238851992|gb|EEQ41456.1| CLUG_05584 [Clavispora lusitaniae ATCC 42720]
  misc_feature (2)..(487): NCBI GI: 121717216 Blast Desc: aminohydrolase [Aspergillus clavatus NRRL 1] gi|119404200|gb|EAW14617.1| aminohydrolase [Aspergillus clavatus NRRL 1]
  misc_feature (1)..(491): SWISSPROT Homolog: EC 3.5.2.2 Dihydropyrimidinase
MLDLIIRNGRVVTASEVLPLGVEVGVEDGVVAVVGYKLEAGSETQIVDAEGAYITPGGVDSHAHIDQDNSPTGDTWESASRSAIAGGNTTVIAFATQERHEQSVFPSVEDYHKKADGNAFCDYGFHVIITNPSEHVLKNEFPALVEQGITSVKLYMTYEPKKLGDGELFNVMMRARALGITTMVHAENNDMIEQITKRLAAHGNIDSYFHSVARPQIAETEATYRAISLAEVTDAPILIVHMSAPVAVKHVSDAQQRLLPIHAEACPHYLYLLSRSLRSGLNDFEGAKGICAPPLRHDPRDLEYLWLALANGTFTVVSSDHAPSAFDHPCGKMKGFCSTDGHSKRCGDFRKVPNGLPGIETRLPLLFHRTQSLTEPESDGLVRISLPRFVQLTSTNPAKLYGLDNRKGSLAPGFDADIVIWYPEEDKKFIIRNTDLHHRIDYTPFEGIEVRNWPRKVFLRGKLAWDHDNGGAKAIKGDGQFLKRGKSNILTGMMGRTATGMANGEWGYWM

SEQ ID NO: 11472 - DNA, 1431 bp, Muscodor strobelii
  misc_feature: SGI cDNA ID NO. 563687
  misc_feature: Elevated expression when VOC is produced
  misc_feature: Encodes the peptide sequence at SEQ ID NO 11473
atggccacgatattgctcgcagcttaccttctagcattatcgggccctgtttcggcagcatcgctgaaatctctcggtacgaaagatgtgatagtccagatgttcgagtggccttgggccagtcttgcttcggaatgcacgaacaaccttggtccagcaggctatggctacgtgcaaacttcaacgcctcatgaacatatcctaggctcgcaatggtggacggactaccaagtagtctcgtacaatctaacttccaagcgcggcaacagagccgattttgccaatatggtttctgcctgcaacaaagctggtgtaggcgtcatcatcgatctcatctccaaccacatgacggcgacgacatcgactgctactcagtacgggtttggtggtggggcttacagttcattcaactatccagttgcaggttacagctcggccaatttccattactgtaacaatggacaggccgccgacatatcagactacaccaatcgctacaatgctcagttttgtcaagaaggtgggcttcaggacttggcgcaagaacaggaggtggtacaggacagactcgcagcgtatatgaatgatcttatgtcattaggcgtcgccggattccgagttgactctgctttagagcagccagcggctaacttgactgctattttcgaccgactggagaaagactggtgggccacctgcgaagttgacacagatcaaaacggtcagattcagcagaatgaatactggccattctgctcgactatggtgtttgcgggaactcgtgagctgcagtcccatttcgcgagcggtggtatcgcgaatttggtcacgcccacgccaatgagcacgacgtggaacaacgccggtgcacatatgtatccaccgagcgcaagtgcaaatcttttcgtgactaaccacgattgcgaacgtggttacaccaactcgatcagttatacatctgcaaacaatgcatacgtcctcgctcatatttttcttcttgcttttaactatggtcacccgacagtctattccggctatgacttcagctcatttgaccaaggagcaccagccaattcggacggtacaacgcagcaggtcagctgctactccaatggttggcgatgcgagcagcgatgggacgcaatcgtgggcatggtcgggtttcacaacgctgtaggctcagcagctctcgcgaacgcacagaagggaacggatcaacaaattggttttgaaagggcagcaaaaggcttcgttgctatcaacaatactgggcagacgtggaccgtcacattcacaactggtctgcctaatggaacgtataaagacgttatccataaaaacagtgacggctcttctcctactatcattgtttccggcgggaagttttctgtgagcattgccgcatacgatgccattgccattcacgtttga

SEQ ID NO: 11473 - protein, 476 aa, Muscodor strobelii
  misc_feature: SGI Peptide ID NO. 563687
  misc_feature (403)..(477): Pfam Id: PF02806 Pfam Desc: Alpha amylase, C-terminal all-beta domain
  misc_feature (29)..(389): Pfam Id: PF00128 Pfam Desc: Alpha amylase, catalytic domain
  misc_feature (29)..(210): Pfam Id: PF00128 Pfam Desc: Alpha amylase, catalytic domain
  misc_feature (290)..(389): Pfam Id: PF00128 Pfam Desc: Alpha amylase, catalytic domain
  misc_feature (405)..(476): Pfam Id: PF02806 Pfam Desc: Alpha amylase, C-terminal all-beta domain
  misc_feature (26)..(475): NCBI GI: 238060464 Blast Desc: secreted alpha-amylase [Micromonospora sp. ATCC 39149] gi|237882275|gb|EEP71103.1| secreted alpha-amylase [Micromonospora sp. ATCC 39149]
  misc_feature (5)..(475): NCBI GI: 256833144 Blast Desc: Alpha-amylase [Jonesia denitrificans DSM 20603] gi|256686675|gb|ACV09568.1| Alpha-amylase [Jonesia denitrificans DSM 20603]
  misc_feature (1)..(475): NCBI GI: 159900578 Blast Desc: Alpha-amylase [Herpetosiphon aurantiacus ATCC 23779] gi|159893617|gb|ABX06697.1| Alpha-amylase [Herpetosiphon aurantiacus ATCC 23779]
  misc_feature (14)..(476): NCBI GI: 94966431 Blast Desc: alpha-amylase [Brachybacterium sp. LB25]
  misc_feature (28)..(476): NCBI GI: 270504297 Blast Desc: alpha amylase catalytic region [Micromonospora aurantiaca ATCC 27029] gi|270318863|gb|EFA29869.1| alpha amylase catalytic region [Micromonospora aurantiaca ATCC 27029]
  misc_feature (2)..(476): NCBI GI: 257067887 Blast Desc: glycosidase [Brachybacterium faecium DSM 4810] gi|256558705|gb|ACU84552.1| glycosidase [Brachybacterium faecium DSM 4810]
  misc_feature (1)..(474): NCBI GI: 256833145 Blast Desc: alpha amylase catalytic region [Jonesia denitrificans DSM 20603] gi|256686676|gb|ACV09569.1| alpha amylase catalytic region [Jonesia denitrificans DSM 20603]
  misc_feature (7)..(476): NCBI GI: 93360073 Blast Desc: alpha-amylase [Thermobifida fusca]
  misc_feature (7)..(476): NCBI GI: 72161389 Blast Desc: alpha amylase domain-containing protein [Thermobifida fusca YX] gi|71915121|gb|AAZ55023.1| alpha amylase, C-terminal all-beta:Alpha amylase, catalytic subdomain [Thermobifida fusca
  misc_feature (7)..(476): NCBI GI: 231548 Blast Desc: AMY_THECU RecName: Full=Alpha-amylase; AltName: Full=1,4-alpha-D-glucan glucanohydrolase; Flags: Precursor gi|48131|emb|CAA41881.1| alpha-amylase [Thermomonospora curvata]
  misc_feature (26)..(476): SWISSPROT Homolog: EC 3.2.1.1 Alpha-amylase
  misc_feature: Useful for introducing or modulating the production of volatile compounds
MATILLAAYLLALSGPVSAASLKSLGTKDVIVQMFEWPWASLASECTNNLGPAGYGYVQTSTPHEHILGSQWWTDYQVVSYNLTSKRGNRADFANMVSACNKAGVGVIIDLISNHMTATTSTATQYGFGGGAYSSFNYPVAGYSSANFHYCNNGQAADISDYTNRYNAQFCQEGGLQDLAQEQEVVQDRLAAYMNDLMSLGVAGFRVDSALEQPAANLTAIFDRLEKDWWATCEVDTDQNGQIQQNEYWPFCSTMVFAGTRELQSHFASGGIANLVTPTPMSTTWNNAGAHMYPPSASANLFVTNHDCERGYTNSISYTSANNAYVLAHIFLLAFNYGHPTVYSGYDFSSFDQGAPANSDGTTQQVSCYSNGWRCEQRWDAIVGMVGFHNAVGSAALANAQKGTDQQIGFERAAKGFVAINNTGQTWTVTFTTGLPNGTYKDVIHKNSDGSSPTIIVSGGKFSVSIAAYDAIAIHV

SEQ ID NO: 11474 - DNA, 1820 bp, Muscodor strobelii
  misc_feature: SGI EST ID NO. CUFF.27268.0
  misc_feature: Variant of the nucleotide sequence at SEQ ID NO 11472
gtccactgtaaagcccttgcctctctagaccatcaggatatcattgcctcattatcatggccacgatattgctcgcagcttaccttctagcattatcgggccctgtttcggcagcatcgctgaaatctctcggtacgaaagatgtgatagtccagatgttcgagtggccttgggccagtcttgcttcggaatgcacgaacaaccttggtccagcaggctatggctacgtgcaaacttcaacgcctcatgaacatatcctaggctcgcaatggtggacggactaccaagtagtctcgtacaatctaacttccaagcgcggcaacagagccgattttgccaatatggtttctgcctgcaacaaagctggtgtaggcgtcatcatcgatctcatctccaaccacatgacggcgacgacatcgactgctactcagtacgggtttggtggtggggcttacagttcattcaactatccagttgcaggttacagctcggccaatttccattactgtaacaatggacaggccgccgacatatcagactacaccaatcgctacaatgctcagttttgtcaagaaggtgggcttcaggacttggcgcaagaacaggaggtggtacaggacagactcgcagcgtatatgaatgatcttatgtcattaggcgtcgccggattccgagttgactctgctttagagcagccagcggctaacttgactgctattttcgaccgactggagaaagactggtgggccacctgcgaagttgacacagatcaaaacggtcagattcagcagaatgaatactggccattctgctcgactatggtgtttgcgggaactcgtgagctgcagtcccatttcgcgagcggtggtatcgcgaatttggtcacgcccacgccaatgagcacgacgtggaacaacgccggtgcacatatgtatccaccgagcgcaagtgcaaatcttttcgtgactaaccacgattgcgaacgtggttacaccaactcgatcagttatacatctgcaaacaatgcatacgtcctcgctcatatttttcttcttgcttttaactatggtcacccgacagtctattccggctatgacttcagctcatttgaccaaggagcaccagccaattcggacggtacaacgcagcaggtcagctgctactccaatggttggcgatgcgagcagcgatgggacgcaatcgtgggcatggtcgggtttcacaacgctgtaggctcagcagctctcgcgaacgcacagaagggaacggatcaacaaattggttttgaaagggcagcaaaaggcttcgttgctatcaacaatactgggcagacgtggaccgtcacattcacaactggtctgcctaatggaacgtataaagacgttatccataaaaacagtgacggctcttctcctactatcattgtttccggcgggaagttttctgtgagcattgccgcatacgatgccattgccattcacgtttgacctaaagagttatgagacatgaagacgcaagtggttcacgaaacagatcgatattgatcaccaaagaggctttggtttatgtcagaaaatcgcaatgagttttgaaaactcatatgagaaaatagttctaacccaatgttctgagattttgcctttccttatgaactgggtagtccgaaagaagctattttttataatgacgtgactctgaatgatacaactgtatatttagagactcaaaactaatgattgccgatagatcaggactttgtatcttgtgtcgctctgtcgcagtgggctgtcaagctttgaacaaatgaaatcatatgttct

SEQ ID NO: 11475 - DNA, 1224 bp, Muscodor strobelii
  misc_feature: SGI cDNA ID NO. 563688
  misc_feature: Encodes the peptide sequence at SEQ ID NO 11476
atgatgtcttccgattccaatttggagagaatccgccagatcattagcaaacatcggccagacgttgagttctttcaagatctctatcttgatatacatagaaactataagctcccccacgataagtggaatccaaacagacacattgcagccttcatggcatggcagggatttcagttcatcacagatcacgaaggctgctcagtcactgctattctgtcaaacggagttggaaagaccgttctcctccgtgtcgacctgaatgtatcatggaccccggaatcgctcgacaacgtctgtgatcactatcttaacctttcatgcatgctggctgcagcaaaactcctcaagaactcccaaagcgaatggaagggcagccttgtcattgttttccaaccgaaccttggaactagtagcggtgctgaaaaattggtgcacgacggcctatatcgatttgttcccaaacccgatactgtgctaggacaacacagcggccccttcgctgctggcactctgagactccctagcggtactgcagtagcctctgccgaccacgtcaaggtcgtactccgtggcaatctaggctacactgctaatcctcaacttagcttggataccgctgtgctagcgagccgcatcgtcctcaagcttgatgaaatggtacagccgaagaatggagagcctaagatggctaatatgactgtacgtagcttcagcacgatggttgatggtgacgaggcaggatttttccatctcactgagctccgcatggacgtaagatccacctcaagactccttgtcccacggctgcgcaagctggtggtagatgaatctaaagcagcaggtgttaagcagcgcccgcggatcgaaaccactagccgtgcaccgatgatcaccaatagtgagccacacactacgatgttgcagaagtccttcactagcttctttggcggcgacaacgtggcgaatgagaccgtggaagaccaccatcacgaggacatctcgcactttgccacgcctgacggacggccctatatcttctggttcttcggcagagagccgttgcagaactttgaaggcgtgaagactagagaggagttcctggagaagatcccactcaatgagtcaccacgcaatactcctgatctccgactgtctctacagactggtatgaatgctctggcggttgcttctctcactttcttgttgcagactgaggagtga

SEQ ID NO: 11476 - protein, 407 aa, Muscodor strobelii
  misc_feature: SGI Peptide ID NO. 563688
  misc_feature (9)..(402): NCBI GI: 258570557 Blast Desc: metal-dependent amidase/aminoacylase/carboxypeptidase [Uncinocarpus reesii 1704] gi|237904352|gb|EEP78753.1| metal-dependent amidase/aminoacylase/carboxypeptidase reesii
  misc_feature (11)..(406): NCBI GI: 240109782 Blast Desc: hippurate hydrolase, [Coccidioides posadasii C735 delta SOWgp]
  misc_feature (5)..(402): NCBI GI: 169769288 Blast Desc: [Aspergillus oryzae RIB40] gi|83766972|dbj|BAE57112.1| protein product [Aspergillus oryzae]
  misc_feature (11)..(402): NCBI GI: 238501754 Blast Desc: zinc metallopeptidase, [Aspergillus flavus NRRL3357] gi|220692348|gb|EED48695.1| zinc metallopeptidase, [Aspergillus flavus NRRL3357]
  misc_feature (9)..(402): NCBI GI: 255949728 Blast Desc: Pc22g17180 [Penicillium chrysogenum Wisconsin 54-1255] gi|211592648|emb|CAP99006.1| Pc22g17180 [Penicillium chrysogenum Wisconsin 54-1255]
  misc_feature (9)..(402): NCBI GI: 171679816 Blast Desc: protein product [Podospora anserina] gi|170939534|emb|CAP64761.1| protein product [Podospora anserina]
  misc_feature (14)..(404): NCBI GI: 119470740 Blast Desc: peptidase family M20/M25/M40 protein [Neosartorya fischeri NRRL 181] gi|119406227|gb|EAW16178.1| peptidase family M20/M25/M40 protein [Neosartorya fischeri NRRL 181]
  misc_feature (11)..(402): NCBI GI: 212543545 Blast Desc: amidohydrolase, [Penicillium marneffei ATCC 18224] gi|210066834|gb|EEA20927.1| amidohydrolase, [Penicillium marneffei ATCC 18224]
  misc_feature (11)..(402): NCBI GI: 255932091 Blast Desc: Pc12g07670 [Penicillium chrysogenum Wisconsin 54-1255] gi|211582221|emb|CAP80394.1| Pc12g07670 [Penicillium chrysogenum Wisconsin 54-1255]
  misc_feature (12)..(402): NCBI GI: 115400567 Blast Desc: ATEG_06694 [Aspergillus terreus NIH2624] gi|114191538|gb|EAU33238.1| ATEG_06694 [Aspergillus terreus NIH2624]
  misc_feature (25)..(321): SWISSPROT Homolog: EC 3.5.1.32 Hippurate hydrolase
MMSSDSNLERIRQIISKHRPDVEFFQDLYLDIHRNYKLPHDKWNPNRHIAAFMAWQGFQFITDHEGCSVTAILSNGVGKTVLLRVDLNVSWTPESLDNVCDHYLNLSCMLAAAKLLKNSQSEWKGSLVIVFQPNLGTSSGAEKLVHDGLYRFVPKPDTVLGQHSGPFAAGTLRLPSGTAVASADHVKVVLRGNLGYTANPQLSLDTAVLASRIVLKLDEMVQPKNGEPKMANMTVRSFSTMVDGDEAGFFHLTELRMDVRSTSRLLVPRLRKLVVDESKAAGVKQRPRIETTSRAPMITNSEPHTTMLQKSFTSFFGGDNVANETVEDHHHEDISHFATPDGRPYIFWFFGREPLQNFEGVKTREEFLEKIPLNESPRNTPDLRLSLQTGMNALAVASLTFLLQTEE

SEQ ID NO: 11477 - DNA, 230 bp, Muscodor strobelii
  misc_feature: SGI EST ID NO. CUFF.27275.0
  misc_feature: Variant of the nucleotide sequence at SEQ ID NO 11475
gtcgtactccgtggcaatctaggctacactgctaatcctcaacttagcttggataccgctgtgctagcgagccgcatcgtcctcaagcttgatgaaatggtacagccgaagaatggagagcctaagatggctaatatgactgtacgtagcttcagcacgatggttgatggtgacgaggcaggatttttccatctcactgagctccgcatggacgtaagatccacctcaag

SEQ ID NO: 11478 - DNA, 1242 bp, Muscodor strobelii
  misc_feature: SGI cDNA ID NO. 563689
  misc_feature: Elevated expression when VOC is produced
  misc_feature: Encodes the peptide sequence at SEQ ID NO 11479
atgctggcaaagggtctactcgacgatggcgcgatggcgcatatgaaggcaatgaacaggttcaagagctacaatcggctgagtctgagcagatatactatcagccgtatcgtgtttatcttgaccgcgttctgctttgcgcttgtcatcttctacggtaccgagtttcggcggcgctcatggtcgtgcaaaacattgacttcgtgctttggcggcagatctcattcttatcagcattgggatgatgtcgaccccgactttaagctggacgtttttgaaaagacgctacacgatgggacactcatgtttcatcgccagacagtccaaaatagcagccctggcaccctattactggtgctagctcaagactcagactcctggagcaaggactaccgctcaacgaggagaaacatttacgattacttggatctgcttgtatctacaaacctggactttaccaatgtgactcttgggtttatgacatctactcgggaggagtacgagaaagcaagagacgccaccgaaaagtacccctttgcgcgtgtcgagttgtacttcaaagaagatcagggaccacaattagcatatgccgaccgtcacaaatcacatgtgcaacggcaacgccgggctcatatcgcgactttgcgcaattatttgatgctgcgcacattgcgcgatgaaagccacatcgtctggatcgacgccgacgtcgtcgaggtttcgccaaacatcgtccaaacgatgcagaaacacgcggaaaagagcctaggtgtgagtctcataacggcgttgtgtacacaaacccgagcccacaactacgataagcatacatgggcattccataaggaaactctgatcttacattcaaccgacgataaggatgagaagagtcagaagatgcttgatatattaggaactgtagcagatgaccaccgaagcgacgccgttaaagagattggccaacgacagatgtatgtccccgagcttattgagaatacgcacaacaacgacctgctccacgttgactccgtcggagccacaattctctacatgcgagcggatctcgttcgacaaggcatttcgttccccacctataacgttgtcggaacaacgtggtcaactgaaggctggtctggaatcgagactgaaggcatttgctatatggcgtctcaggtcgggcagggacatggctgtttcgtccttggtggcagccattatgtccggcatgccgatatcagctga

SEQ ID NO: 11479 - protein, 413 aa, Muscodor strobelii
  misc_feature: SGI Peptide ID NO. 563689
  misc_feature (136)..(401): NCBI GI: 260942985 Blast Desc: CLUG_04673 [Clavispora lusitaniae ATCC 42720] gi|238851081|gb|EEQ40545.1| CLUG_04673 [Clavispora lusitaniae ATCC 42720]
  misc_feature (110)..(399): NCBI GI: 50419337 Blast Desc: DEHA0C12881g [Debaryomyces hansenii CBS767]
  misc_feature (110)..(399): NCBI GI: 199430747 Blast Desc: DEHA2C11902p [Debaryomyces hansenii]
  misc_feature (116)..(393): NCBI GI: 262101327 Blast Desc: conserved [Phytophthora infestans T30-4]
  misc_feature (108)..(393): NCBI GI: 190345196 Blast Desc: PGUG_01139 [Pichia guilliermondii ATCC 6260]
  misc_feature (108)..(393): NCBI GI: 146423672 Blast Desc: PGUG_01139 [Pichia guilliermondii ATCC 6260]
  misc_feature (189)..(393): NCBI GI: 255732345 Blast Desc: conserved [Candida tropicalis MYA-3404] gi|240131382|gb|EER30942.1| conserved [Candida tropicalis MYA-3404]
  misc_feature (190)..(393): NCBI GI: 149236487 Blast Desc: LELG_04934 [Lodderomyces elongisporus NRRL YB-4239] gi|146452497|gb|EDK46753.1| LELG_04934 [Lodderomyces elongisporus NRRL YB-4239]
  misc_feature (145)..(393): NCBI GI: 68473386 Blast Desc: CaO19.13018 [Candida albicans SC5314] gi|68473619|ref|XP_719134.1| CaO19.5572 [Candida albicans SC5314] gi|46440938|gb|EAL00239.1| CaO19.5572 [Candida albicans SC5314]
  misc_feature (145)..(393): NCBI GI: 238883086 Blast Desc: conserved [Candida albicans WO-1]
  misc_feature: Useful for introducing or modulating the production of volatile compounds
MLAKGLLDDGAMAHMKAMNRFKSYNRLSLSRYTISRIVFILTAFCFALVIFYGTEFRRRSWSCKTLTSCFGGRSHSYQHWDDVDPDFKLDVFEKTLHDGTLMFHRQTVQNSSPGTLLLVLAQDSDSWSKDYRSTRRNIYDYLDLLVSTNLDFTNVTLGFMTSTREEYEKARDATEKYPFARVELYFKEDQGPQLAYADRHKSHVQRQRRAHIATLRNYLMLRTLRDESHIVWIDADVVEVSPNIVQTMQKHAEKSLGVSLITALCTQTRAHNYDKHTWAFHKETLILHSTDDKDEKSQKMLDILGTVADDHRSDAVKEIGQRQMYVPELIENTHNNDLLHVDSVGATILYMRADLVRQGISFPTYNVVGTTWSTEGWSGIETEGICYMASQVGQGHGCFVLGGSHYVRHADIS

SEQ ID NO: 11480 - DNA, 1767 bp, Muscodor strobelii
  misc_feature: SGI EST ID NO. CUFF.27278.0
  misc_feature: Variant of the nucleotide sequence at SEQ ID NO 11478
cacagctctaagtggtcaaatatcgagactgtgaacccgactgaccaaccattacagactaataacacagcgagatctcaatgctgccgctaaacacggtagtggcgaaattaagagttcttggctgcataaagagggtcttcaggggagaccgaaggcttggctctgaggccagctgaatgcttacccgcaccggcgtctgaagccaatgatccgtcaaaatggctctcattcgcttgggatttctcctatctctttgcattcaactcacgctcaccgagcgggaagattgtcattcttttgtcgttcatcttccggattcatgctggcaaagggtctactcgacgatggcgcgatggcgcatatgaaggcaatgaacaggttcaagagctacaatcggctgagtctgagcagatatactatcagccgtatcgtgtttatcttgaccgcgttctgctttgcgcttgtcatcttctacggtaccgagtttcggcggcgctcatggtcgtgcaaaacattgacttcgtgctttggcggcagatctcattcttatcagcattgggatgatgtcgaccccgactttaagctggacgtttttgaaaagacgctacacgatgggacactcatgtttcatcgccagacagtccaaaatagcagccctggcaccctattactggtgctagctcaagactcagactcctggagcaaggactaccgctcaacgaggagaaacatttacgattacttggatctgcttgtatctacaaacctggactttaccaatgtgactcttgggtttatgacatctactcgggaggagtacgagaaagcaagagacgccaccgaaaagtacccctttgcgcgtgtcgagttgtacttcaaagaagatcagggaccacaattagcatatgccgaccgtcacaaatcacatgtgcaacggcaacgccgggctcatatcgcgactttgcgcaattatttgatgctgcgcacattgcgcgatgaaagccacatcgtctggatcgacgccgacgtcgtcgaggtttcgccaaacatcgtccaaacgatgcagaaacacgcggaaaagagcctaggtgtgagtctcataacggcgttgtgtacacaaacccgagcccacaactacgataagcatacatgggcattccataaggaaactctgatcttacattcaaccgacgataaggatgagaagagtcagaagatgcttgatatattaggaactgtagcagatgaccaccgaagcgacgccgttaaagagattggccaacgacagatgtatgtccccgagcttattgagaatacgcacaacaacgacctgctccacgttgactccgtcggagccacaattctctacatgcgagcggatctcgttcgacaaggcatttcgttccccacctataacgttgtcggaacaacgtggtcaactgaaggctggtctggaatcgagactgaaggcatttgctatatggcgtctcaggtcgggcagggacatggctgtttcgtccttggtggcagccattatgtccggcatgccgatatcagctgagctggcgagtcgtgatgagcttctacttgatgaggtccagttaatgggcgtgcattgttgaatgtaattatagagtggtcgcgtagcacccaaagacttagactcggtgtccgggcgttgggagttgattatgatccccagagttgaatatatttgagattaacaacgagaaatagtggcacggccgtccgttctgactgttt

SEQ ID NO: 11481 - DNA, 831 bp, Muscodor strobelii
  misc_feature: SGI cDNA ID NO. 563690
  misc_feature: Encodes the peptide sequence at SEQ ID NO 11482
atggccgacgacctgctcaactttacgataccagactcccttacaagtgatgccctgttcggagcgccacccaatgacttctcttgcaagtcatcacataatccggtggtgatcattcacggcctcggctcaagcgcagacaccgatcttaataaattccaagaagctcttaatgaccgcggcttctgcactttttcgataacttacggtgcataccccatcctggaatgggtaggcggcttgcgcaatatgaccgagacagcgcaagaccttgcagctttcattctggaagtccaatccaaaactggcgcatctaagattgatctcgtcggtcactctgaggggggtgttcagtcactttacgttcccttaacccaagatgggatctcagagatcgtcgagcatatcgtagcacttggtccgtgtattcacggtgccccctattatgaattgaccgacttgacatacatcggtggtaatgtgactcgaaagctcatcggcgagctcatcgatgtcgttggctgccctgcatgcgagcagctcgcaaccggcggagagatcatcaaccaactcgcagccgctccttcgatttcgcagccgggaaacaaaatcactatcatcacatctacttacgacacactcgtgcctccggatgttactcgcgttgacgagccgggtgtcaataatgtgtttgtccaaacgtcttgtccagatgacaccgttggccatggcaatctcgcaacagacaagagtgtttggaatcttattgtgcaagctttacaagaaactacggacaaaatatacgattgcgagaaagcactccctatatga

SEQ ID NO: 11482 - protein, 276 aa, Muscodor strobelii
  misc_feature: SGI Peptide ID NO. 563690
  misc_feature (33)..(116): Pfam Id: PF01674 Pfam Desc: Lipase (class 2)
  misc_feature (25)..(275): NCBI GI: 67903026 Blast Desc: AN8500.2 [Aspergillus nidulans FGSC A4] gi|40747966|gb|EAA67122.1| AN8500.2 [Aspergillus nidulans FGSC A4] gi|259484449|tpe|CBF80678.1| TPA: conserved [Aspergillus FGSC
  misc_feature (25)..(270): NCBI GI: 255941350 Blast Desc: Pc16g11410 [Penicillium chrysogenum Wisconsin 54-1255] gi|211586067|emb|CAP93811.1| Pc16g11410 [Penicillium chrysogenum Wisconsin 54-1255]
  misc_feature (20)..(275): NCBI GI: 145248337 Blast Desc: An13g02820 [Aspergillus niger] gi|134081168|emb|CAK41678.1| protein product [Aspergillus niger]
  misc_feature (16)..(270): NCBI GI: 169764215 Blast Desc: [Aspergillus oryzae RIB40] gi|238504592|ref|XP_002383527.1| conserved [Aspergillus flavus NRRL3357] gi|83764433|dbj|BAE54577.1| protein product oryzae]
  misc_feature (2)..(271): NCBI GI: 212544416 Blast Desc: conserved [Penicillium marneffei ATCC 18224] gi|210065331|gb|EEA19425.1| conserved [Penicillium marneffei ATCC 18224]
  misc_feature (5)..(275): NCBI GI: 242806478 Blast Desc: conserved [Talaromyces stipitatus ATCC 10500] gi|218715376|gb|EED14798.1| conserved [Talaromyces stipitatus ATCC 10500]
  misc_feature (13)..(270): NCBI GI: 212538531 Blast Desc: conserved [Penicillium marneffei ATCC 18224] gi|210069163|gb|EEA23254.1| conserved [Penicillium marneffei ATCC 18224]
  misc_feature (25)..(275): NCBI GI: 256672258 Blast Desc: secreted lipase [Streptomyces sp. AA4]
  misc_feature (25)..(276): NCBI GI: 284029626 Blast Desc: lipase class 2 [Kribbella flavida DSM 17836] gi|283808919|gb|ADB30758.1| lipase class 2 [Kribbella flavida DSM 17836]
  misc_feature (25)..(260): NCBI GI: 284041986 Blast Desc: lipase class 2 [Conexibacter woesei DSM 14684] gi|283946207|gb|ADB48951.1| lipase class 2 [Conexibacter woesei DSM 14684]
  misc_feature (1)..(140): SWISSPROT Homolog: EC 3.1.1.3 Triacylglycerol lipase
MADDLLNFTIPDSLTSDALFGAPPNDFSCKSSHNPVVIIHGLGSSADTDLNKFQEALNDRGFCTFSITYGAYPILEWVGGLRNMTETAQDLAAFILEVQSKTGASKIDLVGHSEGGVQSLYVPLTQDGISEIVEHIVALGPCIHGAPYYELTDLTYIGGNVTRKLIGELIDVVGCPACEQLATGGEIINQLAAAPSISQPGNKITIITSTYDTLVPPDVTRVDEPGVNNVFVQTSCPDDTVGHGNLATDKSVWNLIVQALQETTDKIYDCEKALPI

SEQ ID NO: 11483 - DNA, 1587 bp, Muscodor strobelii
  misc_feature: SGI EST ID NO. CUFF.27281.0
  misc_feature: Variant of the nucleotide sequence at SEQ ID NO 11481
cggatgagaagttcgggaagcgcgttgattcaggatccttaggccagctgctgttgttgctcaagcatggggccgtgcgttaaagggactcatatgcggttgcacgagggttgcctcagtggttctcgtttccgccgtcaggttacataaggcgacaaacttcgcaccggcacaatcgctgaatttcaaatcgtcgcaatacctcgtaggtgaacatgtgacgaattttctgaaggttttcatatcaaaccgaaagaattgaatgacaagcggtagttggttcggcgtatatccgatgtggggtcccaaaaagcttcgaaggatgcattaattaatttgacagatcccactcgcccgtatcccgtcgaaccaggcccttgttctctcgtacgtacacaccgagcaccaagcaagggatgacagacaccgtgacgacacattttgagaattatacgagactgttatataagatgaagcatccgaacaaccgggatcgaggtcgggatgaaggtcgcagagcctttttttctcgctgcttccccggggtcgtcattgcgaattacagtacaacactgcgactgaacgtgtaattatggcgataatatcaagactcgctgcgtgcctggtggcttggtcctttggggtttctgcactcccaagccagcactcagcacatgccaaaatggccgacgacctgctcaactttacgataccagactcccttacaagtgatgccctgttcggagcgccacccaatgacttctcttgcaagtcatcacataatccggtggtgatcattcacggcctcggctcaagcgcagacaccgatcttaataaattccaagaagctcttaatgaccgcggcttctgcactttttcgataacttacggtgcataccccatcctggaatgggtaggcggcttgcgcaatatgaccgagacagcgcaagaccttgcagctttcattctggaagtccaatccaaaactggcgcatctaagattgatctcgtcggtcactctgaggggggtgttcagtcactttacgttcccttaacccaagatgggatctcagagatcgtcgagcatatcgtagcacttggtccgtgtattcacggtgccccctattatgaattgaccgacttgacatacatcggtggtaatgtgactcgaaagctcatcggcgagctcatcgatgtcgttggctgccctgcatgcgagcagctcgcaaccggcggagagatcatcaaccaactcgcagccgctccttcgatttcgcagccgggaaacaaaatcactatcatcacatctacttacgacacactcgtgcctccggatgttactcgcgttgacgagccgggtgtcaataatgtgtttgtccaaacgtcttgtccagatgacaccgttggccatggcaatctcgcaacagacaagagtgtttggaatcttattgtgcaagctttacaagaaactacggacaaaatatacgattgcgagaaagcactccctatatgatactggttatacattagcggcaagattgagctgatatcaatcaaaaatgactaataaaagaccaattacaagag

SEQ ID NO: 11484 - DNA, 525 bp, Muscodor strobelii
  misc_feature: SGI cDNA ID NO. 563691
  misc_feature: Encodes the peptide sequence at SEQ ID NO 11485
atgacttccacctttgtcaccgagcttctcaagcgcaatgatgcttacgtacccgaacactcgccaattcggacattcgacgagatcggattcactcccaagaagatgatcttctgttgcatcgattctcgtataaaacctgaagagttcctcggtttgaagcagggagatggagcggtcgttgtcagaactgcttctggaacccctgaacggaatctgaatgacatcgccgcaattgacaacctcacgaaactcacggagctcgttgtcatcaagcatacagattgtggcgcggagcatatgacgaatgaccagattagaaaccacatcaagagccataatcccaccatcgaacagacagttctagacaactttgtcgtcggaactacgaataatattgtggaacgaaccaaaatcgacgtccaactcatcaaagactccccgattgttcgccgagaactaaaggagaatgtcacgggcttgttgtttgatatcaagaccggaaaggtgtcgcaaatcgtttga

SEQ ID NO: 11485 - protein, 174 aa, Muscodor strobelii
  misc_feature: SGI Peptide ID NO. 563691
  misc_feature (28)..(174): Pfam Id: PF00484 Pfam Desc: Carbonic anhydrase
  misc_feature (8)..(173): NCBI GI: 242789964 Blast Desc: conserved [Talaromyces stipitatus ATCC 10500] gi|218718058|gb|EED17478.1| conserved [Talaromyces stipitatus ATCC 10500]
  misc_feature (6)..(173): NCBI GI: 242783861 Blast Desc: conserved [Talaromyces stipitatus ATCC 10500] gi|218720418|gb|EED19837.1| conserved [Talaromyces stipitatus ATCC 10500]
  misc_feature (34)..(174): NCBI GI: 126134315 Blast Desc: PICST_57799 [Pichia stipitis CBS 6054] gi|126095831|gb|ABN65653.1| [Pichia stipitis CBS 6054]
  misc_feature (6)..(173): NCBI GI: 212545609 Blast Desc: conserved [Penicillium marneffei ATCC 18224] gi|210064478|gb|EEA18573.1| conserved [Penicillium marneffei ATCC 18224]
  misc_feature (1)..(174): NCBI GI: 46119150 Blast Desc: FG04754.1 [Gibberella zeae PH-1]
  misc_feature (8)..(174): NCBI GI: 156741318 Blast Desc: carbonic anhydrase [Roseiflexus castenholzii DSM 13941] gi|156232646|gb|ABU57429.1| carbonic anhydrase [Roseiflexus castenholzii DSM 13941]
  misc_feature (34)..(173): NCBI GI: 242784727 Blast Desc: carbonic anhydrase, [Talaromyces stipitatus ATCC 10500] gi|218720597|gb|EED20016.1| carbonic anhydrase, [Talaromyces stipitatus ATCC 10500]
  misc_feature (3)..(173): NCBI GI: 220908227 Blast Desc: carbonic anhydrase [Cyanothece sp. PCC 7425] gi|219864838|gb|ACL45177.1| carbonic anhydrase [Cyanothece sp. PCC 7425]
  misc_feature (4)..(173): NCBI GI: 162449584 Blast Desc: carbonate hydratase [Sorangium cellulosum 'So ce 56'] gi|161160166|emb|CAN91471.1| carbonate hydratase [Sorangium cellulosum 'So ce 56']
  misc_feature (23)..(173): NCBI GI: 212527820 Blast Desc: carbonic anhydrase, [Penicillium marneffei ATCC 18224] gi|210073465|gb|EEA27552.1| carbonic anhydrase, [Penicillium marneffei ATCC 18224]
MTSTFVTELLKRNDAYVPEHSPIRTFDEIGFTPKKMIFCCIDSRIKPEEFLGLKQGDGAVVVRTASGTPERNLNDIAAIDNLTKLTELVVIKHTDCGAEHMTNDQIRNHIKSHNPTIEQTVLDNFVVGTTNNIVERTKIDVQLIKDSPIVRRELKENVTGLLFDIKTGKVSQIV

SEQ ID NO: 11486 - DNA, 2364 bp, Muscodor strobelii
  misc_feature: SGI cDNA ID NO. 563692
  misc_feature: Reduced expression when VOC is produced
  misc_feature: Encodes the peptide sequence at SEQ ID NO 11487
atgtcttctctccggccgctcgacaccaacgtggagaagcagaagcagacatcgctgctgtcgccgacgacgtacgacgacgacgccgtgtctctgcacagccgaagcgagcaagacaccgacagcgaagatgacgagatcctcgccgccgcccgcaacagccgcgaactgcgcgcccgcgacaggctagtgctaatggaggaggaagagatggaccagctggtgatcgactcgcgcgcacagagggaccgccagcggcgcggcagcagcctccagcgacgcggcagcaacctctccctacggaaccccatcgacatgctacggcagtacggccagacgcgcccggagtcagccatccaagactcagcagcagaccacaaccacaaccacagccacactcagtccgactacagcgagaagaggagggctcggcgaacacggcgcaagcagaagaaggaccgtcttctcagcgaggcccgcgatggcgaagacgggcagctcatgtacgagatggaaggcgggaccatcagagacggcagctcgaccggcgagagcagcgaccgagaagatagcgacgagctcgaccgccagaacctcctccgcgtgtccgaagccaagaccaagaacaggcgaaggtggtggaggtggatcttcatatatactatcatcgccgtcgcctttgcgctgttggcccttctcgcatggaaggcgtctttgcaccagaagcgcccatcatcctctcgagtcgtgagcaatggcactgctctgttcgctccgaccacactcataattagtctcgatggattccgcgccgactttctcacgcgcggattgacgccgcgtcttaatactttcatcaaagagggcgtatcgccgctctacatgacaccttctttcccgtctgtcacttttcctaatcattacacgctagccactggcttgtatccggagagccatggcgtcgttggtaacactttttgggaccctgctctagaagctgagttctattataccgatcctgaaagaagtctcgatcccaaatggtggggaggtgaaccattctgggtgacagccgagctccagggtgttagaacagctgtgcatatgtggcctggaagcgaggcccacattcataacatggaccccagctttcttgaccgatataacggcaaggagaaattgggcaagaaggtggatcgaattttggagttcctcgacaagcctggcctggaagaccctgatcttgacgttgccaattcgcggccgcaaatcattgcagcttacattccgaacgttgacgccgatggccatacttatggacccaacagtacccaaattcgcaagacgattagcaaggttgactctatgctcgacgatatttttcacggtcttgaacagcgaaacttgacccatatcgtgaacgtcattattgtctctgatcacgggatggccaccacggacgtgagccggatgatacaagtcgaagacattatcgacctcgaaaaagttgatcaccttgacgggtggccattggtcggcgttcgccctaagaaccccgaggatctggaggttttgcacaagcaagcggctgagaaagcgaagacaaatcctaattttgacgtctatctcaaagacaagaacatgccagaacgctatcatttcagcaataatgaccgtattgcgcctctttggatcgtaccgaagacggggtgggccattgttgacaaagcggagttcgatatcgaagcagccaaaaagaagaaagttacatatcacccacgtggtttacacgggtatgatcacgagcatcctctgatgagggcaatctttgttgctcgcggccctgctttccctcaccagccgcacagcaaagttgaaacatttcaaaacatcaacgtatacaacatactttgcgattcaattggcatggagcccatgccgaacaacggaactctgcgccttccgctcaaaactattggcatacatgatgcccagtctcttcctgaggaggcagaagatccagtaccgacatcgacggtcaagattgtcgctagctctgtatcgtcaatgtcaaccacgacaacagttgtatcatcatcattatcgaaaacacagcccacctcaccaatatcggtcggagtagaccctgtccaaactgaaccaattaggccaactcggcctgatcagcctgataaacctggacaaccggatgaaccagaaaagccagacgagcccgatgaaccggagcagcctgggaaaggcgaacacacgctttgggactcattcaggcagggcttcgactgggtcaaggacaaggttacgggatttatcgacaaggtcactaattcagacaaatcctcatga

SEQ ID NO: 11487 - protein, 787 aa, Muscodor strobelii
  misc_feature: SGI Peptide ID NO. 563692
  misc_feature (259)..(600): Pfam Id: PF01663 Pfam Desc: Type I phosphodiesterase / nucleotide pyrophosphatase
  misc_feature (16)..(775): NCBI GI: 46128323 Blast Desc: FG08539.1 [Gibberella zeae PH-1]
  misc_feature (1)..(783): NCBI GI: 171683847 Blast Desc: protein product [Podospora anserina] gi|170941884|emb|CAP67536.1| protein product [Podospora anserina]
  misc_feature (18)..(675): NCBI GI: 149209815 Blast Desc: MGCH7_ch7g389 [Magnaporthe grisea 70-15] gi|86196344|gb|EAQ70982.1| MGCH7_ch7g389 [Magnaporthe grisea 70-15]
  misc_feature (3)..(783): NCBI GI: 261353124 Blast Desc: ectonucleotide pyrophosphatase/phosphodiesterase family member 3 [Verticillium albo-atrum VaMs.102]
  misc_feature (18)..(675): NCBI GI: 145610191 Blast Desc: MGG_12630 [Magnaporthe grisea 70-15] gi|145017550|gb|EDK01913.1| MGG_12630 [Magnaporthe grisea 70-15]
  misc_feature (3)..(787): NCBI GI: 85074809 Blast Desc: NCU00632 [Neurospora crassa OR74A] gi|28927585|gb|EAA36536.1| NCU00632 [Neurospora crassa OR74A]
  misc_feature (4)..(786): NCBI GI: 116193105 Blast Desc: CHGG_06270 [Chaetomium globosum CBS 148.51] gi|88182183|gb|EAQ89651.1| CHGG_06270 [Chaetomium globosum CBS 148.51]
  misc_feature (17)..(775): NCBI GI: 156040856 Blast Desc: SS1G_11406 [Sclerotinia sclerotiorum 1980] gi|154695790|gb|EDN95528.1| SS1G_11406 [Sclerotinia sclerotiorum 1980]
  misc_feature (18)..(773): NCBI GI: 169775475 Blast Desc: [Aspergillus oryzae RIB40] gi|238495875|ref|XP_002379173.1| Type I phosphodiesterase / nucleotide pyrophosphatase family protein [Aspergillus flavus I /
  misc_feature (15)..(784): NCBI GI: 121716110 Blast Desc: Type I phosphodiesterase / nucleotide pyrophosphatase family protein [Aspergillus clavatus NRRL 1] gi|119403821|gb|EAW14238.1| Type I phosphodiesterase / nucleotide
  misc_feature (259)..(651): SWISSPROT Homolog: EC 3.6.1.9 Nucleotide diphosphatase
  misc_feature (259)..(651): SWISSPROT Homolog: EC 3.1.4.1 Phosphodiesterase I
  misc_feature: Useful for introducing or modulating the production of volatile compounds
MSSLRPLDTNVEKQKQTSLLSPTTYDDDAVSLHSRSEQDTDSEDDEILAAARNSRELRARDRLVLMEEEEMDQLVIDSRAQRDRQRRGSSLQRRGSNLSLRNPIDMLRQYGQTRPESAIQDSAADHNHNHSHTQSDYSEKRRARRTRRKQKKDRLLSEARDGEDGQLMYEMEGGTIRDGSSTGESSDREDSDELDRQNLLRVSEAKTKNRRRWWRWIFIYTIIAVAFALLALLAWKASLHQKRPSSSRVVSNGTALFAPTTLIISLDGFRADFLTRGLTPRLNTFIKEGVSPLYMTPSFPSVTFPNHYTLATGLYPESHGVVGNTFWDPALEAEFYYTDPERSLDPKWWGGEPFWVTAELQGVRTAVHMWPGSEAHIHNMDPSFLDRYNGKEKLGKKVDRILEFLDKPGLEDPDLDVANSRPQIIAAYIPNVDADGHTYGPNSTQIRKTISKVDSMLDDIFHGLEQRNLTHIVNVIIVSDHGMATTDVSRMIQVEDIIDLEKVDHLDGWPLVGVRPKNPEDLEVLHKQAAEKAKTNPNFDVYLKDKNMPERYHFSNNDRIAPLWIVPKTGWAIVDKAEFDIEAAKKKKVTYHPRGLHGYDHEHPLMRAIFVARGPAFPHQPHSKVETFQNINVYNILCDSIGMEPMPNNGTLRLPLKTIGIHDAQSLPEEAEDPVPTSTVKIVASSVSSMSTTTTVVSSSLSKTQPTSPISVGVDPVQTEPIRPTRPDQPDKPGQPDEPEKPDEPDEPEQPGKGEHTLWDSFRQGFDWVKDKVTGFIDKVTNSDKSS

SEQ ID NO: 11488 - DNA, 2865 bp, Muscodor strobelii
  misc_feature: SGI EST ID NO. CUFF.27329.0
  misc_feature: Variant of the nucleotide sequence at SEQ ID NO 11486
aaggcaacaaatggcctgactacccatcgttcatcataatcaacaaaacataacgtgcaatgagcgcagaggtgcgctaaatatcagccgacgatgtcttctctccggccgctcgacaccaacgtggagaagcagaagcagacatcgctgctgtcgccgacgacgtacgacgacgacgccgtgtctctgcacagccgaagcgagcaagacaccgacagcgaagatgacgagatcctcgccgccgcccgcaacagccgcgaactgcgcgcccgcgacaggctagtgctaatggaggaggaagagatggaccagctggtgatcgactcgcgcgcacagagggaccgccagcggcgcggcagcagcctccagcgacgcggcagcaacctctccctacggaaccccatcgacatgctacggcagtacggccagacgcgcccggagtcagccatccaagactcagcagcagaccacaaccacaaccacagccacactcagtccgactacagcgagaagaggagggctcggcgaacacggcgcaagcagaagaaggaccgtcttctcagcgaggcccgcgatggcgaagacgggcagctcatgtacgagatggaaggcgggaccatcagagacggcagctcgaccggcgagagcagcgaccgagaagatagcgacgagctcgaccgccagaacctcctccgcgtgtccgaagccaagaccaagaacaggcgaaggtggtggaggtggatcttcatatatactatcatcgccgtcgcctttgcgctgttggcccttctcgcatggaaggcgtctttgcaccagaagcgcccatcatcctctcgagtcgtgagcaatggcactgctctgttcgctccgaccacactcataattagtctcgatggattccgcgccgactttctcacgcgcggattgacgccgcgtcttaatactttcatcaaagagggcgtatcgccgctctacatgacaccttctttcccgtctgtcacttttcctaatcattacacgctagccactggcttgtatccggagagccatggcgtcgttggtaacactttttgggaccctgctctagaagctgagttctattataccgatcctgaaagaagtctcgatcccaaatggtggggaggtgaaccattctgggtgacagccgagctccagggtgttagaacagctgtgcatatgtggcctggaagcgaggcccacattcataacatggaccccagctttcttgaccgatataacggcaaggagaaattgggcaagaaggtggatcgaattttggagttcctcgacaagcctggcctggaagaccctgatcttgacgttgccaattcgcggccgcaaatcattgcagcttacattccgaacgttgacgccgatggccatacttatggacccaacagtacccaaattcgcaagacgattagcaaggttgactctatgctcgacgatatttttcacggtcttgaacagcgaaacttgacccatatcgtgaacgtcattattgtctctgatcacgggatggccaccacggacgtgagccggatgatacaagtcgaagacattatcgacctcgaaaaagttgatcaccttgacgggtggccattggtcggcgttcgccctaagaaccccgaggatctggaggttttgcacaagcaagcggctgagaaagcgaagacaaatcctaattttgacgtctatctcaaagacaagaacatgccagaacgctatcatttcagcaataatgaccgtattgcgcctctttggatcgtaccgaagacggggtgggccattgttgacaaagcggagttcgatatcgaagcagccaaaaagaagaaagttacatatcacccacgtggtttacacgggtatgatcacgagcatcctctgatgagggcaatctttgttgctcgcggccctgctttccctcaccagccgcacagcaaagttgaaacatttcaaaacatcaacgtatacaacatactttgcgattcaattggcatggagcccatgccgaacaacggaactctgcgccttccgctcaaaactattggcatacatgatgcccagtctcttcctgaggaggcagaagatccagtaccgacatcgacggtcaagattgtcgctagctctgtatcgtcaatgtcaaccacgacaacagttgtatcatcatcattatcgaaaacacagcccacctcaccaatatcggtcggagtagaccctgtccaaactgaaccaattaggccaactcggcctgatcagcctgataaacctggacaaccggatgaaccagaaaagccagacgagcccgatgaaccggagcagcctgggaaaggcgaacacacgctttgggactcattcaggcagggcttcgactgggtcaaggacaaggttacgggatttatcgacaaggtcactaattcagacaaatcctcatgaagcgtcgcataaaagctaggatttgtatattgggcttgtttatgtaagctacggttatgtgaggctgcttggcgttcaaggcgttattgctagactgtagtgcactagcggtatggtttgtctgtataagtccagatattgttcagggatagaccgggctatagcgtcaagctctacttttgagagcagattactgctgcaatagttggaaagcatacttaacataggctgagcagtcttgattgttatcaaacttgaagaatttctgcaagcggtttttattctatactaaagtgttgttgatgttttctgttttgaaccgaaacccgcccgcgcaggcaagcgcaaaaggaaggcacgctatcccgtcacctcgtaccttcctatcctcaagctcagtcgtcaccc

SEQ ID NO: 11489 - DNA, 1041 bp, Muscodor strobelii
  misc_feature: SGI cDNA ID NO. 563693
  misc_feature: Encodes the peptide sequence at SEQ ID NO 11490
atgaagagtcttttgcttccattaggcgtgggcttagccgccgcacttcctaccgatactccatctagaagagaggacttcccatcacttgggctatcaaatatcacacgagtcggcgtcacagacttggctgggcgctctctttctggccctcatctgggtgtggacttcccagatccttctataatatacggagatggatcatggaaagcatacggaacctcttccaacggaaagaaggtgcctgtcgcaacatcgccggacacttattcatggactttgaccggaaacgatgctttaccaaatccgggctcatgggtagatccaaatgaccagtccatctgggctcctgacgttcagaagaacgacgctggcacgtatgtcatgtactacactgcccaccagaacggcggctcgcattgcattggtgcggcaacttcaggttcggccgtaggaccttttacgccacaaagcgcgcctttgatctgcaatgccgcgggaggaggtgttatcgatgcctctggctacgacgatggagtgaatcgatggatcttatggaaggtcgacggcaatagtcttggtggtgccacgacctgtacaggaggtccgcactccggtacttacacgtcgacgccaattatgatacaacaattagctcgagatgcactcacgcttcaaggtggagcatcaaaaattcttgacaacgagggtgcatcaaatgacggtgttgtcgaagcccctgcgctttacaagatcgccgacgggaactatgttctgttctatagcgctcactgctactcaagtgacgactacgacatcgagtatgcgttctccagcacaatcaatggcgcgtataccaaccgcggtattctcctccgctctgttgacaacaagggcatctggggacctggcggtcttgatattgatcccaatggcaagtcggttgtcttccacgggcgcctgaacgctaataatggcggaggtgctcgtgagttgtacagcgctgatttgacgatcaacggacgatccatcagctattga

SEQ ID NO: 11490 - protein, 346 aa, Muscodor strobelii
  misc_feature: SGI Peptide ID NO. 563693
  misc_feature (48)..(344): Pfam Id: PF04616 Pfam Desc: Glycosyl hydrolases family 43
  misc_feature (58)..(304): Pfam Id: PF04616 Pfam Desc: Glycosyl hydrolases family 43
  misc_feature (53)..(344): NCBI GI: 242819890 Blast Desc: endo-arabinase, [Talaromyces stipitatus ATCC 10500] gi|218713871|gb|EED13295.1| endo-arabinase, [Talaromyces stipitatus ATCC 10500]
  misc_feature (53)..(343): NCBI GI: 212539021 Blast Desc: endo-arabinase, [Penicillium marneffei ATCC 18224] gi|210069408|gb|EEA23499.1| endo-arabinase, [Penicillium marneffei ATCC 18224]
  misc_feature (53)..(345): NCBI GI: 255930951 Blast Desc: Pc12g01330 [Penicillium chrysogenum Wisconsin 54-1255] gi|211581651|emb|CAP79760.1| Pc12g01330 [Penicillium chrysogenum Wisconsin 54-1255]
  misc_feature (56)..(345): NCBI GI: 238495871 Blast Desc: endo-arabinase, [Aspergillus flavus NRRL3357] gi|220694051|gb|EED50395.1| endo-arabinase, [Aspergillus flavus NRRL3357]
  misc_feature (38)..(345): NCBI GI: 238481973 Blast Desc: arabinan-endo 1,5-alpha-L-arabinase, [Aspergillus flavus NRRL3357] gi|220700275|gb|EED56613.1| arabinan-endo 1,5-alpha-L-arabinase, [Aspergillus flavus NRRL3357]
  misc_feature (56)..(345): NCBI GI: 169775479 Blast Desc: [Aspergillus oryzae RIB40] gi|83770070|dbj|BAE60205.1| protein product [Aspergillus oryzae]
  misc_feature (38)..(345): NCBI GI: 169765428 Blast Desc: [Aspergillus oryzae RIB40] gi|83765040|dbj|BAE55183.1| protein product [Aspergillus oryzae]
  misc_feature (27)..(345): NCBI GI: 121716114 Blast Desc: endo-arabinase, [Aspergillus clavatus NRRL 1] gi|119403823|gb|EAW14240.1| endo-arabinase, [Aspergillus clavatus NRRL 1]
  misc_feature (51)..(320): NCBI GI: 145609339 Blast Desc: MGG_07520 [Magnaporthe grisea 70-15] gi|145016717|gb|EDK01147.1| MGG_07520 [Magnaporthe grisea 70-15]
  misc_feature (46)..(345): NCBI GI: 115401700 Blast Desc: conserved [Aspergillus terreus NIH2624] gi|114190379|gb|EAU32079.1| conserved [Aspergillus terreus NIH2624]
MKSLLLPLGVGLAAALPTDTPSRREDFPSLGLSNITRVGVTDLAGRSLSGPHLGVDFPDPSIIYGDGSWKAYGTSSNGKKVPVATSPDTYSWTLTGNDALPNPGSWVDPNDQSIWAPDVQKNDAGTYVMYYTAHQNGGSHCIGAATSGSAVGPFTPQSAPLICNAAGGGVIDASGYDDGVNRWILWKVDGNSLGGATTCTGGPHSGTYTSTPIMIQQLARDALTLQGGASKILDNEGASNDGVVEAPALYKIADGNYVLFYSAHCYSSDDYDIEYAFSSTINGAYTNRGILLRSVDNKGIWGPGGLDIDPNGKSVVFHGRLNANNGGGARELYSADLTINGRSISY

SEQ ID NO: 11491 - DNA, 3099 bp, Muscodor strobelii
  misc_feature: SGI EST ID NO. CUFF.27300.0
  misc_feature: Variant of the nucleotide sequence at SEQ ID NO 11489
attcgatgtgccaactcaagtgcgggaacgcaccccgcgatgattacagcatagtctttctcatcacgcgacgcaacagaacagagcagtgatatcacgatgcatgcattctaacgtcatgcagtactaaaatatctgcgactttctgtcatcgaacctaggagggctatgcattccttcgcagcctgcttcaatcctctgccgttcggcccgcaacattgtcgagcagcacgacataccaaatttcattctttttgcaagtgattaatcaccacctagttagattactcggagcacaggaagggcaaacaattaaaggcatgaaacatgctaacaaagccccataggggttgtcacatattgattgctaggtcaaataaacttaaagtaataagatgcatactatcaaggcgcttctcgaccttggacggagggtgtggagcacaatctgctccacgcctccgcgatccttgggccccatctcggacgacgacggacgaggcgggctcctctgcccagtcctagagctgcatcagcccagcgactgttttggcaggagatttggcatgacggcatggcggcatgactattggccatcttcaggactttatgtaacgtggttctcgatgttgggccgtatagagtcggctctctcatcctcgacggctaaatgagggcggtggtatcggctccgcttactaccccttgaactcctcacgctgtgacgccgttattaccgtatgagctgccatcctagcggcatcatctcggcgacgtctccgcagacatgctacgtgtgaataaattgtaatagtgagttcattcgacctagcagcctagcgtcgacagcatgatgagttataagtgcccttgctgccgtgaatccaagtcatggatagatttaagggccgttcatcttgcgtcaaccagcaagccttgagaacatcactcacattcaccatgaagagtcttttgcttccattaggcgtgggcttagccgccgcacttcctaccgatactccatctagaagagaggacttcccatcacttgggctatcaaatatcacacgagtcggcgtcacagacttggctgggcgctctctttctggccctcatctgggtgtggacttcccagatccttctataatatacggagatggatcatggaaagcatacggaacctcttccaacggaaagaaggtgcctgtcgcaacatcgccggacacttattcatggactttgaccggaaacgatgctttaccaaatccgggctcatgggtagatccaaatgaccagtccatctgggctcctgacgttcagaagaacgacgctggcacgtatgtcatgtactacactgcccaccagaacggcggctcgcattgcattggtgcggcaacttcaggttcggccgtaggaccttttacgccacaaagcgcgcctttgatctgcaatgccgcgggaggaggtgttatcgatgcctctggctacgacgatggagtgaatcgatggatcttatggaaggtcgacggcaatagtcttggtggtgccacgacctgtacaggaggtccgcactccggtacttacacgtcgacgccaattatgatacaacaattagctcgagatgcactcacgcttcaaggtggagcatcaaaaattcttgacaacgagggtgcatcaaatgacggtgttgtcgaagcccctgcgctttacaagatcgccgacgggaactatgttctgttctatagcgctcactgctactcaagtgacgactacgacatcgagtatgcgttctccagcacaatcaatggcgcgtataccaaccgcggtattctcctccgctctgttgacaacaagggcatctggggacctggcggtcttgatattgatcccaatggcaagtcggttgtcttccacgggcgcctgaacgctaataatggcggaggtgctcgtgagttgtacagcgctgatttgacgatcaacggacgatccatcagctattgatgtatcttggacacgatttgatccttgtatataggtcatattcttttggatagataccctcattgctgattggcagacactttttatctgcaaccagtgttggacactttcatgtatatatgaccccagataagatagggacacgacacataggacgataatggtgaacgtattgtacatatctgacaaccaatatacatataacgaaaaattttctgtgtttctctcaaattctgtcgtgtatttggtccatctctgattaatgcggtgctctactattgcgccgactaggtaatggggtatactgataaaagccacgagctgatacactgcacgtaccagacctgaacacactctgcctcatgtgacgcaactagtattgtggacgcggagtgcaagtctaccgaatgactttcaatctcttacctgacggtaactagcggaatatcaatttctagattcaatcgaactatatctcctctgtaacgtcttgttaatatacccgtgcgaaccaatgggattgaggatggccgagcagaacatcgatctcctaaatcgccacttaaagggatatgtctttcggatctcgttgggatcaatatcatcagatgatagtagcctcttgcactgtcgctaagtctaagctttgtatgaaggtcgtctctacggggatatttagctgtatgtcgtgctggttgagtcggcattaccacaataatgcatcactctaaaccgcgactttgtctccttaaacatagatgcgagatgttaagtacatggttacaaataatatggtggcggtggttctgttccgacctcgggtaatggaattggttcagaacatccgtagtgcgcaccggagcaagttggtgctgggtcaaacggagaagagcagctgatttctaaggaagaggttgctagagccactgcagtcggatccaattcaggagaaaagctgataattggttgaaagcttggatcagtagggcatggatcgttaccacgaggagaattaaatctcgatcccaactccgtggcttcagaaccggaggtatcgtatagagggatgatatcgccagggggcagttctggtctcgg

SEQ ID NO: 11492 - DNA, 1485 bp, Muscodor strobelii
  misc_feature: SGI cDNA ID NO. 563694
  misc_feature: Encodes the peptide sequence at SEQ ID NO 11493
atggacactcccgcattagatatcctccgcgcgacagctgcagaactacgaaacgatctggagactaggcggcttaccagcgttcagcttgtcgagaaatgtctcgcacagattgaacgctacgattcaactctgaatgctctggcgtttattgcgcctcgggaaatcgcaatacgtgttgcgcaggaactggatcaagaaaggcagaagggccatctgcgcagttctttgcatgggattcccgtcatcttaaaggactgcttcgtcactgcgtccgatcttggcatgccaacctgcgcgggtgccgtggccttcgcaaatgcaaaagctagtagaaacggcgcgattgtccagaaactcatcgattctgggctcatccttatcggaaaggcaaacatgacagagctctcaggcatgaagacggtaactatgatgccaggatggtcagcacatggcggccagacaatctcgccttacgtagggaagatcagagaacacgaaaggctcttggggcattcggctcctggcggttcatcaactggctcagctgtttccgtcgcagcaggatacgctccgatcgcaatgggagcagacacgatcgggtctatcgtcacgccttcgattcgcacgggtctttacgcacttaagccaactgtcggtgcgcagaatacaagcggtctctaccgcttatcagaattttatgatgctccaggaccaatggcaaaatgtgcttcggatttaatggatctgtcacagatccttcttgaccgtcaactgcgctcatctgctggctgggatggactctcgctagcatttgtagatcctgtgaagtgggctatggcggaggagatgtgtgagcagtttgaagatacagctcagcagatggtagaagaatacgaagcagcgatatccgagattcgaatgttgacagacaatgtcaaatatcctgtcgagatagcagagatctcggagctagtactggacggtcaagccgtaatcatggacatagcgtattgggatttcaagaatatcactatacccgaattcatcaccaatttcgagaaatgttctgttcgcaatctgaacgatatcatcgaattcaataatcagaacctgaaagaagcaatgcctgagccgtaccctggccaagaccagttgatcaaggcaaatgagtttactcaaagctcggaacacattgccgatatcaaacgcagatttcgcgcgcatgcacaacatgtcctcgagaagacattcgaagccgcaaatgccaacgtgattgtcgctccgggcgactcgccgttctgcattcatgctgcagcagctggctatcccattgccaccgtgccgctgggacagcttcgatataatggtcgaccgttcgggctctgtctattagctaaagaaaatcgcgaagacctactcttgcagtttgcaactgctttcgaacagcttctacccccacgggtagtaccaccgctttcatga

SEQ ID NO: 11493 - protein, 494 aa, Muscodor strobelii
  misc_feature: SGI Peptide ID NO. 563694
  misc_feature (29)..(475): Pfam Id: PF01425 Pfam Desc: Amidase
  misc_feature (29)..(137): Pfam Id: PF01425 Pfam Desc: Amidase
  misc_feature (175)..(247): Pfam Id: PF01425 Pfam Desc: Amidase
  misc_feature (4)..(494): NCBI GI: 169621007 Blast Desc: SNOG_13707 [Phaeosphaeria nodorum SN15] gi|160704155|gb|EAT78731.2| SNOG_13707 [Phaeosphaeria nodorum SN15]
  misc_feature (6)..(492): NCBI GI: 116205451 Blast Desc: CHGG_10609 [Chaetomium globosum CBS 148.51] gi|88176737|gb|EAQ84205.1| CHGG_10609 [Chaetomium globosum CBS 148.51]
  misc_feature (5)..(493): NCBI GI: 242770741 Blast Desc: amidase, [Talaromyces stipitatus ATCC 10500] gi|218725237|gb|EED24654.1| amidase, [Talaromyces stipitatus ATCC 10500]
  misc_feature (7)..(493): NCBI GI: 256723754 Blast Desc: NECHADRAFT_52302 [Nectria haematococca mpVI 77-13-4]
  misc_feature (5)..(488): NCBI GI: 116200662 Blast Desc: CHGG_10876 [Chaetomium globosum CBS 148.51] gi|88175590|gb|EAQ83058.1| CHGG_10876 [Chaetomium globosum CBS 148.51]
  misc_feature (7)..(493): NCBI GI: 145234599 Blast Desc: An03g00410 [Aspergillus niger] gi|134057619|emb|CAK38019.1| protein product [Aspergillus niger]
  misc_feature (4)..(491): NCBI GI: 212546065 Blast Desc: amidase family protein [Penicillium marneffei ATCC 18224] gi|210064706|gb|EEA18801.1| amidase family protein [Penicillium marneffei ATCC 18224]
  misc_feature (6)..(493): NCBI GI: 256727338 Blast Desc: NECHADRAFT_76112 [Nectria haematococca mpVI 77-13-4]
  misc_feature (5)..(493): NCBI GI: 242775196 Blast Desc: glutamyl-tRNA(gln) amidotransferase subunit A, [Talaromyces stipitatus ATCC 10500] gi|218722214|gb|EED21632.1| glutamyl-tRNA(gln) amidotransferase subunit A, [Talaromyces ATCC
  misc_feature (6)..(492): NCBI GI: 256722562 Blast Desc: NECHADRAFT_85341 [Nectria haematococca mpVI 77-13-4]
  misc_feature (11)..(491): SWISSPROT Homolog: EC 3.5.1.4 Amidase
MDTPALDILRATAAELRNDLETRRLTSVQLVEKCLAQIERYDSTLNALAFIAPREIAIRVAQELDQERQKGHLRSSLHGIPVILKDCFVTASDLGMPTCAGAVAFANAKASRNGAIVQKLIDSGLILIGKANMTELSGMKTVTMMPGWSAHGGQTISPYVGKIREHERLLGHSAPGGSSTGSAVSVAAGYAPIAMGADTIGSIVTPSIRTGLYALKPTVGAQNTSGLYRLSEFYDAPGPMAKCASDLMDLSQILLDRQLRSSAGWDGLSLAFVDPVKWAMAEEMCEQFEDTAQQMVEEYEAAISEIRMLTDNVKYPVEIAEISELVLDGQAVIMDIAYWDFKNITIPEFITNFEKCSVRNLNDIIEFNNQNLKEAMPEPYPGQDQLIKANEFTQSSEHIADIKRRFRAHAQHVLEKTFEAANANVIVAPGDSPFCIHAAAAGYPIATVPLGQLRYNGRPFGLCLLAKENREDLLLQFATAFEQLLPPRVVPPLS

SEQ ID NO: 11494 - DNA, 1850 bp, Muscodor strobelii
  misc_feature: SGI EST ID NO. CUFF.27323.0
  misc_feature: Variant of the nucleotide sequence at SEQ ID NO 11492
agacaatctcgccttacgtagggaagatcagagaacacgaaaggctcttggggcattcggctcctggcggttcatcaactggctcagctgtttccgtcgcagcaggatacgctccgatcgcaatgggagcagacacgatcgggtctatcgtcacgccttcgattcgcacgggtctttacgcacttaagccaactgtcggtgcgcagaatacaagcggtctctaccgcttatcagaattttatgatgctccaggaccaatggcaaaatgtgcttcggatttaatggatctgtcacagatccttcttgaccgtcaactgcgctcatctgctggctgggatggactctcgctagcatttgtagatcctgtgaagtgggctatggcggaggagatgtgtgagcagtttgaagatacagctcagcagatggtagaagaatacgaagcagcgatatccgagattcgaatgttgacagacaatgtcaaatatcctgtcgagatagcagagatctcggagctagtactggacggtcaagccgtaatcatggacatagcgtattgggatttcaagaatatcactatacccgaattcatcaccaatttcgagaaatgttctgttcgcaatctgaacgatatcatcgaattcaataatcagaacctgaaagaagcaatgcctgagccgtaccctggccaagaccagttgatcaaggcaaatgagtttactcaaagctcggaacacattgccgatatcaaacgcagatttcgcgcgcatgcacaacatgtcctcgagaagacattcgaagccgcaaatgccaacgtgattgtcgctccgggcgactcgccgttctgcattcatgctgcagcagctggctatcccattgccaccgtgccgctgggacagcttcgatataatggtcgaccgttcgggctctgtctattagctaaagaaaatcgcgaagacctactcttgcagtttgcaactgctttcgaacagcttctacccccacgggtagtaccaccgctttcatgagagtcagcatcggaatgtgggtgtttcttgtttcttgccattcagcgaggttttaggctgggctcttcaaatgtcgaggcgatgccatatcgcacatgattcgtggtgggcacaaacctccggtgtatcccaagattcaggcacgttcttgaccctgggattatggaggcattatagacgaacgtgtgatatacaatatacactacgataatgtatccctcttttcattgtgttccacgagcgagtggatgacgttgatatgggctgtaaccgcgtcaagatggacggccgattttcattagacacataatgtccccatgtacactacggatgcggattagtacattgtcaatgcaatattgcggacattggcaatgttgtgaggaatttggttgagacgcgtaggcacgtcacctccagtcctggctttgatttgtaaccaactcgccaacgtatttcggagtccggagagcatgtaagaatgaagagaaccttggaagctggaggccagttgctcgtacatggacttaagcgtcccaagagccttgacgattagtaggtggcatcgaccgactgccgacattagatgcatttgcgattaccttgcctggatatgcccgcgcccttggatgatctgattgtgtttctcttgtttcatcttttgaccaatggaacttggcagcgacagaaatgctttgatccccacagctctaagccgcgtgggtaggcgcgaagaatcgtttaacacagtcgagattccgaatgaaggcgttgctaagtatcggcgagagtgaatttggaagggcgccagctctttggtgtcgc

SEQ ID NO: 11495 - DNA, 1083 bp, Muscodor strobelii
  misc_feature: SGI cDNA ID NO. 563695
  misc_feature: Encodes the peptide sequence at SEQ ID NO 11496
atgtcttcacctcgtttgatttcagtgatcggcggcacaggtgcccagggcattcccattataaaggctcttgtcgagtcgggcgattatacagtccgcgctctgacccgcgatacttctaatgctcgattcaaggagctgcaatcctttggtcctgtcgaaggactggaaggaagcttcgcctctgagcagaatctccgagccttgttcaagggcgcgtggggcgccttcgtgaacatcgatggcttcaacgctggagagatgatggaactgtactggactatccgtgcctgggaactcgctattgaggcaggcgtcaagttcttcgtccttggacatctcgattatgcttacaagctttctgatttcaaaatccacgccggacactacgacgccaaaggtcgcgcaggcgctttcattctctctcagaacgccgaccctgcagtgtcgtcacgcatgcgttccgccctcttcacaaccggcccctacatcgagatgaccctctccgccggcacaccactctctccattcatcgaagatggagtagccacttggcgcgtgccgctcgcctcgggagccatccctttcaccgcactcgcagattgcggtgtctacgtgaaacacctcttcgaccaccctgaccaatcttcaggcgttgaacttgaatccgccgtttctcacgtcactatgtccgagtatgttgaagccttccaaaaggtcactgacaagcccgctcaatggatcgatgtgcccctcaacgacgaccatttgacgagaatgtttggccctttcgctgatacgcctgcgggctataacgccgctgctggtagtatgagcgttcgtcagaatttcactgcattctacgagattttccgagccagtggcgggaacaagggcgttttgaagaggaactatggggtgatggataaggtgcatcctaatagaattaagagtgtggaggagtggctgaggagagaggataaggagggacgggaaaagggactgggtgggttgtgggataggttggtgaacttgaggcctgtgctgaagatcgccgaggatgggagaacagggtctatctag

SEQ ID NO: 11496 - protein, 360 aa, Muscodor strobelii
  misc_feature: SGI Peptide ID NO. 563695
  misc_feature (7)..(246): Pfam Id: PF05368 Pfam Desc: NmrA-like family
  misc_feature (7)..(88): Pfam Id: PF05368 Pfam Desc: NmrA-like family
  misc_feature (5)..(359): NCBI GI: 256724489 Blast Desc: NECHADRAFT_97965 [Nectria haematococca mpVI 77-13-4]
  misc_feature (1)..(355): NCBI GI: 171694626 Blast Desc: protein product [Podospora anserina] gi|170947555|emb|CAP59716.1| protein product [Podospora anserina]
  misc_feature (3)..(360): NCBI GI: 156044180 Blast Desc: SS1G_10193 [Sclerotinia sclerotiorum 1980] gi|154694582|gb|EDN94320.1| SS1G_10193 [Sclerotinia sclerotiorum 1980]
  misc_feature (1)..(360): NCBI GI: 170736820 Blast Desc: NmrA family protein [Burkholderia cenocepacia MC0-3] gi|254249455|ref|ZP_04942775.1| BCPG_04319 [Burkholderia cenocepacia PC184] gi|124875956|gb|EAY65946.1| BCPG_04319 PC184]
  misc_feature (6)..(360): NCBI GI: 256723024 Blast Desc: NECHADRAFT_52693 [Nectria haematococca mpVI 77-13-4]
  misc_feature (6)..(339): NCBI GI: 261355112 Blast Desc: NmrA family protein [Verticillium albo-atrum VaMs.102]
  misc_feature (5)..(360): NCBI GI: 46126863 Blast Desc: FG07809.1 [Gibberella zeae PH-1]
  misc_feature (7)..(358): NCBI GI: 156032375 Blast Desc: SS1G_13885 [Sclerotinia sclerotiorum 1980] gi|154699287|gb|EDN99025.1| SS1G_13885 [Sclerotinia sclerotiorum 1980]
  misc_feature (7)..(360): NCBI GI: 242815324 Blast Desc: conserved [Talaromyces stipitatus ATCC 10500] gi|218714884|gb|EED14307.1| conserved [Talaromyces stipitatus ATCC 10500]
  misc_feature (7)..(360): NCBI GI: 169627584 Blast Desc: MAB_0480 [Mycobacterium abscessus ATCC 19977] gi|169239551|emb|CAM60579.1| Conserved (NmrA-like) [Mycobacterium abscessus]
MSSPRLISVIGGTGAQGIPIIKALVESGDYTVRALTRDTSNARFKELQSFGPVEGLEGSFASEQNLRALFKGAWGAFVNIDGFNAGEMMELYWTIRAWELAIEAGVKFFVLGHLDYAYKLSDFKIHAGHYDAKGRAGAFILSQNADPAVSSRMRSALFTTGPYIEMTLSAGTPLSPFIEDGVATWRVPLASGAIPFTALADCGVYVKHLFDHPDQSSGVELESAVSHVTMSEYVEAFQKVTDKPAQWIDVPLNDDHLTRMFGPFADTPAGYNAAAGSMSVRQNFTAFYEIFRASGGNKGVLKRNYGVMDKVHPNRIKSVEEWLRREDKEGREKGLGGLWDRLVNLRPVLKIAEDGRTGSI

SEQ ID NO: 11497 - DNA, 255 bp, Muscodor strobelii
  misc_feature: SGI EST ID NO. CUFF.27316.0
  misc_feature: Variant of the nucleotide sequence at SEQ ID NO 11495
gggcgcgtggggcgccttcgtgaacatcgatggcttcaacgctggagagatgatggaactgtactggactatccgtgcctgggaactcgctattgaggcaggcgtcaagttcttcgtccttggacatctcgattatgcttacaagctttctgatttcaaaatccacgccggacactacgacgccaaaggtcgcgcaggcgctttcattctctctcagaacgccgaccctgcagtgtcgtcacgcatgcgttccgc

SEQ ID NO: 11498 - DNA, 609 bp, Muscodor strobelii
  misc_feature: SGI cDNA ID NO. 563696
  misc_feature: Encodes the peptide sequence at SEQ ID NO 11499
atgtctctccagaacgctcgcgttgtcaagtccgaaccgctccaccaggacggtcaatggatcaaaaccgttaagctcacttacattgacccaaacggcaaggagcgcacatgggagtctgccgaacgtaccactcgctcgaagggcggcgttgatggcgtcggaattgtggttctctttgatcttccaactggcacggagattctcctccagaaacaattccgccctcctcttggcaagattgccatcgaactccctgctggactcattgacgagggtgagactatccaacaggccgccgagcgtgagcttaaggaagagtctggctatgtcggtacagtcacagaaacttccccgatcatgtacaatgatcccggcattaccaacaccaacacggccatctgcaccgtgcgcatcgacatgtctcatccagacaatcagaaccctctcgcaaacttagaagaggatgagttcatcgagcccttccttactccggtcgcctctctttaccaaaaggttaaggaattcgaacgcgatggatacgctattgacgctcgtgttggttcctttgctcagggaattgaattggcccagaacatgaagctctga

SEQ ID NO: 11499 - protein, 202 aa, Muscodor strobelii
  misc_feature: SGI Peptide ID NO. 563696
  misc_feature (52)..(188): Pfam Id: PF00293 Pfam Desc: NUDIX domain
  misc_feature (1)..(202): NCBI GI: 70998168 Blast Desc: MutT/nudix family protein [Aspergillus fumigatus Af293] gi|66851448|gb|EAL91774.1| MutT/nudix family protein [Aspergillus fumigatus Af293] gi|159126453|gb|EDP51569.1| family
  misc_feature (17)..(202): NCBI GI: 145610326 Blast Desc: MGG_12661 [Magnaporthe grisea 70-15] gi|145017648|gb|EDK02011.1| MGG_12661 [Magnaporthe grisea 70-15]
  misc_feature (6)..(202): NCBI GI: 145235367 Blast Desc: An03g04510 [Aspergillus niger] gi|134058014|emb|CAK38243.1| protein product [Aspergillus niger]
  misc_feature (6)..(202): NCBI GI: 121713226 Blast Desc: MutT/nudix family protein [Aspergillus clavatus NRRL 1] gi|119402377|gb|EAW12798.1| MutT/nudix family protein [Aspergillus clavatus NRRL 1]
  misc_feature (16)..(202): NCBI GI: 115433522 Blast Desc: ADP-ribose pyrophosphatase [Aspergillus terreus NIH2624] gi|114189750|gb|EAU31450.1| ADP-ribose pyrophosphatase [Aspergillus terreus NIH2624]
  misc_feature (16)..(202): NCBI GI: 259484057 Blast Desc: TPA: MutT/nudix family protein (AFU_orthologue; AFUA_5G08240) [Aspergillus nidulans FGSC A4]
  misc_feature (3)..(202): NCBI GI: 226280612 Blast Desc: ADP-ribose pyrophosphatase [Paracoccidioides brasiliensis Pb01]
  misc_feature (16)..(202): NCBI GI: 67901448 Blast Desc: AN7711.2 [Aspergillus nidulans FGSC A4] gi|40742036|gb|EAA61226.1| AN7711.2 [Aspergillus nidulans FGSC A4]
  misc_feature (3)..(196): NCBI GI: 225678392 Blast Desc: ADP-ribose pyrophosphatase [Paracoccidioides brasiliensis Pb03] gi|226290549|gb|EEH46033.1| ADP-ribose pyrophosphatase [Paracoccidioides brasiliensis Pb18]
  misc_feature (6)..(202): NCBI GI: 255949520 Blast Desc: Pc22g16110 [Penicillium chrysogenum Wisconsin 54-1255] gi|211592544|emb|CAP98899.1| Pc22g16110 [Penicillium chrysogenum Wisconsin 54-1255]
  misc_feature (4)..(202): SWISSPROT Homolog: EC 3.6.1.13 ADP-ribose diphosphatase
MSLQNARVVKSEPLHQDGQWIKTVKLTYIDPNGKERTWESAERTTRSKGGVDGVGIVVLFDLPTGTEILLQKQFRPPLGKIAIELPAGLIDEGETIQQAAERELKEESGYVGTVTETSPIMYNDPGITNTNTAICTVRIDMSHPDNQNPLANLEEDEFIEPFLTPVASLYQKVKEFERDGYAIDARVGSFAQGIELAQNMKL

SEQ ID NO: 11500 - DNA, 1659 bp, Muscodor strobelii
  misc_feature: SGI EST ID NO. CUFF.27319.1
  misc_feature: Variant of the nucleotide sequence at SEQ ID NO 11498
tccacctccaatactaagcgcgttggtgccgaagatgcgatatcaacttcaactgaatgcgcccaagttggtttggcagaggtttgctatcgttatcggaggccatctcagagacctggttgcgtgtctctaaacttacaggagattgcggtgagcgcaggcgacgtggccagcgttgaagggcttgcccctgagcacccttatttgacgagtttgctctcgcaccccacaactcgccgcccactgcaactgttgcttagcgcaaactggcagagacaacacacagcacaaaatcacaacattcgccgtgccttccacgcgtcttgccgtgaacttcttcatcctctccttttgccgttgtttgttgatttcggcgtttcttttcatctcattgacaacccttcacactcttttgcgtgcttatatgaagcatcgccaactgtcgccaacaccaccttacatatccttaacggtcactaccattgatctcattagccacgatgtctctccagaacgctcgcgttgtcaagtccgaaccgctccaccaggacggtcaatggatcaaaaccgttaagctcacttacattgacccaaacggcaaggagcgcacatgggagtctgccgaacgtaccactcgctcgaagggcggcgttgatggcgtcggaattgtggttctctttgatcttccaactggcacggagattctcctccagaaacaattccgccctcctcttggcaagattgccatcgaactccctgctggactcattgacgagggtgagactatccaacaggccgccgagcgtgagcttaaggaagagtctggctatgtcggtacagtcacagaaacttccccgatcatgtacaatgatcccggcattaccaacaccaacacggccatctgcaccgtgcgcatcgacatgtctcatccagacaatcagaaccctctcgcaaacttagaagaggatgagttcatcgagcccttccttactccggtcgcctctctttaccaaaaggttaaggaattcgaacgcgatggatacgctattgacgctcgtgttggttcctttgctcagggaattgaattggcccagaacatgaagctctgattcacaaccgattaatcatcttcatggactctgattcgtcatgcatgcatgcagctggtgaggtgacagcacggataaggcagtgttgtagtggaagacgggagtggccaatcaggcctgcgattactcatcagaaaaacctcggtaccgctctcgcagaaaacaattactgatcgccgtttgaaaaaggactggacagccaccagcaaactccaaggcattgattatagaataatcatcaggattgtctttggcacttgtagaggaattgacgatagctgtagctttggaatcatgtgtggccatgatgtctatataactcctggatctcgccagggaatagcattgaggagaaaaaaaggcatcactaagaaaacatcagcagatacgcagcacagtccaaaaacacgaataaaagttcttctaagctcacaatcataatgtcttcacctcgtttgatttcagtgatcggcggcacaggtgcccagggcattcccattataaaggctcttgtcgagtcgggcgattatacagtccgcgctctgacccg

SEQ ID NO: 11501 - DNA, 1467 bp, Muscodor strobelii
  misc_feature: SGI cDNA ID NO. 563697
  misc_feature: Encodes the peptide sequence at SEQ ID NO 11502
atgtctgacgacgacttcatgcaggagtccgatgaggagcagtatgacttcgagtacgaggaggatgatgaggaggactcgggtgatgtcgacattgagaacaagtactacaatgccaagcagatgagagagacagagcccgaagaggcaatcgatgaattcttgggcatacctgcacttgagcccgagaagggcgactggggtttcaagggtctgaagcaggccatcaagacagagttccgactcgccagatatgacaaggctgtggagcactacaccgaacttcttacctatgtcaagtccgctgtcacccgcaactactcggaaaagtctattaacaatatgctggatttcatcgagaaggagtcggagaacgaggcagcccagaagtgcatggaacaattctatgccttgaccttgacctgcttccagagcaccaataacgagcgactatggctcaagaccaacatcaaacttgcgaagctcctcctggaccgcaagcagtaccagtccgcaactaagaagctgcgagagctgcagaagtcatgtcaacgtgaagatggtaccgacgaccctagcaagggtacttactcgcttgagatgtacgcccttgagatccagatgtgcgccgagactcacaacaacaagcaactcaaactactataccaaaaggctctcaaggtgcgctccgccgtgccccatcccaagatcatgggcattattcgtgaatgcggtggcaagatgcacatgagcgaggaaaactggaaggatgcccagagtgattttttcgagtcgttccgcaacttcgacgaggccggatccctgcagcgtatccaagttctaaagtatctgttgcttaccactatgctcatgcgatctgacatcaaccccttcgactcccaagagaccaaaccctaccggaatgacccccgtatcgccgccatgacggagctggtggatgcctatcagagagatgacatgcaccaatatgtcaaggtgttaaagaacaatcaggacatcttagcagaccccttcattgccgagaatatcgacgaagtcacccgtaatgtgaggactaaggctgttgtcaaactgatcgccccctacacgagaatgaagctgggttggattgccaaacagatcaatatctccgagtcggaagtacaggacattcttggcttcttgattgtggatggcaagatcaagggcaaaatcgaccagcagacaggcatcctcgagatcgaatctggtgtggatgccgaccgaatccaggctctcgacgcatgggccgaggctctcggtggactctatgctaccgtattcaaggatagtgaagggttccgtatcgttgataccacgcataccgacgatgtaatgccgatgggctccgatcctgctttgagagttggacgaccgggcaacaagaatctacgcaataaagccatgaagggtatggccggagcttga

SEQ ID NO: 11502 - protein, 488 aa, Muscodor strobelii
  misc_feature: SGI Peptide ID NO. 563697
  misc_feature (313)..(416): Pfam Id: PF01399 Pfam Desc: PCI domain
  misc_feature (1)..(476): NCBI GI: 46105108 Blast Desc: FG00182.1 [Gibberella zeae PH-1]
  misc_feature (1)..(457): NCBI GI: 256731961 Blast Desc: [Nectria haematococca mpVI 77-13-4]
  misc_feature (3)..(476): NCBI GI: 212544642 Blast Desc: COP9 signalosome subunit 2 (CsnB), [Penicillium marneffei ATCC 18224] gi|210065444|gb|EEA19538.1| COP9 signalosome subunit 2 (CsnB), [Penicillium marneffei ATCC 18224]
  misc_feature (1)..(448): NCBI GI: 119192204 Blast Desc: conserved [Coccidioides immitis RS]
  misc_feature (1)..(448): NCBI GI: 240106182 Blast Desc: COP9 signalosome complex subunit 2, [Coccidioides posadasii C735 delta SOWgp]
  misc_feature (3)..(463): NCBI GI: 242813059 Blast Desc: COP9 signalosome subunit 2 (CsnB), [Talaromyces stipitatus ATCC 10500] gi|218714428|gb|EED13851.1| COP9 signalosome subunit 2 (CsnB), [Talaromyces stipitatus ATCC 10500]
  misc_feature (1)..(447): NCBI GI: 39969429 Blast Desc: MGG_10325 [Magnaporthe grisea 70-15] gi|149211289|ref|XP_001523019.1| MGCH7_ch7g1103 [Magnaporthe grisea 70-15] gi|86197058|gb|EAQ71696.1| MGCH7_ch7g1103 grisea
  misc_feature (1)..(462): NCBI GI: 261353773 Blast Desc: COP9 signalosome complex subunit 2 [Verticillium albo-atrum VaMs.102]
  misc_feature (3)..(448): NCBI GI: 145245303 Blast Desc: An11g09610 [Aspergillus niger] gi|134079618|emb|CAK40834.1| protein product [Aspergillus niger]
  misc_feature (3)..(448): NCBI GI: 121704852 Blast Desc: COP9 signalosome subunit 2 (CsnB), [Aspergillus clavatus NRRL 1] gi|119398835|gb|EAW09263.1| COP9 signalosome subunit 2 (CsnB), [Aspergillus clavatus NRRL 1]
MSDDDFMQESDEEQYDFEYEEDDEEDSGDVDIENKYYNAKQMRETEPEEAIDEFLGIPALEPEKGDWGFKGLKQAIKTEFRLARYDKAVEHYTELLTYVKSAVTRNYSEKSINNMLDFIEKESENEAAQKCMEQFYALTLTCFQSTNNERLWLKTNIKLAKLLLDRKQYQSATKKLRELQKSCQREDGTDDPSKGTYSLEMYALEIQMCAETHNNKQLKLLYQKALKVRSAVPHPKIMGIIRECGGKMHMSEENWKDAQSDFFESFRNFDEAGSLQRIQVLKYLLLTTMLMRSDINPFDSQETKPYRNDPRIAAMTELVDAYQRDDMHQYVKVLKNNQDILADPFIAENIDEVTRNVRTKAVVKLIAPYTRMKLGWIAKQINISESEVQDILGFLIVDGKIKGKIDQQTGILEIESGVDADRIQALDAWAEALGGLYATVFKDSEGFRIVDTTHTDDVMPMGSDPALRVGRPGNKNLRNKAMKGMAGA

SEQ ID NO: 11503 - DNA, 2103 bp, Muscodor strobelii
  misc_feature: SGI EST ID NO. CUFF.27338.0
  misc_feature: Variant of the nucleotide sequence at SEQ ID NO 11501
ccccaccaaccgtaagcctcaccccacagcttcgtgtcattcatcccagttgacctcatcttccaattcctttcctagactgcggtcgatgttgtactaataattgttattcttcccgcctgcaacttatgagtcgttcatctggttaatcacaaataagcgagatcttagctagagtctgaatcagaagatcagtcagaatagaaaacacacactagccgtccactggttgcatcacactttcctcagtcatccttacgacctaccacatattcggcaacctctagcaacctgcaatcatgtctgacgacgacttcatgcaggagtccgatgaggagcagtatgacttcgagtacgaggaggatgatgaggaggactcgggtgatgtcgacattgagaacaagtactacaatgccaagcagatgagagagacagagcccgaagaggcaatcgatgaattcttgggcatacctgcacttgagcccgagaagggcgactggggtttcaagggtctgaagcaggccatcaagacagagttccgactcgccagatatgacaaggctgtggagcactacaccgaacttcttacctatgtcaagtccgctgtcacccgcaactactcggaaaagtctattaacaatatgctggatttcatcgagaaggagtcggagaacgaggcagcccagaagtgcatggaacaattctatgccttgaccttgacctgcttccagagcaccaataacgagcgactatggctcaagaccaacatcaaacttgcgaagctcctcctggaccgcaagcagtaccagtccgcaactaagaagctgcgagagctgcagaagtcatgtcaacgtgaagatggtaccgacgaccctagcaagggtacttactcgcttgagatgtacgcccttgagatccagatgtgcgccgagactcacaacaacaagcaactcaaactactataccaaaaggctctcaaggtgcgctccgccgtgccccatcccaagatcatgggcattattcgtgaatgcggtggcaagatgcacatgagcgaggaaaactggaaggatgcccagagtgattttttcgagtcgttccgcaacttcgacgaggccggatccctgcagcgtatccaagttctaaagtatctgttgcttaccactatgctcatgcgatctgacatcaaccccttcgactcccaagagaccaaaccctaccggaatgacccccgtatcgccgccatgacggagctggtggatgcctatcagagagatgacatgcaccaatatgtcaaggtgttaaagaacaatcaggacatcttagcagaccccttcattgccgagaatatcgacgaagtcacccgtaatgtgaggactaaggctgttgtcaaactgatcgccccctacacgagaatgaagctgggttggattgccaaacagatcaatatctccgagtcggaagtacaggacattcttggcttcttgattgtggatggcaagatcaagggcaaaatcgaccagcagacaggcatcctcgagatcgaatctggtgtggatgccgaccgaatccaggctctcgacgcatgggccgaggctctcggtggactctatgctaccgtattcaaggatagtgaagggttccgtatcgttgataccacgcataccgacgatgtaatgccgatgggctccgatcctgctttgagagttggacgaccgggcaacaagaatctacgcaataaagccatgaagggtatggccggagcttgaggttagagatgaagatggagttgatcccgacacatcaaactataatgatatgaggcatgattgaggttactgcctctggctgagatgagagatcactcgacatgatacatacactactgcattggcgttaggagcttgtgagtgtgacacggcggagtgctacaccatcactgctgtggtggtagacccgatccgttagtgagagatgaccatacgggttttttgagtcaggaccagccaatatccaatctcgacatatcaatacgcactgcccataagattctagatacatagataagtaactagttcatgcaatgccatctgtggcacatctcta

SEQ ID NO: 11504 - DNA, 1233 bp, Muscodor strobelii
  misc_feature: SGI cDNA ID NO. 563698
  misc_feature: Encodes the peptide sequence at SEQ ID NO 11505
atgggtggagatctgcagctgaagaagtcgtaccacccggctctgctgaagaaccaggccaaggtctacgatgcagagcaggccgccctggccgagaggaagaagaccgaagcccgcattcaggagatcaaggaagagcgcgcccagaaagaactgcaagacaaactagaggcagccggagggaggaaacgagttgatcgcgtcgactggatgtaccaggggcccagcgatgggcaaggcggcacaaccgaggagctcgagggctttctattgggcaagcggaggattgataccatccttacccgcggccccgacaacgacaatctcaagaagcaggcttcctacgacagtctcgcgcccccaccaggctctgccatcaatcccagagacatggccaccaagatccgagaagaccctctgctggccatcaagaaacgagaacaagaagcatatgaagccatgatgaacgacccgatcaagagacgccagcttctggccaccatgggacaggccgacgacaacagcaagtcgtcgcggtcgaaagacgagaaacactccagacgacacagacaccgacaccgatcgcattcgcgagaccgtcaccaccgctcccaccgacgatcatactccagagaccgtaacgggtcgcccgatcgcagatctcgacatcacagatccagacgcgattcagacgagagatcggactcgcgcgacaggcgggagtcgaggagggatcgctacgagagaagcgagaggaaacgctcgacgtcacgagatggtcgcggaaacgggagggatggctacgagagatcacagagagaccgatcaagaagtccacgacgcagcgagagaaaggatgatgggtataggcggcgccgagactactccgatgagccacctcaagaccgccggcgcaacaataacgatggggaccgacgtgatgctcgccgaggaggtttcaataggaatgggaacggtcattacaatggcaacggctccagtaattcggataataccgcttcgggtgccgccgctgcagaggagcgtgcgcgcaagctagccgcaatgcaggatgcggcgtcggatctagacaaggaccgggagagacggctcgcgataatagaggagcaagatcgactggctcgggaggcagacgacaaggcacgagagcagtctgggaagtacggcgatcgcgagtttgtcaatggtttacggaggaagctaattaactga

SEQ ID NO: 11505 - protein, 410 aa, Muscodor strobelii
  misc_feature: SGI Peptide ID NO. 563698
  misc_feature (1)..(410): NCBI GI: 154319890 Blast Desc: BC1G_02426 [Botryotinia fuckeliana B05.10] gi|150856084|gb|EDN31276.1| BC1G_02426 [Botryotinia fuckeliana B05.10]
  misc_feature (2)..(172): NCBI GI: 145601446 Blast Desc: MGG_10324 [Magnaporthe grisea 70-15] gi|149211285|ref|XP_001523017.1| MGCH7_ch7g1102 [Magnaporthe grisea 70-15] gi|86197057|gb|EAQ71695.1| MGCH7_ch7g1102 grisea
  misc_feature (2)..(176): NCBI GI: 256732412 Blast Desc: NECHADRAFT_100723 [Nectria haematococca mpVI 77-13-4]
  misc_feature (1)..(170): NCBI GI: 156061251 Blast Desc: SS1G_02768 [Sclerotinia sclerotiorum 1980] gi|154700172|gb|EDN99910.1| SS1G_02768 [Sclerotinia sclerotiorum 1980]
  misc_feature (1)..(179): NCBI GI: 261353772 Blast Desc: pre-mRNA-splicing factor CWC25 [Verticillium albo-atrum VaMs.102]
  misc_feature (1)..(407): NCBI GI: 225555294 Blast Desc: pre-mRNA-splicing factor CWC25 [Ajellomyces capsulatus G186AR]
  misc_feature (2)..(183): NCBI GI: 46105082 Blast Desc: FG00169.1 [Gibberella zeae PH-1] gi|82592779|sp|Q4IRI9.1|CWC25_GIBZE RecName: Full=Pre-mRNA-splicing factor CWC25
  misc_feature (1)..(192): NCBI GI: 261193781 Blast Desc: pre-mRNA-splicing factor CWC25 [Ajellomyces dermatitidis SLH14081] gi|239588901|gb|EEQ71544.1| pre-mRNA-splicing factor CWC25 [Ajellomyces dermatitidis factor
  misc_feature (1)..(192): NCBI GI: 240106181 Blast Desc: pre-mRNA-splicing factor CWC25, [Coccidioides posadasii C735 delta SOWgp]
  misc_feature (1)..(175): NCBI GI: 240275241 Blast Desc: pre-mRNA-splicing factor CWC25 [Ajellomyces capsulatus H143]
MGGDLQLKKSYHPALLKNQAKVYDAEQAALAERKKTEARIQEIKEERAQKELQDKLEAAGGRKRVDRVDWMYQGPSDGQGGTTEELEGFLLGKRRIDTILTRGPDNDNLKKQASYDSLAPPPGSAINPRDMATKIREDPLLAIKKREQEAYEAMMNDPIKRRQLLATMGQADDNSKSSRSKDEKHSRRHRHRHRSHSRDRHHRSHRRSYSRDRNGSPDRRSRHHRSRRDSDERSDSRDRRESRRDRYERSERKRSTSRDGRGNGRDGYERSQRDRSRSPRRSERKDDGYRRRRDYSDEPPQDRRRNNNDGDRRDARRGGFNRNGNGHYNGNGSSNSDNTASGAAAAEERARKLAAMQDAASDLDKDRERRLAIIEEQDRLAREADDKAREQSGKYGDREFVNGLRRKLIN

SEQ ID NO: 11506 - DNA, 2326 bp, Muscodor strobelii
  misc_feature: SGI EST ID NO. CUFF.27340.0
  misc_feature: Variant of the nucleotide sequence at SEQ ID NO 11504
gggtcgttgaggcttaggtacctacctagaccaagcggcgctactgaccatgacccactgtagttacagtctagcggcgggcagggatttgggcgaggctggaaactccaactcttcaagtgcagtggcaaacagttctgacttctatccatccatcacatcccttccattcaataactagctatcctactacaccgcgtcctccactgcgtcctccagcgccataatactttcctgatctcttcctcctcagcgattcattatctcctgacgccggcgacggtggcaacatcgcatccccgcgaatcgcgacaatcagcctctttcacgcttctcgccgttctctttgaccgaactccgtcaagatgggtggagatctgcagctgaagaagtcgtaccacccggctctgctgaagaaccaggccaaggtctacgatgcagagcaggccgccctggccgagaggaagaagaccgaagcccgcattcaggagatcaaggaagagcgcgcccagaaagaactgcaagacaaactagaggcagccggagggaggaaacgagttgatcgcgtcgactggatgtaccaggggcccagcgatgggcaaggcggcacaaccgaggagctcgagggctttctattgggcaagcggaggattgataccatccttacccgcggccccgacaacgacaatctcaagaagcaggcttcctacgacagtctcgcgcccccaccaggctctgccatcaatcccagagacatggccaccaagatccgagaagaccctctgctggccatcaagaaacgagaacaagaagcatatgaagccatgatgaacgacccgatcaagagacgccagcttctggccaccatgggacaggccgacgacaacagcaagtcgtcgcggtcgaaagacgagaaacactccagacgacacagacaccgacaccgatcgcattcgcgagaccgtcaccaccgctcccaccgacgatcatactccagagaccgtaacgggtcgcccgatcgcagatctcgacatcacagatccagacgcgattcagacgagagatcggactcgcgcgacaggcgggagtcgaggagggatcgctacgagagaagcgagaggaaacgctcgacgtcacgagatggtcgcggaaacgggagggatggctacgagagatcacagagagaccgatcaagaagtccacgacgcagcgagagaaaggatgatgggtataggcggcgccgagactactccgatgagccacctcaagaccgccggcgcaacaataacgatggggaccgacgtgatgctcgccgaggaggtttcaataggaatgggaacggtcattacaatggcaacggctccagtaattcggataataccgcttcgggtgccgccgctgcagaggagcgtgcgcgcaagctagccgcaatgcaggatgcggcgtcggatctagacaaggaccgggagagacggctcgcgataatagaggagcaagatcgactggctcgggaggcagacgacaaggcacgagagcagtctgggaagtacggcgatcgcgagtttgtcaatggtttacggaggaagctaattaactgagcatggcgttgcggacagggttcatgagcatgagcgaggcggacaaattgcacacagtacattgcacataacgattcggattgagtttcagatttacgattacattgcttcgcgcccagtcttaccaggtgccaacgcccaacacgataagtgaaggtttctctgcgtttgttgacgataatgtgtgattccacaaaaaatgtcagtgtcaatgagacgtgagtttggctagacacgacgtagattgagatatgtctctacccattcttgagccgatggtgtgggacatgagacctgtggcagactcaagccgagtcatctggcgtgtggcacttggggtagcactgggggcaatgtggtggatggcctttgtggaatgacgaatttccccatacctaaggatgaggatgatagggtcttgtgaactcgcacgaaggcttgccacagcatttagtgtaaggggcacctacgggataaggatgagaatgagatgagatgggcaagcgtgttcgttgggacgaagggagtcttattgaggtggatacgatttcatcatgcagattgggggattgatttcggtgagatgacctacttctatacacgcattgctgttacgagtgtagaatcttaacaaatcaaggtctcatcgcccgatgatactggatgaccatacagaaactgctgagataacatgtcacagatgaggattaagcgaatggatttgtagc

SEQ ID NO: 11507 - DNA, 633 bp, Muscodor strobelii
  misc_feature: SGI cDNA ID NO. 563699
  misc_feature: Reduced expression when VOC is produced
  misc_feature: Encodes the peptide sequence at SEQ ID NO 11508
atgcccggtctctgtggtttgggcggaagtaagacggtccagcgcaaacttgtgctccttggcgacggtgcttccggcaagacctctctgctgaatgtcttcacgcgaggctacttccccaccgtctacgagcccaccgtcttcgagaactacgtccatgacatcttcgtcgacaacgtgcacatcgagctctccctctgggacacggccggccaagaggagttcgaccgcttacgcagcctgtcatacgataacaccgatgtagtggtcctgtgcttcagcgtcgacagcaaagactccctggagaacgtcgagagcaagtgggtcggggagatccaggagaactgcccgggcgtcaagattgtgctcgtcgccctcaagtgcgacctgcgcgaggctggcgacgaggacgaagacggtgccgccgctgccgatggggcccagcgcgagaagaagcccatgatcgactacaaccagggtctcgaggtcgccaggcggatcaaggccatgcgctacctcgagtgctctgccatgcgcaatcgcggtgtcaacgaggccttcaccgaggctgcccgtgtcgccctcagcgtcaagcccagcggcgaggagggctctaagtgcgtcatcatgtag

SEQ ID NO: 11508 - protein, 210 aa, Muscodor strobelii
  misc_feature: SGI Peptide ID NO. 563699
  misc_feature (16)..(129): Pfam Id: PF08477 Pfam Desc: Miro-like protein
  misc_feature (16)..(196): Pfam Id: PF00071 Pfam Desc: Ras family
  misc_feature (1)..(210): NCBI GI: 85074745 Blast Desc: protein RHO3 [Neurospora crassa OR74A] gi|28927553|gb|EAA36504.1| protein RHO3 [Neurospora crassa OR74A] gi|38567307|emb|CAE76595.1| rho3 protein [Neurospora crassa]
  misc_feature (1)..(210): NCBI GI: 171684069 Blast Desc: protein product [Podospora anserina] gi|170941995|emb|CAP67647.1| protein product [Podospora anserina]
  misc_feature (1)..(210): NCBI GI: 46105084 Blast Desc: FG00170.1 [Gibberella zeae PH-1]
  misc_feature (1)..(210): NCBI GI: 39969425 Blast Desc: MGG_10323 [Magnaporthe grisea 70-15] gi|118133291|gb|ABK60346.1| GTP-binding protein [Magnaporthe grisea] gi|145009514|gb|EDJ94181.1| MGG_10323 [Magnaporthe grisea
  misc_feature (1)..(210): NCBI GI: 12054272 Blast Desc: rho3 protein [Hypocrea jecorina]
  misc_feature (1)..(210): NCBI GI: 116192913 Blast Desc: CHGG_06174 [Chaetomium globosum CBS 148.51] gi|88182087|gb|EAQ89555.1| CHGG_06174 [Chaetomium globosum CBS 148.51]
  misc_feature (1)..(210): NCBI GI: 256732411 Blast Desc: [Nectria haematococca mpVI 77-13-4]
  misc_feature (1)..(210): NCBI GI: 169596424 Blast Desc: SNOG_00974 [Phaeosphaeria nodorum SN15] gi|160701308|gb|EAT92469.2| SNOG_00974 [Phaeosphaeria nodorum SN15]
  misc_feature (11)..(210): NCBI GI: 261193783 Blast Desc: Rho3 [Ajellomyces dermatitidis SLH14081] gi|239588902|gb|EEQ71545.1| Rho3 [Ajellomyces dermatitidis SLH14081] gi|239613777|gb|EEQ90764.1| Rho3 [Ajellomyces ER-3]
  misc_feature (1)..(210): NCBI GI: 154319888 Blast Desc: conserved [Botryotinia fuckeliana B05.10] gi|150856083|gb|EDN31275.1| conserved [Botryotinia fuckeliana B05.10]
  misc_feature: Useful for introducing or modulating the production of volatile compounds
MPGLCGLGGSKTVQRKLVLLGDGASGKTSLLNVFTRGYFPTVYEPTVFENYVHDIFVDNVHIELSLWDTAGQEEFDRLRSLSYDNTDVVVLCFSVDSKDSLENVESKWVGEIQENCPGVKIVLVALKCDLREAGDEDEDGAAAADGAQREKKPMIDYNQGLEVARRIKAMRYLECSAMRNRGVNEAFTEAARVALSVKPSGEEGSKCVIM

SEQ ID NO: 11509 - DNA, 1680 bp, Muscodor strobelii
  misc_feature: SGI EST ID NO. CUFF.27343.0
  misc_feature: Variant of the nucleotide sequence at SEQ ID NO 11507
gtcctttcgttctattccctcccgcctgattcccgtcatcccatttattccgtcgtcccttcttgcagcggtagtcaagtacagtccgcctcgcaattctaaccgctcctttctactaatatcgtcacttcttgactaacttaccgccgtcacacccctggcttgtgttgttcctgcatccggcagaccaatcacatatccactctctccctcggcccccttttccaccatcaccgttcgcttcgactttctcaactttcgcattcaccaacgccacccgttcgaccccgtacgctcttctcgacatcagctcgcgagcaacacccatcagcagcatacactgatacacatcacccattcgtcacgatgcccggtctctgtggtttgggcggaagtaagacggtccagcgcaaacttgtgctccttggcgacggtgcttccggcaagacctctctgctgaatgtcttcacgcgaggctacttccccaccgtctacgagcccaccgtcttcgagaactacgtccatgacatcttcgtcgacaacgtgcacatcgagctctccctctgggacacggccggccaagaggagttcgaccgcttacgcagcctgtcatacgataacaccgatgtagtggtcctgtgcttcagcgtcgacagcaaagactccctggagaacgtcgagagcaagtgggtcggggagatccaggagaactgcccgggcgtcaagattgtgctcgtcgccctcaagtgcgacctgcgcgaggctggcgacgaggacgaagacggtgccgccgctgccgatggggcccagcgcgagaagaagcccatgatcgactacaaccagggtctcgaggtcgccaggcggatcaaggccatgcgctacctcgagtgctctgccatgcgcaatcgcggtgtcaacgaggccttcaccgaggctgcccgtgtcgccctcagcgtcaagcccagcggcgaggagggctctaagtgcgtcatcatgtagacacactgcgcctatccacgtctactatgcttcctcgacgacagcagaaagcataaccactatcaacaacggcagcagagacatgtgcttggtctaatgaagcgcaacatgaatccagcaccgctatcatcgatgatacctatcttagcttggctcacgatttgactacctaccgacagaacatcctattcgggccggatcgctcaggttcgcccaaccatatatcctctcaccacatctcaaggcgcccttcttcctgtacatactatttgctatcgcacatcacacataacgcgcttcagaccatgttgtttttagctgctttttttgtaattagagggcttttgcttattgctttccgccctcatcccggcacttgaagatgatgctacatgctgcgtcgacggtttccacactactagaactttgcaacagggggggattgggacaaaagatctttagagtttcactctacactatgacgcctttcttttgttgtatatcgagccgatacgcgtgcaagcagagcattgctacaatgctgaaaataggagtctagggatgaataccagatttttttcgatccgttcgcttgtaagctgctctgctcagtgaacttttgatgctttcgataaggtaattcaccaaagtattgtataactaccttggcttggccacagg

SEQ ID NO: 11510 - DNA, 1233 bp, Muscodor strobelii
  misc_feature: SGI cDNA ID NO. 563700
  misc_feature: Encodes the peptide sequence at SEQ ID NO 11511
atgagcgatccggacgatagacaggccaaggtgccctcctctaagctcaccatcagccccttaatcacaacctacaatgtcagcccgagttccacaaccaccatcacccaggcccctaaagactaccacttgagagacctcgtcgacaaccgcaagtctgtacgcgaccgattaaataaatcaaagtgtcccgaagctattccctttctattcatggcagccgccatatatgttgccctgtactggcccaagcccaagaaggacgcatctcttaatgctctccctagcacgctccgaactgttcatgaacatgctttctggacttggtgtggttgggtggcttgtcgaatactagtgcgccgaggttttatacgtggtgctgaagtgatacaagatgagcaaaaggaagaggaagaccaggacgacagcgactgcagaagtgtaaggagttgtcatactgcccgggaccattgggacggtggatctgagaggtcttacgatatggacgactccgacctgggtgacctccgtttctgcgaatatcctgccgttaatgatgaaggctattccgctgattccgactcggctggtggcatgaacactcctgattacgattcggacgactcttcagactcttctcttggtttctatcgttggcggcttcctgactctgatgatgattccgacttcaacggcgatgacgatggcgatgacaatgctccgaataaaaattcggataacgatgccagggatgatgtgtcagacagctcaagcatgacacatgattccgacctttctctcgattatcgattttgcgactatccagagtcctttgactctgacgaatcggattccggctacgaggcagatacccccttcgattcgggtgatggttctgatgacgaagaatctggtggtccctacactcctgtcacttcttacagctctcttgattccgatctcgattcggacgattctcacgacagcttcgactctgacgattcggatgtgtctggagattcatcctttttctacggctctgatgatgacgacgtcgactatgagtatctctacccccctgtacatcgccatgagcccgagaatgtatacctagctattttgctcaccggcctcactatcttctgtgttgtaggagttgtcggttgcacgattaagaatatagtcgagggtacttggttactgtgttgtgatatttggttcatcgtctcttga

SEQ ID NO: 11511 - protein, 410 aa, Muscodor strobelii
  misc_feature: SGI Peptide ID NO. 563700
MSDPDDRQAKVPSSKLTISPLITTYNVSPSSTTTITQAPKDYHLRDLVDNRKSVRDRLNKSKCPEAIPFLFMAAAIYVALYWPKPKKDASLNALPSTLRTVHEHAFWTWCGWVACRILVRRGFIRGAEVIQDEQKEEEDQDDSDCRSVRSCHTARDHWDGGSERSYDMDDSDLGDLRFCEYPAVNDEGYSADSDSAGGMNTPDYDSDDSSDSSLGFYRWRLPDSDDDSDFNGDDDGDDNAPNKNSDNDARDDVSDSSSMTHDSDLSLDYRFCDYPESFDSDESDSGYEADTPFDSGDGSDDEESGGPYTPVTSYSSLDSDLDSDDSHDSFDSDDSDVSGDSSFFYGSDDDDVDYEYLYPPVHRHEPENVYLAILLTGLTIFCVVGVVGCTIKNIVEGTWLLCCDIWFIVS

SEQ ID NO: 11512 - DNA, 945 bp, Muscodor strobelii
  misc_feature: SGI cDNA ID NO. 563701
  misc_feature: Elevated expression when VOC is produced
  misc_feature: Encodes the peptide sequence at SEQ ID NO 11513
atgtccctcggattcggattttcagcgggagactttatcgccgccttgcggctcacacgtacggtgatcggctgcttgcacgattcgttatctgctgcggggaaatcatacgaagagctgttatcagagctaaatatcctcgaacgtgcgctgttagctgtcaagaatcttgagttcgatgaaacccaggcgtcgaaggtagccctacaacaggctgctgcgcagtgccaaaacaccatacacgagttctgcgaaacgattaaaaaatatcatgcaaacctgcaatcagatgggtcatcatcaaagctccgagatggctgggctaaaataaaatggactctccttaaatccaaagaccttgaacatttcaaagggaacgttcaggcacatacaagtgcgatcgaaatcttgctcataacaacacagttgctagcaacaagattacagacgcgcagtgtacgacagcgtgtagttacgccagccggccgaatacaagccttgactaccgagtgtatgggcagactgaatgttatagttcttacagtaaatcaaacagtgaagcaagggcaggacatcctcgagggcatatcacgagttattcagaccagcatgaaggtttttcaaatggtctttgatatccaccaactcatacttcacatgccacagcaagtctaccgacaacagtctgtctatctcatcgatgctcttgggaagggcgctccgttctatcttgagttcatacgatccgcagaggcgctaatatccgtccttcgagttaatttccgagtagcgtcatacggcgaaatattcatagacagtggcgactttgtgatacaggatgatggcactggaagagacatcgatctttcaatgaacccgggaattatgcctctttccggggcagaaagtttcgatgagcataatgctcgaacacagatacgataa

SEQ ID NO: 11513 - protein, 314 aa, Muscodor strobelii
  misc_feature: SGI Peptide ID NO. 563701
  misc_feature (1)..(300): NCBI GI: 116201235 Blast Desc: CHGG_08502 [Chaetomium globosum CBS 148.51] gi|88177020|gb|EAQ84488.1| CHGG_08502 [Chaetomium globosum CBS 148.51]
  misc_feature (1)..(290): NCBI GI: 240107045 Blast Desc: CPC735_018360 [Coccidioides posadasii C735 delta SOWgp]
  misc_feature (1)..(221): NCBI GI: 119175134 Blast Desc: CIMG_09468 [Coccidioides immitis RS]
  misc_feature (1)..(290): NCBI GI: 238844501 Blast Desc: conserved [Microsporum canis CBS 113480]
  misc_feature (1)..(143): NCBI GI: 156044975 Blast Desc: [Sclerotinia sclerotiorum 1980] gi|154694071|gb|EDN93809.1| [Sclerotinia sclerotiorum 1980]
  misc_feature (1)..(290): NCBI GI: 119172594 Blast Desc: [Coccidioides immitis RS]
  misc_feature (37)..(290): NCBI GI: 240111656 Blast Desc: CPC735_011190 [Coccidioides posadasii C735 delta SOWgp]
  misc_feature (3)..(143): NCBI GI: 116206132 Blast Desc: [Chaetomium globosum CBS 148.51] gi|88182956|gb|EAQ90424.1| [Chaetomium globosum CBS 148.51]
  misc_feature (1)..(290): NCBI GI: 169599028 Blast Desc: SNOG_02326 [Phaeosphaeria nodorum SN15] gi|111069418|gb|EAT90538.1| SNOG_02326 [Phaeosphaeria nodorum SN15]
  misc_feature (1)..(261): NCBI GI: 169595362 Blast Desc: SNOG_00419 [Phaeosphaeria nodorum SN15] gi|111070794|gb|EAT91914.1| SNOG_00419 [Phaeosphaeria nodorum SN15]
  misc_feature: Useful for introducing or modulating the production of volatile compounds
MSLGFGFSAGDFIAALRLTRTVIGCLHDSLSAAGKSYEELLSELNILERALLAVKNLEFDETQASKVALQQAAAQCQNTIHEFCETIKKYHANLQSDGSSSKLRDGWAKIKWTLLKSKDLEHFKGNVQAHTSAIEILLITTQLLATRLQTRSVRQRVVTPAGRIQALTTECMGRLNVIVLTVNQTVKQGQDILEGISRVIQTSMKVFQMVFDIHQLILHMPQQVYRQQSVYLIDALGKGAPFYLEFIRSAEALISVLRVNFRVASYGEIFIDSGDFVIQDDGTGRDIDLSMNPGIMPLSGAESFDEHNARTQIR

SEQ ID NO: 11514 - DNA, 2492 bp, Muscodor strobelii
  misc_feature: SGI EST ID NO. CUFF.27434.0
  misc_feature: Variant of the nucleotide sequence at SEQ ID NO 11512
ttccaatcgtgattggaacaccaagctgcatcgccatgcacagtgccattggcacaccgcaaggcacttcgagccactgcctcatttaagccagtactgtctctcgccgattttacgcggtcaattcgaaatgatcttgttgattctggccgcacatccgggtccagccttagagtttcttgcaacgctatgtccctcggattcggattttcagcgggagactttatcgccgccttgcggctcacacgtacggtgatcggctgcttgcacgattcgttatctgctgcggggaaatcatacgaagagctgttatcagagctaaatatcctcgaacgtgcgctgttagctgtcaagaatcttgagttcgatgaaacccaggcgtcgaaggtagccctacaacaggctgctgcgcagtgccaaaacaccatacacgagttctgcgaaacgattaaaaaatatcatgcaaacctgcaatcagatgggtcatcatcaaagctccgagatggctgggctaaaataaaatggactctccttaaatccaaagaccttgaacatttcaaagggaacgttcaggcacatacaagtgcgatcgaaatcttgctcataacaacacagttgctagcaacaagattacagacgcgcagtgtacgacagcgtgtagttacgccagccggccgaatacaagccttgactaccgagtgtatgggcagactgaatgttatagttcttacagtaaatcaaacagtgaagcaagggcaggacatcctcgagggcatatcacgagttattcagaccagcatgaaggtttttcaaatggtctttgatatccaccaactcatacttcacatgccacagcaagtctaccgacaacagtctgtctatctcatcgatgctcttgggaagggcgctccgttctatcttgagttcatacgatccgcagaggcgctaatatccgtccttcgagttaatttccgagtagcgtcatacggcgaaatattcatagacagtggcgactttgtgatacaggatgatggcactggaagagacatcgatctttcaatgaacccgggaattatgcctctttccggggcagaaagtttcgatgagcataatgctcgaacacagatacgataaatgcccatgcttcagcttaccagtcccagtcaaaaatgagcaggaacagacttgataaggtcgcataccgctacagatgaagaaacacgctgatcatgtcatagccaccgctgtggcctcgttgtgatggcaaagtaggacccaaaaattgccacctcgttccaatcaacatcgtctgatcagttttcccttaaaccaaataattcaaggcctcagaagaggagtcatgagattgcctctgactttgatatttcaaagtttcgacgcatacggttggtagatagatctcccattaaatcgaacgacactcccttgaaagaactggcttaccacatacccgactatgtcggaaacatagcagttcccctgaataagagttcccacacaccgccgtcaccacaccagcttcaccatttcaggggtagatactttggatacaacagagagctggtcaatgactctaagtgtacttgttctgagctcagagggcattatattgaggtgaggtaattgatcatcacgatgaatcacgaaccttaccttttgatcagtggcatatatgtcacaattgccagcgctacaggcgagagtctcctctcggttacagtttcggatactcgagttttccagtgtttaaatccactcgcgactctcatgcacacaggcggcgattgcgacgtgagagttgatattatgcactcattacgacagtttatcaattagcaaacctatattatcctcagaatctagcttctaaagatacgcaacacggccggaagaacacacttatggaaaatcagcactttaacaggtgatatttctcagcaatgggactctccgagaccgattacctcagatgaccagcaattcagctcaaagccagtgagactcctagcaatgagggagttatggacctcacaaacgggtgatacatgcgatagggctgagtctattgtctgctattacaaaacttgacgaaagagtgttacgcataatttgccagtgaaatcgctctcgacaggactggtagtatcgcgaagaagcatgccactcttcactacagagtttgagataagtctcggaccagtctcgatcatgtcggcgcgctggtgttggtgctgaatatattacgcgagttacggtattcgcaagcttagctactgggaattatgagcatgttgtatgccctactgcgggccgaaatatgttacctattgccggtagaagcaattatagcgacttataggccagggttacaatagtgaagagtatactccctgcgagtgaaatggtgcgtctgttctagtaaagaggtgcaccttgcatattagaactatacaatacttaatagattgcga

SEQ ID NO: 11515 - DNA, 1170 bp, Muscodor strobelii
  misc_feature: SGI cDNA ID NO. 563702
  misc_feature: Encodes the peptide sequence at SEQ ID NO 11516
atggcttccgcagctgagatgacgttctactgtcattgcgacaagggaaccaaccgcagcttcgcgaccgtcgacgatctcaaccagcacatccttgagtcgcccaaccacgcctgtgtctgtggaaagcacttcgagacgtcggaggagaaacaacaatgtccttgtggtggatctgtgcccatggagactgcgcctggagaaactgaggagattactgatacaatggataccagagcagagatcagatttcactgcgactgcagcaagcgcgtgttcgcgacgattgagcagctgaacgaccacgttatcggctctcctaatcatccttgcgtgtgtggcaagctctatcaaacattccaggaaaaagctcattgtccctgcggccgcacctggcctactctagctccccgagctacagcttctggggctggaattgtgttgacttgcaactgcggcaacggcactcgcactcactcaacgattgagggccttttcactcacctggtcacctctgtcaatcacccttgtgtctgtggcaaacactaccggacggcggaagagaaacgtcagtgcgactgtggtcgaccctggcccatcttctttcctggcgctgtagcttcccaagatacgactagattctactgtcagtgcgataagggcgttatgcggtcttttaagacaatgagcgctctcgaggagcatctaaagtcgtcctctctccacgcttttgcctgtggatgcggcagtgcgacttttcccccgcctgatcttcaagatcgctctgttgaagtcgacaagccgttcaagattcaatctcctgatgccacgatccaatccgaaaatcaccatcgggaaattattagcctgcaagaggatcacgatatggagatgcccgatgcacttgagaacagccttcctgaaaaatctggcgccccgcagaatcactccagccctctgcctgactcacctcgcgatcaagtctttgagtttcctgcctctgcccatgtccaagctccccgattggagagctgtggtttttgcggtagtaccttccatacggctgccgatctcacccagcacctttacgatgcaactcgtcacaatagtcatcgtctgcaagtgggccagaggcattgggtatctctcttcgttacaaatttatactga

SEQ ID NO: 11516 - protein, 389 aa, Muscodor strobelii
  misc_feature: SGI Peptide ID NO. 563702
MASAAEMTFYCHCDKGTNRSFATVDDLNQHILESPNHACVCGKHFETSEEKQQCPCGGSVPMETAPGETEEITDTMDTRAEIRFHCDCSKRVFATIEQLNDHVIGSPNHPCVCGKLYQTFQEKAHCPCGRTWPTLAPRATASGAGIVLTCNCGNGTRTHSTIEGLFTHLVTSVNHPCVCGKHYRTAEEKRQCDCGRPWPIFFPGAVASQDTTRFYCQCDKGVMRSFKTMSALEEHLKSSSLHAFACGCGSATFPPPDLQDRSVEVDKPFKIQSPDATIQSENHHREIISLQEDHDMEMPDALENSLPEKSGAPQNHSSPLPDSPRDQVFEFPASAHVQAPRLESCGFCGSTFHTAADLTQHLYDATRHNSHRLQVGQRHWVSLFVTNLY

SEQ ID NO: 11517 - DNA, 1761 bp, Muscodor strobelii
  misc_feature: SGI cDNA ID NO. 563703
  misc_feature: Encodes the peptide sequence at SEQ ID NO 11518
atgaattacctcaacaacttgaactgtctcgtcggggcactaacatcaacagcgcagaacggaaaatcactatggggtacacttctcgcaccgacactaccgctatggataatcagcagcggcaagtcaggaatacagattccctggggaacgaagacagccggtaacagtgatccatacacaaccgcaccgctgaccgggataacccgtcactacgacttcaacatcagccgtggcctgattgcaccggatggctacgagaagagcgtgatcctagtcaatggacagtttcccgggcccttaatccaagccaactggggtgactacatcgaagtgaatgttcataacaacatcctcgaggaaccacaagagggcaccgccatgcactggcacgggtttttgcaaaccaacactccttgggaagatggaacgcccggtgtatctcaatgccccattgctcctgggaagagctttacttacaagtttcgcgcggagctctacggaacatcttggtatcactctcactactctgctcaatactcaggaggcatgtacggacccatcgttgtctatgggccgagaaatgtgaattatgatgttgacgtcggtcccatcatggtgaacgactggtatcacgaagattactacaaaacagtccaagaagtgatggcacccaactctaacggccggcccctctcagacaacaacctcatcaatggcaagatgtcctttgattgcgccacagttgacgtcggggacacagcaaagtgcaccaacaacgccggtctctctaaattcaagttccaaaccggtaaaacccatcgtctccgcttcatcaactctggctccgagggcgtccaaagaatctccatcgaccaacacaacatgaccgtgatcgccaatgactttgtcgagatccagccctacgacacacaagtcgtcaccattggcgtcggccagcgcgtcgacgtcgtcgttaaggctaacggaaacccgaaaggtgcttattggcttagagctaatatgacaagttgttcgactgctaaacaacctaatgcgcttgctgttatttactacgacaaagccgatacgaaggctatccccaagagcatcccttggaatgtgccagatcctaatacgtgtgccaatgatgatttggcgatcaccaagccgtattatcctatcaagctttctgagccctcatggacgcagaacatggacattgggattttccgcaatgcatctggcaacttgctctggaagtttggtggcgtatccgcaagagtagactacaatgcacccacactcctccaagtcaagaacaacgacttgaacttcgaccctgacatgaacgtcatgaactttggctccaacacctctgtgcgcttcattgtcaacaatcccacaccagcctcccaccccatccacgcccacggcctaaacatgtacatcctctccgaaggcgcgggaaacttcaacccatccaccaccatcaacaaatccaaccccatgcgtcgggacgtacagatggtccgcgcatttggacacatcgtagtccaaatggacgtcaccaaccccggcgtttggcccttccactgccacatcgcatggcatgcatctgccggtttcttctcccagatggtcttcttgcctgagaagatcaagcaatacacgatccccggaagtattagtcagacctgcaaggaatgggatgcttttacgaaggccagggttgtggatcagattgatagcgggttgtga

SEQ ID NO: 11518 - protein, 586 aa, Muscodor strobelii
  misc_feature: SGI Peptide ID NO. 563703
  misc_feature (201)..(362): Pfam Id: PF00394 Pfam Desc: Multicopper oxidase
  misc_feature (428)..(553): Pfam Id: PF07731 Pfam Desc: Multicopper oxidase
  misc_feature (75)..(195): Pfam Id: PF07732 Pfam Desc: Multicopper oxidase
  misc_feature (10)..(586): NCBI GI: 156056931 Blast Desc: SS1G_04196 [Sclerotinia sclerotiorum 1980] gi|154701982|gb|EDO01721.1| SS1G_04196 [Sclerotinia sclerotiorum 1980]
  misc_feature (2)..(585): NCBI GI: 116192909 Blast Desc: CHGG_06172 [Chaetomium globosum CBS 148.51] gi|88182085|gb|EAQ89553.1| CHGG_06172 [Chaetomium globosum CBS 148.51]
  misc_feature (6)..(586): NCBI GI: 39970819 Blast Desc: MGG_02876 [Magnaporthe grisea 70-15] gi|149210315|ref|XP_001522532.1| MGCH7_ch7g635 [Magnaporthe grisea 70-15] gi|86196590|gb|EAQ71228.1| MGCH7_ch7g635 grisea
  misc_feature (13)..(585): NCBI GI: 171684087 Blast Desc: protein product [Podospora anserina] gi|170942004|emb|CAP67656.1| protein product [Podospora anserina]
  misc_feature (11)..(586): NCBI GI: 152013640 Blast Desc: Lcc1 [Fusarium oxysporum]
  misc_feature (14)..(586): NCBI GI: 240148024 Blast Desc: laccase [Trichoderma sp. T01]
  misc_feature (48)..(586): NCBI GI: 256731892 Blast Desc: NECHADRAFT_80719 [Nectria haematococca mpVI 77-13-4]
  misc_feature (78)..(585): NCBI GI: 85111735 Blast Desc: NCU00526 [Neurospora crassa OR74A] gi|28925843|gb|EAA34842.1| NCU00526 [Neurospora crassa OR74A]
  misc_feature (60)..(556): NCBI GI: 46134159 Blast Desc: FG09219.1 [Gibberella zeae PH-1]
  misc_feature (13)..(586): NCBI GI: 189188518 Blast Desc: laccase-1 precursor [Pyrenophora tritici-repentis Pt-1C-BFP] gi|187972204|gb|EDU39703.1| laccase-1 precursor [Pyrenophora tritici-repentis Pt-1C-BFP]
  misc_feature (60)..(586): SWISSPROT Homolog: EC 1.10.3.2 Laccase
MNYLNNLNCLVGALTSTAQNGKSLWGTLLAPTLPLWIISSGKSGIQIPWGTKTAGNSDPYTTAPLTGITRHYDFNISRGLIAPDGYEKSVILVNGQFPGPLIQANWGDYIEVNVHNNILEEPQEGTAMHWHGFLQTNTPWEDGTPGVSQCPIAPGKSFTYKFRAELYGTSWYHSHYSAQYSGGMYGPIVVYGPRNVNYDVDVGPIMVNDWYHEDYYKTVQEVMAPNSNGRPLSDNNLINGKMSFDCATVDVGDTAKCTNNAGLSKFKFQTGKTHRLRFINSGSEGVQRISIDQHNMTVIANDFVEIQPYDTQVVTIGVGQRVDVVVKANGNPKGAYWLRANMTSCSTAKQPNALAVIYYDKADTKAIPKSIPWNVPDPNTCANDDLAITKPYYPIKLSEPSWTQNMDIGIFRNASGNLLWKFGGVSARVDYNAPTLLQVKNNDLNFDPDMNVMNFGSNTSVRFIVNNPTPASHPIHAHGLNMYILSEGAGNFNPSTTINKSNPMRRDVQMVRAFGHIVVQMDVTNPGVWPFHCHIAWHASAGFFSQMVFLPEKIKQYTIPGSISQTCKEWDAFTKARVVDQIDSGL

SEQ ID NO: 11519 - DNA, 482 bp, Muscodor strobelii
  misc_feature: SGI EST ID NO. CUFF.27352.0
  misc_feature: Variant of the nucleotide sequence at SEQ ID NO 11517
ctcccaccccatccacgcccacggcctaaacatgtacatcctctccgaaggcgcgggaaacttcaacccatccaccaccatcaacaaatccaaccccatgcgtcgggacgtacagatggtccgcgcatttggacacatcgtagtccaaatggacgtcaccaaccccggcgtttggcccttccactgccacatcgcatggcatgcatctgccggtttcttctcccagatggtcttcttgcctgagaagatcaagcaatacacgatccccggaagtattagtcagacctgcaaggaatgggatgcttttacgaaggccagggttgtggatcagattgatagcgggttgtgatactaaaaagagaaggggaagagggagcaccgcattcattgcatattttctttggatcttctgatacattctttcagggcaaggcatacggatcggaaatgggtctaccttgcatctacagtacttacacact

SEQ ID NO: 11520 - DNA, 354 bp, Muscodor strobelii
  misc_feature: SGI cDNA ID NO. 563704
  misc_feature: Reduced expression when VOC is produced
  misc_feature: Encodes the peptide sequence at SEQ ID NO 11521
atgccgccgatgccatccaacgcccgcgggccccagggtccctccaccatggacaagttaaaaatgggtgccatgatgggcggcacggtcggtgtcattatgggcttcgtcttcggaactgtcaacatctttcggtacggagccggcacgaacggcgtaatgagaacgttgggacagtatatggctggctccggcgccaccttcggattcttcatgggtgtcggcagtgtcataagaacagatgcatcacccatcgccgtcgaggctttccagcgagcccagagacggccttttattatggccgctcagcaaggctttcgaccccgccccaatccaacccaaccaaggccatag

SEQ ID NO: 11521 - protein, 117 aa, Muscodor strobelii
  misc_feature: SGI Peptide ID NO. 563704
  misc_feature (1)..(114): NCBI GI: 164428405 Blast Desc: NCU00527 [Neurospora crassa OR74A] gi|157072135|gb|EAA34843.2| conserved [Neurospora crassa OR74A]
  misc_feature (1)..(107): NCBI GI: 256731891 Blast Desc: NECHADRAFT_80718 [Nectria haematococca mpVI 77-13-4]
  misc_feature (1)..(111): NCBI GI: 261353693 Blast Desc: conserved [Verticillium albo-atrum VaMs.102]
  misc_feature (1)..(114): NCBI GI: 171684089 Blast Desc: protein product [Podospora anserina] gi|170942005|emb|CAP67657.1| protein product [Podospora anserina]
  misc_feature (1)..(109): NCBI GI: 145609914 Blast Desc: MGG_02877 [Magnaporthe grisea 70-15] gi|145017301|gb|EDK01664.1| MGG_02877 [Magnaporthe grisea 70-15]
  misc_feature (5)..(111): NCBI GI: 119194925 Blast Desc: CIMG_01837 [Coccidioides immitis RS]
  misc_feature (1)..(111): NCBI GI: 261203941 Blast Desc: mitochondrial genome maintenance protein Mgr2 [Ajellomyces dermatitidis SLH14081] gi|239586969|gb|EEQ69612.1| mitochondrial genome maintenance protein Mgr2 [Ajellomyces genome
  misc_feature (1)..(111): NCBI GI: 225678815 Blast Desc: conserved [Paracoccidioides brasiliensis Pb03]
  misc_feature (1)..(111): NCBI GI: 226293650 Blast Desc: conserved [Paracoccidioides brasiliensis Pb18]
  misc_feature (1)..(111): NCBI GI: 226281473 Blast Desc: conserved [Paracoccidioides brasiliensis Pb01]
  misc_feature: Useful for introducing or modulating the production of volatile compounds
MPPMPSNARGPQGPSTMDKLKMGAMMGGTVGVIMGFVFGTVNIFRYGAGTNGVMRTLGQYMAGSGATFGFFMGVGSVIRTDASPIAVEAFQRAQRRPFIMAAQQGFRPRPNPTQPRP

SEQ ID NO: 11522 - DNA, 1061 bp, Muscodor strobelii
  misc_feature: SGI EST ID NO. CUFF.27612.0
  misc_feature: Variant of the nucleotide sequence at SEQ ID NO 11520
gggagcaagtgctccatcgaaatcgcatcgcatcgcatccgaatcttcttgcgagtcgaactaccatcacgccacccgaccgcttcacacgctacggcgcacccctcgagcagcttcctgtgccctcgccaatcaattcgacaactgcacgagcctctttcatttgtctctcccttgggctctctaccacacatacaagatgccgccgatgccatccaacgcccgcgggccccagggtccctccaccatggacaagtgtaagtcgacagtcgcatacccatcatcactcatgcgctgttattctacgcgtagaaggatataggagatgtgatggactgatagatgtggctttcacagtaaaaatgggtgccatgatgggcggcacggtcggtgtcattatgggcttcgtcttcggaactgtcaacatctttcggtacggagccggcacgaacggcgtaatgagaacgttgggacagtatatggctggctccggcgccaccttcggattcttcatgggtgtcggcagtgtcataagaacagatgcatcacccatcgccgtcgaggctttccagcgagcccagagacggccttttattatggccgctcagcaaggctttcgaccccgccccaatccaacccaaccaaggccatagccatgtctctggatagataccattgagagataagagtcatccgtgccacggggaggccggactgccatctggtctttgtatgacaagaacgattgatcttgtcaacttctattgtacaacacagctcaaccacctagccacccaaactactcgatcccgcatccgctcattcgcagccaagacggagccgggtagacgtgatatccaacaagatcatatttgattgatgattctgtactgtacataacggggcgttggaaaaaatatgaattatatgatctatgatggtaacatgtccatctctcgcggctgaacaactcccagacttcctcaaacatgatgtgccccatactagtccagaccctactcacccccttagaaagccgccaaagatgtcctcgatttcgc

SEQ ID NO: 11523 - DNA, 2358 bp, Muscodor strobelii
  misc_feature: SGI cDNA ID NO. 563705
  misc_feature: Reduced expression when VOC is produced
  misc_feature: Encodes the peptide sequence at SEQ ID NO 11524
atgacggccgtcgcgagcccgcccaccttcgcccagcacaaccggacgccctggggcataaacggcatgaatggcatgaatggcgtcggcggcagtgcgaacggcagcaccaacggcagcggcagcggccccatcatgaacgacgacctcaaccgcctgctcatgtcccgcaagcccctgcagcgcaacaactcgtcctcgtctgtctcctccgcctcgtcatccgcctcgacctccaccgtcgccacatcggcctccaaccccaactcccagcagtccaatggtatccccgcgagcccacaagagctgaacgcctggcccaacggtgctgccgccaacgccgcccagcgcaagagaccacagcccaagggcccctggcccagccccaagcccgagtcccccaacgacttcgtgcgcatggccggcggccgccagatgataaacaccctgaacggcgcctcccccctgcacgcggcaccctcgatcgtgccctcccaaggccagatggcgtcccagcaggccatgccccggcccatggcggaacccctgccgccgggcaaccagcccgtgctgtacctgctcagcctcaacggcaccttcgagcgcaagaccatctctgtgccattctcccctgacacccttaggatcggtcgtcagacgaatgccaagaccctgcccaccccgatcaacggcttcttcgactccaaggtcctctcgcgccagcacgccgagatctgggccgataggcagggcaaggtctggatccgcgacgtcaagtcctccaacggcaccttcgtgaacggcacccgcctctcgcaggagaatagggaatccgaaccacacgagctgcagacgggcgaccacctggaactcggcatcgatattgtgagcgaggaccagaagaccgtcgttcaccacaaggttgccgctaaggtcgagcacgccggctacccgagcccctccaacaatgtgctggacctcaacttcggcgacctcgaccccgccaacgggccccatatgatgatgggcgcccagggggccgtccctctgcggcgtgccgggagccagtcgtcggttaataacaacggcggacggatgggacagggccccatgatgggcccccaggcgagcggcatcgccaaccagagaggcttcttcttctcccccatcagcaccgagcagatcgtcaagaagctccaggcggagatgcgcaatgctcgcttacaatcacacgacctcggtcacacgggcaactttgtacacgcactgctatctaaagaagacatcaaaaacgagaaacccgaagcaccggaaccgacgaaaccaaacatggttaatggaaatggcatctcgttccggacagatgggaagactagattctccgaacccccagctcctccgccccagcagccgttgcccgagaagcccgatgtcccctccttaagacgtggtattaccgagaaggctaaggctaacggccagaacacttcaccggttcgcccggatggcaacgggagtcagatcctggcactgacggaagccctgagcgtggctaagaaggagatagaatcacagacgtcccgtatgagggatctggaggagatgctccaacaagagcgacgagctcgggaactagcagaagagctggcaaggagactggaagagcaatcggccgccgccaacaccgccggcccttcaacagaggtggagactaatggaaccacgctggaagccactttcgagcctcctactgaagaggcaacaacaacaccctctcccgtcgatacccccatggtcgatgtccccgacgattcccagcctgatccggaagtcatcgaaacatcggccacgcaactacaagcacagatacaaactatggtactagaaatgacggatctccgacgacagctggacgtgtggaaacaacgagccgagacggccgagagcgagagggacacggaccgcaaatccttggccgaaatggccatccagatcaggaaagcagcagaagctaaggaactggcggccgcacaacaaaaggctgcggccgctgctgcgtctctctccaagaagactggcagggctcagaacgaagaggcacatgatgccgatgataacgtcaagacagccttctatcctaacggtccagcgagttcatcgaccgagtcgctcaaccagccgaccttgtcgcggaccccaaccctcagaccagaatcgtcgccagcagctgcgggtccgcctaagaacgtccttgccagcggtgtaccctatgcatccatgaccgttgttgttctatttggccttggactgatggcttatattaacggcttacaatcccagcccaagctcgagagatga

SEQ ID NO: 11524 - protein, 785 aa, Muscodor strobelii
  misc_feature: SGI Peptide ID NO. 563705
  misc_feature (214)..(292): Pfam Id: PF00498 Pfam Desc: FHA domain
  misc_feature (1)..(781): NCBI GI: 256732277 Blast Desc: NECHADRAFT_80717 [Nectria haematococca mpVI 77-13-4]
  misc_feature (1)..(782): NCBI GI: 261353692 Blast Desc: conserved [Verticillium albo-atrum VaMs.102]
  misc_feature (1)..(781): NCBI GI: 46134163 Blast Desc: FG09221.1 [Gibberella zeae PH-1]
  misc_feature (53)..(782): NCBI GI: 85111739 Blast Desc: NCU00528 [Neurospora crassa OR74A] gi|28925845|gb|EAA34844.1| [Neurospora crassa OR74A]
  misc_feature (1)..(785): NCBI GI: 39970823 Blast Desc: MGG_02878 [Magnaporthe grisea 70-15] gi|149210319|ref|XP_001522534.1| MGCH7_ch7g637 [Magnaporthe grisea 70-15] gi|86196592|gb|EAQ71230.1| MGCH7_ch7g637 grisea
  misc_feature (1)..(785): NCBI GI: 171684091 Blast Desc: protein product [Podospora anserina] gi|170942006|emb|CAP67658.1| protein product [Podospora anserina]
  misc_feature (1)..(785): NCBI GI: 242785594 Blast Desc: cytoplasm to vacuole targeting Vps64, [Talaromyces stipitatus ATCC 10500] gi|218720774|gb|EED20193.1| cytoplasm to vacuole targeting Vps64, [Talaromyces stipitatus ATCC 10500]
  misc_feature (154)..(778): NCBI GI: 258568190 Blast Desc: [Uncinocarpus reesii 1704] gi|237906285|gb|EEP80686.1| [Uncinocarpus reesii 1704]
  misc_feature (1)..(785): NCBI GI: 212543063 Blast Desc: cytoplasm to vacuole targeting Vps64, [Penicillium marneffei ATCC 18224] gi|210066593|gb|EEA20686.1| cytoplasm to vacuole targeting Vps64, [Penicillium marneffei ATCC 18224]
  misc_feature (1)..(778): NCBI GI: 240105103 Blast Desc: FHA domain containing protein [Coccidioides posadasii C735 delta SOWgp]
  misc_feature: Useful for introducing or modulating the production of volatile compounds
MTAVASPPTFAQHNRTPWGINGMNGMNGVGGSANGSTNGSGSGPIMNDDLNRLLMSRKPLQRNNSSSSVSSASSSASTSTVATSASNPNSQQSNGIPASPQELNAWPNGAAANAAQRKRPQPKGPWPSPKPESPNDFVRMAGGRQMINTLNGASPLHAAPSIVPSQGQMASQQAMPRPMAEPLPPGNQPVLYLLSLNGTFERKTISVPFSPDTLRIGRQTNAKTLPTPINGFFDSKVLSRQHAEIWADRQGKVWIRDVKSSNGTFVNGTRLSQENRESEPHELQTGDHLELGIDIVSEDQKTVVHHKVAAKVEHAGYPSPSNNVLDLNFGDLDPANGPHMMMGAQGAVPLRRAGSQSSVNNNGGRMGQGPMMGPQASGIANQRGFFFSPISTEQIVKKLQAEMRNARLQSHDLGHTGNFVHALLSKEDIKNEKPEAPEPTKPNMVNGNGISFRTDGKTRFSEPPAPPPQQPLPEKPDVPSLRRGITEKAKANGQNTSPVRPDGNGSQILALTEALSVAKKEIESQTSRMRDLEEMLQQERRARELAEELARRLEEQSAAANTAGPSTEVETNGTTLEATFEPPTEEATTTPSPVDTPMVDVPDDSQPDPEVIETSATQLQAQIQTMVLEMTDLRRQLDVWKQRAETAESERDTDRKSLAEMAIQIRKAAEAKELAAAQQKAAAAAASLSKKTGRAQNEEAHDADDNVKTAFYPNGPASSSTESLNQPTLSRTPTLRPESSPAAAGPPKNVLASGVPYASMTVVVLFGLGLMAYINGLQSQPKLER

SEQ ID NO: 11525 - DNA, 3628 bp, Muscodor strobelii
  misc_feature: SGI EST ID NO. CUFF.27422.0
  misc_feature: Variant of the nucleotide sequence at SEQ ID NO 11523
ccgggatcgatttctgaacaacctcctctcttcagcgaaaccaccgactctggctgccatcaccacgctctacacgcccctaagcatcgttgacagagcagagacggcctcagatcaattgccccgtgtctgtccgggccctgctcccaccgcatcgcgacctgccgctgtgccggagctgccaagtgccaccgacgagacccatgacggggggaggccaactttactactgccctttccaccttcccacgacacgcctgcacacgcctgcatcttgattcatcagaacccatcctgcacctccatcccccctttcgcttgccgcctgcatcgacgccagctcacacacgacggcacccaccaccgtccaaaccatccacacgaataacccgtcgtcgtttcctctctgcaggtccaagcacagttggactgctcttcatttgatagcgtactacggattacaggtcacaccgagcccgccatcctcactggtcaacagcttagccggtcgctgtccccctcctactccttcgccgactggttagggttacctagatcctcgacagccgcgtcgctccttttccttcccacctcttctttgggttcgccatcgaaattgccgtctctcccatcgccctcgccccggccgcggtgccagctgctttccccatgacggccgtcgcgagcccgcccaccttcgcccagcacaaccggacgccctggggcataaacggcatgaatggcatgaatggcgtcggcggcagtgcgaacggcagcaccaacggcagcggcagcggccccatcatgaacgacgacctcaaccgcctgctcatgtcccgcaagcccctgcagcgcaacaactcgtcctcgtctgtctcctccgcctcgtcatccgcctcgacctccaccgtcgccacatcggcctccaaccccaactcccagcagtccaatggtatccccgcgagcccacaagagctgaacgcctggcccaacggtgctgccgccaacgccgcccagcgcaagagaccacagcccaagggcccctggcccagccccaagcccgagtcccccaacgacttcgtgcgcatggccggcggccgccagatgataaacaccctgaacggcgcctcccccctgcacgcggcaccctcgatcgtgccctcccaaggccagatggcgtcccagcaggccatgccccggcccatggcggaacccctgccgccgggcaaccagcccgtgctgtacctgctcagcctcaacggcaccttcgagcgcaagaccatctctgtgccattctcccctgacacccttaggatcggtcgtcagacgaatgccaagaccctgcccaccccgatcaacggcttcttcgactccaaggtcctctcgcgccagcacgccgagatctgggccgataggcagggcaaggtctggatccgcgacgtcaagtcctccaacggcaccttcgtgaacggcacccgcctctcgcaggagaatagggaatccgaaccacacgagctgcagacgggcgaccacctggaactcggcatcgatattgtgagcgaggaccagaagaccgtcgttcaccacaaggttgccgctaaggtcgagcacgccggctacccgagcccctccaacaatgtgctggacctcaacttcggcgacctcgaccccgccaacgggccccatatgatgatgggcgcccagggggccgtccctctgcggcgtgccgggagccagtcgtcggttaataacaacggcggacggatgggacagggccccatgatgggcccccaggcgagcggcatcgccaaccagagaggcttcttcttctcccccatcagcaccgagcagatcgtcaagaagctccaggcggagatgcgcaatgctcgcttacaatcacacgacctcggtcacacgggcaactttgtacacgcactgctatctaaagaagacatcaaaaacgagaaacccgaagcaccggaaccgacgaaaccaaacatggttaatggaaatggcatctcgttccggacagatgggaagactagattctccgaacccccagctcctccgccccagcagccgttgcccgagaagcccgatgtcccctccttaagacgtggtattaccgagaaggctaaggctaacggccagaacacttcaccggttcgcccggatggcaacgggagtcagatcctggcactgacggaagccctgagcgtggctaagaaggagatagaatcacagacgtcccgtatgagggatctggaggagatgctccaacaagagcgacgagctcgggaactagcagaagagctggcaaggagactggaagagcaatcggccgccgccaacaccgccggcccttcaacagaggtggagactaatggaaccacgctggaagccactttcgagcctcctactgaagaggcaacaacaacaccctctcccgtcgatacccccatggtcgatgtccccgacgattcccagcctgatccggaagtcatcgaaacatcggccacgcaactacaagcacagatacaaactatggtactagaaatgacggatctccgacgacagctggacgtgtggaaacaacgagccgagacggccgagagcgagagggacacggaccgcaaatccttggccgaaatggccatccagatcaggaaagcagcagaagctaaggaactggcggccgcacaacaaaaggctgcggccgctgctgcgtctctctccaagaagactggcagggctcagaacgaagaggcacatgatgccgatgataacgtcaagacagccttctatcctaacggtccagcgagttcatcgaccgagtcgctcaaccagccgaccttgtcgcggaccccaaccctcagaccagaatcgtcgccagcagctgcgggtccgcctaagaacgtccttgccagcggtgtaccctatgcatccatgaccgttgttgttctatttggccttggactgatggcttatattaacggcttacaatcccagcccaagctcgagagatgagccgcagtaaaatgacacacacaacacacgctacttgataccaacaatcacacacaacacaacacacacatacccgcactttcacaatcagcagtacatagcccagcgaaatgtttcttttgttctactaccactactactactataccaaccaagggtcggctgacagattcagcttcaagaatcgagatgaaaatcgatggagctggacgtccagctggcacccgcactgtaacacgatgaatcggaagcaaacttctttgtctggcatcctggcgaaacggttcaacggggagggtttttgttcattttcttgtatgatgggtggagagaggcttctgaacccacagaaacttcacacttgggtctctggtaccgtaaatgatgaccagggagtaatcatgatgcttcggaagacttcgagcgttgtattttgttgctgagagatgagataagacgagtataggagtaggagtttggtattcatagggaatgatccagtcttgagatgagagaccaagacgatgaaatcgacagggatttttatggttctatcagtttattcttatgcatgctgtgaatgtgagaatgtcatgacgga

SEQ ID NO: 11526 - DNA, 912 bp, Muscodor strobelii
  misc_feature: SGI cDNA ID NO. 563706
  misc_feature: Encodes the peptide sequence at SEQ ID NO 11527
atgggttcaatacccgcacatgtgatcgacccaataccaatagcgacatcaggacagtggaattcagctgcattaaaaagaattgaagagttccttcgtgccggtagcctcaacaacgacaaatctagcgaagatgatccaacattgagcaaggacaaagacaatgatcggggaaatacaagggtgtccatggcaaaagagatagtctggataggagtcgcagacccgtcagaagctcgcgcggccgcgaagtgtgctaaagaaatcgcagagcgcatcagcatagaaaaacaggctgcacttgaccagcaggagatgccattggaagacccaactgtcatcaaagttgttgcaccaattatgcagttcggatcacaagaagagaaccgtgagggcttcctacatgcattgtcagatgggttgaagcccttgcttaagctatccttagcaaggcaagggtggactaagatcaaacaagtagctactggtaatgatagtcttgaagcattgattgacaaagaagacgcctactgggcattacggactatggctcataaccccaaaaagtacgtcaagaagaacagccaatgtattcttctcatcgtggggcttgacgatgccttccgtcgtccaagtacagatcggccggatgatgccgatagaaaggccgagatggagagtgaatggcttcagagagacttgcgcacgatttgccagtttatttctatgggcaaagtgatcttctttaagcatcacgagagttattctttattgcctgattttatctgtctgtgctctcctgaaaaaccggacccagaacaagaaaatctcaaggatcgaatcgcccaaagacaaagtacggggaaaatcaggagcaacagagccactatcgatgagattttaaagggctaa

SEQ ID NO: 11527 - protein, 303 aa, Muscodor strobelii
  misc_feature: SGI Peptide ID NO. 563706
MGSIPAHVIDPIPIATSGQWNSAALKRIEEFLRAGSLNNDKSSEDDPTLSKDKDNDRGNTRVSMAKEIVWIGVADPSEARAAAKCAKEIAERISIEKQAALDQQEMPLEDPTVIKVVAPIMQFGSQEENREGFLHALSDGLKPLLKLSLARQGWTKIKQVATGNDSLEALIDKEDAYWALRTMAHNPKKYVKKNSQCILLIVGLDDAFRRPSTDRPDDADRKAEMESEWLQRDLRTICQFISMGKVIFFKHHESYSLLPDFICLCSPEKPDPEQENLKDRIAQRQSTGKIRSNRATIDEILKG

SEQ ID NO: 11528 - DNA, 308 bp, Muscodor strobelii
  misc_feature: SGI EST ID NO. CUFF.27383.0
  misc_feature: Variant of the nucleotide sequence at SEQ ID NO 11526
cgcgcggccgcgaagtgtgctaaagaaatcgcagagcgcatcagcatagaaaaacaggctgcacttgaccagcaggagatgccattggaagacccaactgtcatcaaagttgttgcaccaattatgcagttcggatcacaagaagagaaccgtgagggcttcctacatgcattgtcagatgggttgaagcccttgcttaagctatccttagcaaggcaagggtggactaagatcaaacaagtagctactggtaatgatagtcttgaagcattgattgacaaagaagacgcctactgggcattacggac

SEQ ID NO: 11529 - DNA, 1275 bp, Muscodor strobelii
  misc_feature: SGI cDNA ID NO. 563707
  misc_feature: Encodes the peptide sequence at SEQ ID NO 11530
atgcgtctcctatccgtgctgagtactataactgtattcttgctccccaacaccgtcagggcacaaggagtgtccgtgagtatcgactcagatgggcgctctcactgcactgtaacggcaaatgggggcgaagcgaacgacgtgccgatactccttgaagcatttgagacatgtggaaaacacggcgtcatcacgttcccggaggacgaggagtattggattgcagagaaactgaaccccgttgtggacaatgtgctcatcaactggagcggaaaatgggtcttctccgacaatatcacatactggcgcaaaaatagctatcatatcgcgtttcaaaaccactgggccggtttcgtgttaaccggtgataatatcaccattctcggaaacggcaccggcggggttgatggtaacggagatacctggtatactgaagaggcgggcgacacccagccggggcgacctatgcctttcgtgttgtggaatgtgtcaaatgtcatcgtcaaggacttcagtatctgggaaccgcagctatggtccttcaacatcatgaatggaactgatatcctcgttgacggtctccacgtgaatgctacggctactcaagcaccgagcggacataactgggttcagaacacagatggcttcgacacgatggacgttcataacttgacgctcaggaacctggactatactggtggcgatgactgtatcgcagttaaacctcgttcttatgacatcactatcgagaacgtgacatgtcacagcggcaatggtatcgcgatcgggagtctcgggcagtatctcgaagacgcaagcgttgagcgcgtctcatttagcgacctggtagttggcggtaccaagaacggattctacatcaagacatggatgggccacctcgtgtatcaaaattcatacgagagtgaataccagccgcgcggcggaggttggggtgtcgtacaaaatatcaccatcaacaacatgaatgtcactggtgcggcaaaatcttttacaatcacgcaggacaatggcgacgattcggcccacacgtatgccgggactagcaacatgagtatatcgaacatcgttgtgcagaacgtatacgggaggttagcggcgacatcgaatacagtatcggtatcttgcagccatgtgtatccttgtcatggcattgtgtttgagaacatgacgcaggttgataagaacggcgattcgccgagtctcagttgccagtatacggcagatggaggtgtgagcggactaggcgattgctaa

SEQ ID NO: 11530 - protein, 424 aa, Muscodor strobelii
  misc_feature: SGI Peptide ID NO. 563707
  misc_feature (58)..(419): Pfam Id: PF00295 Pfam Desc: Glycosyl hydrolases family 28
  misc_feature (115)..(299): Pfam Id: PF00295 Pfam Desc: Glycosyl hydrolases family 28
  misc_feature (36)..(424): NCBI GI: 145255355 Blast Desc: An18g04810 [Aspergillus niger] gi|89113914|gb|ABD61568.1| exo-rhamnogalacturonase C [Aspergillus niger] gi|134084530|emb|CAK43283.1| protein product [Aspergillus
  misc_feature (14)..(424): NCBI GI: 212527782 Blast Desc: extracellular exo-polygalacturonase, [Penicillium marneffei ATCC 18224] gi|210073446|gb|EEA27533.1| extracellular exo-polygalacturonase, [Penicillium marneffei ATCC 18224]
  misc_feature (36)..(424): NCBI GI: 242784645 Blast Desc: extracellular exo-polygalacturonase, [Talaromyces stipitatus ATCC 10500] gi|218720576|gb|EED19995.1| extracellular exo-polygalacturonase, [Talaromyces stipitatus ATCC 10500]
  misc_feature (1)..(424): NCBI GI: 169764909 Blast Desc: [Aspergillus oryzae RIB40] gi|83764780|dbj|BAE54924.1| protein product [Aspergillus oryzae]
  misc_feature (1)..(424): NCBI GI: 119496563 Blast Desc: polygalacturonase, [Neosartorya fischeri NRRL 181] gi|119413217|gb|EAW23158.1| polygalacturonase, [Neosartorya fischeri NRRL 181]
  misc_feature (20)..(421): NCBI GI: 154309203 Blast Desc: BC1G_07496 [Botryotinia fuckeliana B05.10] gi|150852539|gb|EDN27731.1| BC1G_07496 [Botryotinia fuckeliana B05.10]
  misc_feature (4)..(421): NCBI GI: 156049853 Blast Desc: SS1G_08634 [Sclerotinia sclerotiorum 1980] gi|154693032|gb|EDN92770.1| SS1G_08634 [Sclerotinia sclerotiorum 1980]
  misc_feature (5)..(424): NCBI GI: 70991028 Blast Desc: extracellular exo-polygalacturonase [Aspergillus fumigatus Af293] gi|66847995|gb|EAL88325.1| extracellular exo-polygalacturonase, [Aspergillus fumigatus Af293] [Aspergillus
  misc_feature (1)..(216): NCBI GI: 238503820 Blast Desc: extracellular exo-polygalacturonase, [Aspergillus flavus NRRL3357] gi|220690613|gb|EED46962.1| extracellular exo-polygalacturonase, [Aspergillus flavus NRRL3357]
  misc_feature (33)..(424): NCBI GI: 58264792 Blast Desc: polygalacturonase [Cryptococcus neoformans var. neoformans JEC21] gi|134109717|ref|XP_776408.1| CNBC4630 [Cryptococcus neoformans var. neoformans B-3501A] CNBC4630 var.
  misc_feature (36)..(403): SWISSPROT Homolog: EC 3.2.1.67 Galacturan 1,4-alpha-galacturonidase
MRLLSVLSTITVFLLPNTVRAQGVSVSIDSDGRSHCTVTANGGEANDVPILLEAFETCGKHGVITFPEDEEYWIAEKLNPVVDNVLINWSGKWVFSDNITYWRKNSYHIAFQNHWAGFVLTGDNITILGNGTGGVDGNGDTWYTEEAGDTQPGRPMPFVLWNVSNVIVKDFSIWEPQLWSFNIMNGTDILVDGLHVNATATQAPSGHNWVQNTDGFDTMDVHNLTLRNLDYTGGDDCIAVKPRSYDITIENVTCHSGNGIAIGSLGQYLEDASVERVSFSDLVVGGTKNGFYIKTWMGHLVYQNSYESEYQPRGGGWGVVQNITINNMNVTGAAKSFTITQDNGDDSAHTYAGTSNMSISNIVVQNVYGRLAATSNTVSVSCSHVYPCHGIVFENMTQVDKNGDSPSLSCQYTADGGVSGLGDC

SEQ ID NO: 11531 - DNA, 229 bp, Muscodor strobelii
  misc_feature: SGI EST ID NO. CUFF.27407.0
  misc_feature: Variant of the nucleotide sequence at SEQ ID NO 11529
gcgacctatgcctttcgtgttgtggaatgtgtcaaatgtcatcgtcaaggacttcagtatctgggaaccgcagctatggtccttcaacatcatgaatggaactgatatcctcgttgacggtctccacgtgaatgctacggctactcaagcaccgagcggacataactgggttcagaacacagatggcttcggtatgtatgcaaccagatttccggtgcttgggattttc

SEQ ID NO: 11532 - DNA, 1887 bp, Muscodor strobelii
  misc_feature: SGI cDNA ID NO. 563708
  misc_feature: Elevated expression when VOC is produced
  misc_feature: Encodes the peptide sequence at SEQ ID NO 11533
atgtctttggccgttgcgagcgttgcaggagcggcagcactggcagcttatctggacggccgtttcttgatccgcaatgaccttcgacagggaaatagaaagatggcggcctgggtaggaatgcgacatattcaacaaagaatgcgtgagaataagatgatgatatatcatacttttgaggagagggtcggtacaccactaggaagagagacctttctgatttacgaggatcgccgctggacttatgaagagttctatcacgcactacagcctgttgcgaattggctattgaaagacctggggatcaaaaaagacgagatcgtggcgctcgatgggggaaacagccccgaatacatcatgatcttctttgctctggaagcaatcggcgccataccagcactgctgaactcaaatctcactgcgaagcctcttgttcacagtatcgagctctgtgggtgtcgttacgctctagtcgataacgagatacatagtcttgtatcgcctgtagagcaggagttgaaagatgcagggattgagacggtctactattcccaaaattccgtccaagtactcaatgatactgaaccgctaccaaaatcacgacaaaccgttaaggacccaacggaacctgctaatcttctctacacttcaggtacaacaggcctaccaaaaggcgttgtcactcctcgagcgcgaagaatgatggtcgggaagggtaccatgatgagccttcgtctcaagccaggcgatattatgtacacctgtcttccgctctaccacgcatcagcactgatcctgtgcctcttcgcctgcgtagcagctggttctaccgttgccgtaggccataagtttagccacaaaactttttggcctgaagtgcacaagtcgaaggctactcacattcaatacgttggtgaactatgtcgatacttagtcaacgcacccccaagtcctttagatcgaggtcataatgtgagggtagcatggggtaatggtatgcggccagatgtgtgggagccttttcgacaacgcttcggcatcgaatgcatccacgaactctacggcgcgagcgatggtatgggattttcaactaatgcaaacaggggggactttacacggaatgcaattgcggtgcgcgggccattgtggcatcttttgaaccgtgacgagaagcgtattcttgttgatcccgacacgcaagaggttgttcgaggcaaagacgggtttgctatcgaagcaaagggggatcaggtaggcgagcatgtcttccaaatggatatctctgcgcctgaccagggcacgcctcaatactacaataacagatccgcaacggagggccgacgtatcaccgatgtctttcgccccggcgatctgtggttccggtcgggagatctatttaagcttgatagtgatcatcgactgtttttcattgaccgccttggcgatacattccgttggcactctgaaaacgtctcaacaaacgaagttagcgatgtgattggcaaatttccgcaaatcgccgaaaccaatgtctacggcgtcctagtaccaaatgccgatggacgggctgggtgtgcggcaattgtcccaacggatgcaatattgaatgggaaaacaatggattggactgcacttgctgaacactgtttggaaaaccttccccgatacgccattccagtatttctacggttaacgaaaagtctcgattatacgggaacacacaaacttcagaagcaaaaacttcgatccgagggcattgatattgaggcgatcgagaaatcaggtagcgcagatcagatgtactggctgccgcccgggacaagcacttacgttcctttcacgaaaaaggatctccaagagcttaagggtggaagggttcgattgtag

SEQ ID NO: 11533 - protein, 628 aa, Muscodor strobelii
  misc_feature: SGI Peptide ID NO. 563708
  misc_feature (81)..(511): Pfam Id: PF00501 Pfam Desc: AMP-binding enzyme
  misc_feature (81)..(384): Pfam Id: PF00501 Pfam Desc: AMP-binding enzyme
  misc_feature (437)..(511): Pfam Id: PF00501 Pfam Desc: AMP-binding enzyme
  misc_feature (16)..(628): NCBI GI: 261202516 Blast Desc: fatty acid transporter [Ajellomyces dermatitidis SLH14081] gi|239590569|gb|EEQ73150.1| fatty acid transporter [Ajellomyces dermatitidis SLH14081]
  misc_feature (16)..(628): NCBI GI: 239612294 Blast Desc: fatty acid transporter [Ajellomyces dermatitidis ER-3]
  misc_feature (1)..(628): NCBI GI: 226287210 Blast Desc: fatty acid transporter protein [Paracoccidioides brasiliensis Pb18]
  misc_feature (1)..(628): NCBI GI: 225683588 Blast Desc: long-chain fatty acid transport protein [Paracoccidioides brasiliensis Pb03]
  misc_feature (6)..(628): NCBI GI: 225557088 Blast Desc: fatty acid transporter [Ajellomyces capsulatus G186AR]
  misc_feature (6)..(628): NCBI GI: 226277694 Blast Desc: fatty acid transporter protein [Paracoccidioides brasiliensis Pb01]
  misc_feature (5)..(628): NCBI GI: 115492831 Blast Desc: fatty acid transporter protein [Aspergillus terreus NIH2624] gi|114197903|gb|EAU39603.1| fatty acid transporter protein [Aspergillus terreus NIH2624]
  misc_feature (14)..(628): NCBI GI: 41688529 Blast Desc: FAT1_COCHE RecName: Full=Fatty acid transporter protein gi|2687850|emb|CAA75802.1| fatty acid transporter protein [Cochliobolus heterostrophus]
  misc_feature (55)..(587): NCBI GI: 189188902 Blast Desc: long-chain fatty acid transport protein 1 [Pyrenophora tritici-repentis Pt-1C-BFP] gi|187972396|gb|EDU39895.1| long-chain fatty acid transport protein 1 [Pyrenophora Pt-1C-BFP]
  misc_feature (6)..(546): NCBI GI: 240277634 Blast Desc: fatty acid transporter [Ajellomyces capsulatus H143]
  misc_feature (34)..(628): SWISSPROT Homolog: EC 6.2.1.3 Long-chain-fatty-acid--CoA ligase
  misc_feature: Useful for introducing or modulating the production of volatile compounds
MSLAVASVAGAAALAAYLDGRFLIRNDLRQGNRKMAAWVGMRHIQQRMRENKMMIYHTFEERVGTPLGRETFLIYEDRRWTYEEFYHALQPVANWLLKDLGIKKDEIVALDGGNSPEYIMIFFALEAIGAIPALLNSNLTAKPLVHSIELCGCRYALVDNEIHSLVSPVEQELKDAGIETVYYSQNSVQVLNDTEPLPKSRQTVKDPTEPANLLYTSGTTGLPKGVVTPRARRMMVGKGTMMSLRLKPGDIMYTCLPLYHASALILCLFACVAAGSTVAVGHKFSHKTFWPEVHKSKATHIQYVGELCRYLVNAPPSPLDRGHNVRVAWGNGMRPDVWEPFRQRFGIECIHELYGASDGMGFSTNANRGDFTRNAIAVRGPLWHLLNRDEKRILVDPDTQEVVRGKDGFAIEAKGDQVGEHVFQMDISAPDQGTPQYYNNRSATEGRRITDVFRPGDLWFRSGDLFKLDSDHRLFFIDRLGDTFRWHSENVSTNEVSDVIGKFPQIAETNVYGVLVPNADGRAGCAAIVPTDAILNGKTMDWTALAEHCLENLPRYAIPVFLRLTKSLDYTGTHKLQKQKLRSEGIDIEAIEKSGSADQMYWLPPGTSTYVPFTKKDLQELKGGRVRL

SEQ ID NO: 11534 - DNA, 3284 bp, Muscodor strobelii
  misc_feature: SGI EST ID NO. CUFF.27411.0
  misc_feature: Variant of the nucleotide sequence at SEQ ID NO 11532
ctcgtacgagatgagcgtagctgagtgcgtcggtattgcggcattcaaatggaacggagttcgaagactctcaacgccgtgagatgcatgcacactgcgcattagggtgttccggagcagctgaaggcttcatttgtttcgcagacggctggggataagccggcaggaaacggatcccggtctctgctaggtagggtcagacctaatgcggggggatgatactggaggtcgtgcagacatgctgagaccaacgtcacaactttgtaccagcctagagatctttcgatgctccattgccgaggtacctgtttgggtttgcaacatgggttttcagtccctggcgagtctctctggatgcctggggctggcagactactttctcgtcgtcggattttttcatgccttattgattccagaacccgttgattcatcgagtgttcactatttatcctcactcagatagtgggtgtaattaacggccattccttccatcatgtctttggccgttgcgagcgttgcaggagcggcagcactggcagcttatctggacggccgtttcttgatccgcaatgaccttcgacagggaaatagaaagatggcggcctgggtaggaatgcgacatattcaacaaagaatgcgtgagaataagatgatgatatatcatacttttgaggagagggtcggtacaccactaggaagagagacctttctgatttacgaggatcgccgctggacttatgaagagttctatcacgcactacagcctgttgcgaattggctattgaaagacctggggatcaaaaaagacgagatcgtggcgctcgatgggggaaacagccccgaatacatcatgatcttctttgctctggaagcaatcggcgccataccagcactgctgaactcaaatctcactgcgaagcctcttgttcacagtatcgagctctgtgggtgtcgttacgctctagtcgataacgagatacatagtcttgtatcgcctgtagagcaggagttgaaagatgcagggattgagacggtctactattcccaaaattccgtccaagtactcaatgatactgaaccgctaccaaaatcacgacaaaccgttaaggacccaacggaacctgctaatcttctctacacttcaggtacaacaggcctaccaaaaggcgttgtcactcctcgagcgcgaagaatgatggtcgggaagggtaccatgatgagccttcgtctcaagccaggcgatattatgtacacctgtcttccgctctaccacgcatcagcactgatcctgtgcctcttcgcctgcgtagcagctggttctaccgttgccgtaggccataagtttagccacaaaactttttggcctgaagtgcacaagtcgaaggctactcacattcaatacgttggtgaactatgtcgatacttagtcaacgcacccccaagtcctttagatcgaggtcataatgtgagggtagcatggggtaatggtatgcggccagatgtgtgggagccttttcgacaacgcttcggcatcgaatgcatccacgaactctacggcgcgagcgatggtatgggattttcaactaatgcaaacaggggggactttacacggaatgcaattgcggtgcgcgggccattgtggcatcttttgaaccgtgacgagaagcgtattcttgttgatcccgacacgcaagaggttgttcgaggcaaagacgggtttgctatcgaagcaaagggggatcaggtaggcgagcatgtcttccaaatggatatctctgcgcctgaccagggcacgcctcaatactacaataacagatccgcaacggagggccgacgtatcaccgatgtctttcgccccggcgatctgtggttccggtcgggagatctatttaagcttgatagtgatcatcgactgtttttcattgaccgccttggcgatacattccgttggcactctgaaaacgtctcaacaaacgaagttagcgatgtgattggcaaatttccgcaaatcgccgaaaccaatgtctacggcgtcctagtaccaaatgccgatggacgggctgggtgtgcggcaattgtcccaacggatgcaatattgaatgggaaaacaatggattggactgcacttgctgaacactgtttggaaaaccttccccgatacgccattccagtatttctacggttaacgaaaagtctcgattatacgggaacacacaaacttcagaagcaaaaacttcgatccgagggcattgatattgaggcgatcgagaaatcaggtagcgcagatcagatgtactggctgccgcccgggacaagcacttacgttcctttcacgaaaaaggatctccaagagcttaagggtggaagggttcgattgtagatagaagtagagagatgtaaatcaaaacatatatcttacacttgtatgaaccccctaagtcgaccgagtgtaacgaatccgaatcaaagcgatcggatctttgtatctaaaccaatcaacttccactctacataggtttagctgcattagctatcgttggtcccacgaatgaaagaaagccaaaatggccagctccgagaatcgatacaagctaagtcatatgttccgtaggttccatagaccctttgactattatcaagaccatatctaattgaagatacgtcaatacatggttgtagcatatacggtcattgagacttagcaatcgcctagtccgctcacacctccatctgccgtatactggcaactgagactcggcgaatcgccgttcttatcaacctgcgtcatgttctcaaacacaatgccatgacaaggatacacatggctgcaagataccgatactgtattcgatgtcgccgctaacctcccgtatacgttctgcacaacgatgttcgatatactcatgttgctagtcccggcatacgtgtgggccgaatcgtcgccattgtcctgcgtgattgtaaaagattttgccgcaccagtgacattcatgttgttgatggtgatattttgtacgacaccccaacctccgccgcgcggctggtattcactctcgtatgaattttgatacacgaggtggcccatccatgtcttgatgtagaatccgttcttggtaccgccaactaccaggtcgctaaatgagacgcgctcaacgcttgcgtcttcgagatactgcccgagactcccgatcgcgataccattgccgctgtgacatgtcacgttctcgatagtgatgtcataagaacgaggtttaactgcgatacagtcatcgccaccagtatag

SEQ ID NO: 11535 - DNA, 837 bp, Muscodor strobelii
  misc_feature: SGI cDNA ID NO. 563709
  misc_feature: Encodes the peptide sequence at SEQ ID NO 11536
atgggtcaattctatgaagagatacccgataacatcttagactgggtactcactcagaagatattctgggtatctacagctccgctttccggcaatggacatgtaaacgtctcaccgaaaggtggagattgcttcttccgggtaccagacaagcgtacatttctctaccatgatatgactggtagtggctctgagacgatatcacatctcgtcgagcctaacaatggccgtatcactatcatgttcaatgcatttgacggacctccccgcattgtgcggttctggggtaagggaagagtgcttgagtacgactcgcctgacttcaatcaaatcatcgaacgcgagaacatcacacctgagcccggcacacgatccattattctggtcgacatccaccaagtaggatcatcatgcggttatcaggtcccgttcttcaacttcgtcaagaaccgggatgtgctcgagaatcatttcaagaagaagcggaaaagattcgagcaaggtaacgaagaggagtcgatggaccgatactgggcctacaagaatgcctggagtatcgacggactacctgctatgcaacgcggcctcgaagctgggagacaattctctatcgaaccgatcaagaagatggttgggcctttcgccccgaaaaacgagaactcagcgacaagagcagaactgcatgcgtcatatctagtcatcgcatttcttgttaccctgattgctatactcggtgcgacgcaccctgctttcgaattcttccctgctcagaggcgtatgcaggaactcatcactcagattacatatgcctcagggtccccaagcgcatcagcttga

SEQ ID NO: 11536 - protein, 278 aa, Muscodor strobelii
  misc_feature: SGI Peptide ID NO. 563709
  misc_feature (8)..(105): Pfam Id: PF01243 Pfam Desc: Pyridoxamine 5'-phosphate oxidase
  misc_feature (1)..(224): NCBI GI: 242784965 Blast Desc: pyridoxamine phosphate oxidase family protein [Talaromyces stipitatus ATCC 10500] gi|218720644|gb|EED20063.1| pyridoxamine phosphate oxidase family protein [Talaromyces ATCC
  misc_feature (1)..(227): NCBI GI: 212527888 Blast Desc: pyridoxamine phosphate oxidase family protein [Penicillium marneffei ATCC 18224] gi|210073499|gb|EEA27586.1| pyridoxamine phosphate oxidase family protein [Penicillium ATCC
  misc_feature (1)..(251): NCBI GI: 116194264 Blast Desc: CHGG_03730 [Chaetomium globosum CBS 148.51] gi|88179643|gb|EAQ87111.1| CHGG_03730 [Chaetomium globosum CBS 148.51]
  misc_feature (1)..(242): NCBI GI: 171683687 Blast Desc: protein product [Podospora anserina] gi|170941803|emb|CAP67457.1| protein product [Podospora anserina]
  misc_feature (1)..(212): NCBI GI: 169618177 Blast Desc: SNOG_12277 [Phaeosphaeria nodorum SN15] gi|111058970|gb|EAT80090.1| SNOG_12277 [Phaeosphaeria nodorum SN15]
  misc_feature (1)..(212): NCBI GI: 189200991 Blast Desc: signal transduction histidine kinase [Pyrenophora tritici-repentis Pt-1C-BFP] gi|187983931|gb|EDU49419.1| signal transduction histidine kinase [Pyrenophora tritici-repentis
  misc_feature (1)..(246): NCBI GI: 85068524 Blast Desc: NCU05165 [Neurospora crassa OR74A] gi|28923451|gb|EAA32633.1| [Neurospora crassa OR74A]
  misc_feature (1)..(202): NCBI GI: 170116573 Blast Desc: [Laccaria bicolor S238N-H82] gi|164635629|gb|EDQ99934.1| [Laccaria bicolor S238N-H82]
  misc_feature (1)..(254): NCBI GI: 170116487 Blast Desc: [Laccaria bicolor S238N-H82] gi|170116491|ref|XP_001889436.1| [Laccaria bicolor S238N-H82] gi|164635586|gb|EDQ99891.1| [Laccaria bicolor S238N-H82] bicolor
  misc_feature (1)..(151): NCBI GI: 238591405 Blast Desc: MPER_07797 [Moniliophthora perniciosa FA553] gi|215458878|gb|EEB93529.1| MPER_07797 [Moniliophthora perniciosa FA553]
MGQFYEEIPDNILDWVLTQKIFWVSTAPLSGNGHVNVSPKGGDCFFRVPDKRTFLYHDMTGSGSETISHLVEPNNGRITIMFNAFDGPPRIVRFWGKGRVLEYDSPDFNQIIERENITPEPGTRSIILVDIHQVGSSCGYQVPFFNFVKNRDVLENHFKKKRKRFEQGNEEESMDRYWAYKNAWSIDGLPAMQRGLEAGRQFSIEPIKKMVGPFAPKNENSATRAELHASYLVIAFLVTLIAILGATHPAFEFFPAQRRMQELITQITYASGSPSASA

SEQ ID NO: 11537 - DNA, 1189 bp, Muscodor strobelii
  misc_feature: SGI EST ID NO. CUFF.27453.0
  misc_feature: Variant of the nucleotide sequence at SEQ ID NO 11535
caaggtttcatttctcaacatcaccaccgccttacatcacactgcaatctcccatgcgaacgagcattcgtcatgggtcaattctatgaagagatacccgataacatcttagactgggtactcactcagaagatattctgggtatctacagctccgctttccggcaatggacatgtaaacgtctcaccgaaaggtggagattgcttcttccgggtaccagacaagcgtacatttctctaccatgatatgactggtagtggctctgagacgatatcacatctcgtcgagcctaacaatggccgtatcactatcatgttcaatgcatttgacggacctccccgcattgtgcggttctggggtaagggaagagtgcttgagtacgactcgcctgacttcaatcaaatcatcgaacgcgagaacatcacacctgagcccggcacacgatccattattctggtcgacatccaccaagtaggatcatcatgcggttatcaggtcccgttcttcaacttcgtcaagaaccgggatgtgctcgagaatcatttcaagaagaagcggaaaagattcgagcaaggtaacgaagaggagtcgatggaccgatactgggcctacaagaatgcctggagtatcgacggactacctgctatgcaacgcggcctcgaagctgggagacaattctctatcgaaccgatcaagaagatggttgggcctttcgccccgaaaaacgagaactcagcgacaagagcagaactgcatgcgtcatatctagtcatcgcatttcttgttaccctgattgctatactcggtgcgacgcaccctgctttcgaattcttccctgctcagaggcgtatgcaggaactcatcactcagattacatatgcctcagggtccccaagcgcatcagcttgatgaacactacctgctttaatgtattatcgagtgacttattatggattgaagcagataccaaaaagagatgtaagagcattgtcgagattctaagacactaggaaggggagattgagaacaaacatgaggcctctagtacattttgctctccgagagcttagagattggtcttagacagccagcgatagttgacaatcttatatagagttgatacatagccgcaaaatagcgtttttgcctcgtgagagctacggtcaaaatgaatatagtgctgtctgcg

SEQ ID NO: 11538 - DNA, 993 bp, Muscodor strobelii
  misc_feature: SGI cDNA ID NO. 563710
  misc_feature: Encodes the peptide sequence at SEQ ID NO 11539
atgactcctccactgatcacactggaagagcatttcttctcgtcagctgcaaaggagcgactgggtaagtatatgttaaagtccccgttatttagcaagcagttcgaaaactttcccgaagccgccaaagcgatatgggatacggatactcttcgtcttgcctccatggacaaaaatggagtgtctttacagatcatgtctcatgtgcccggtgttctctctatcgaagaatgtaaagctacgaatgatcaagcagccgctgcggtaaaagcaaacccgagccgcctggccgggttcgctgagcttccaattgccaattcagaggactgcgcggccgagctaaaacgctgtgtaaatgagcttggcttcgttggggctttaattggcaatcatgcaaatggtgtatattacgaaaactactcggccatgtggcaagccgcgcaagacctagatgtgccgatatatctacatccgacgctaccgactgctgagcaaatgaatgccttctgtagcggtgacatttcatccgcggtcaaggctggaataagctcgtacgcctggggatggcattcggatattgcgatgcacgtgctacgcttgttcggagccggtgttttcgacaagtttccacgcctaaagctcatcatcggacactttggtgaaatgctaccattcatggttgaccgtgtcgggtgggcatcgactcactgggagaaacgacagagatcctttcggcaagtgtatgaggagaacatatggatcacgactagcggtgtctggagtgttgatccgatggcaactattctaaggagtacgccaattgataagatcttatacagcgtcgactatccttttacctcaaacgaggatggtctgaagttcatagaagatctagagaagagcggccttgtcacgaaagagcagctggagtgtatcgcgtacaaaaatgctgagcagttgctcaaagtcaaggctacaaaagtcttcgactag

SEQ ID NO: 11539 - protein, 330 aa, Muscodor strobelii
  misc_feature: SGI Peptide ID NO. 563710
  misc_feature (46)..(323): Pfam Id: PF04909 Pfam Desc: Amidohydrolase
  misc_feature (3)..(325): NCBI GI: 256723505 Blast Desc: NECHADRAFT_93978 [Nectria haematococca mpVI 77-13-4]
  misc_feature (3)..(325): NCBI GI: 256723398 Blast Desc: NECHADRAFT_55715 [Nectria haematococca mpVI 77-13-4]
  misc_feature (1)..(328): NCBI GI: 85094097 Blast Desc: NCU06058 [Neurospora crassa OR74A] gi|28921276|gb|EAA30585.1| conserved [Neurospora crassa OR74A]
  misc_feature (1)..(327): NCBI GI: 67901848 Blast Desc: AN7911.2 [Aspergillus nidulans FGSC A4] gi|40740375|gb|EAA59565.1| AN7911.2 [Aspergillus nidulans FGSC A4] gi|259480660|tpe|CBF73507.1| TPA: conserved [Aspergillus FGSC
  misc_feature (4)..(328): NCBI GI: 67523323 Blast Desc: AN2118.2 [Aspergillus nidulans FGSC A4] gi|40745794|gb|EAA64950.1| AN2118.2 [Aspergillus nidulans FGSC A4] gi|259487492|tpe|CBF86213.1| TPA: conserved [Aspergillus FGSC
  misc_feature (3)..(328): NCBI GI: 169781004 Blast Desc: [Aspergillus oryzae RIB40] gi|238504768|ref|XP_002383613.1| 2-amino-3-carboxymuconate-6-semialdehyde decarboxylase, flavus
  misc_feature (4)..(328): NCBI GI: 171680737 Blast Desc: protein product [Podospora anserina] gi|170939996|emb|CAP65222.1| protein product [Podospora anserina]
  misc_feature (4)..(324): NCBI GI: 212546025 Blast Desc: 2,3-dihydroxybenzoic acid decarboxylase, [Penicillium marneffei ATCC 18224] gi|210064686|gb|EEA18781.1| 2,3-dihydroxybenzoic acid decarboxylase, [Penicillium marneffei
  misc_feature (4)..(327): NCBI GI: 154292555 Blast Desc: BC1G_14801 [Botryotinia fuckeliana B05.10] gi|150845882|gb|EDN21075.1| BC1G_14801 [Botryotinia fuckeliana B05.10]
  misc_feature (4)..(324): NCBI GI: 242824594 Blast Desc: 2-amino-3-carboxymuconate-6-semialdehyde decarboxylase, [Talaromyces stipitatus ATCC 10500] gi|218713211|gb|EED12636.1| decarboxylase, [Talaromyces ATCC
  misc_feature (6)..(327): SWISSPROT Homolog: EC 4.1.1.46 o-pyrocatechuate decarboxylase
MTPPLITLEEHFFSSAAKERLGKYMLKSPLFSKQFENFPEAAKAIWDTDTLRLASMDKNGVSLQIMSHVPGVLSIEECKATNDQAAAAVKANPSRLAGFAELPIANSEDCAAELKRCVNELGFVGALIGNHANGVYYENYSAMWQAAQDLDVPIYLHPTLPTAEQMNAFCSGDISSAVKAGISSYAWGWHSDIAMHVLRLFGAGVFDKFPRLKLIIGHFGEMLPFMVDRVGWASTHWEKRQRSFRQVYEENIWITTSGVWSVDPMATILRSTPIDKILYSVDYPFTSNEDGLKFIEDLEKSGLVTKEQLECIAYKNAEQLLKVKATKVFD

SEQ ID NO: 11540 - DNA, 1149 bp, Muscodor strobelii
  misc_feature: SGI cDNA ID NO. 563711
  misc_feature: Encodes the peptide sequence at SEQ ID NO 11541
atgatcgagagtattttcgatgccctcgataccatatttgcctttgacatccccgacctactgaataccatcctcttcaccctcatcggtatcgtatttggctctaaagtcaccaatcacatcaacaccctcagatccgtctcaggtcaaccacccatcatgatcagaggtggcagaggcatgtggaggagacagcctctaaggccggctcgtaacacagcgcctcccgagctcaccaacacccaccagccaacgccgaaggattgcgccgaggtcaagagtatgattgccgatgtcgccaatttcccacccgaactcgtagacattgttatggactttgcagagtactgggcttgctccgtcgccgccatcgactactcagtcactgcccaagacggcactggagaacgtaaagtccttggtggacacggccatgaggatcagtttctcctgcgcacggagccagtaggtctcacgacttggcatgccgagaataaagagggttggcaatctgaggcgcctccgcgtaaactggaggtggaatactcgcgtccagagttggagcgcttcgtcgaaggccctccatccagcttggagcatccgttccggaagattgtcttcgacatcaccagtcatgaccaaggctggagcgccgaggttgctgatcatcacacgtttcgacctgcatatacctggttcgacgccggaatcgatcggtttgataaagggcatatatgctcggacagttgcaaggccagcgcatcaagcaacgcacgaaaggtgccaacgacctgcgcaatacgcccgatttggcctgtgctggaggataatgagggaagtgttaatttggaagctggatatcaccatgaattacatgcggtcggcgctcacaggatccaatgcaacagacatgccgagaggaattggcagcatcatcatgttgagtggtcgtccacggacagaattgaccccgactcgacagcggctgcagaactagtggagaacggccgtggccatgccactggtgatggcagcttcgtcaggaagctgaaagtcggcgacatggtgacgatctggggccgagcgagatacgcgggatgggtaaatcacgtacagaagattgaagttcgagtctattgggcgttgtaa

SEQ ID NO: 11541 - protein, 382 aa, Muscodor strobelii
  misc_feature: SGI Peptide ID NO. 563711
  misc_feature (86)..(382): NCBI GI: 46105114 Blast Desc: FG00185.1 [Gibberella zeae PH-1]
  misc_feature (85)..(382): NCBI GI: 256731958 Blast Desc: NECHADRAFT_41403 [Nectria haematococca mpVI 77-13-4]
  misc_feature (84)..(382): NCBI GI: 261353668 Blast Desc: conserved [Verticillium albo-atrum VaMs.102]
  misc_feature (83)..(382): NCBI GI: 149211205 Blast Desc: MGCH7_ch7g1063 [Magnaporthe grisea 70-15] gi|86197018|gb|EAQ71656.1| MGCH7_ch7g1063 [Magnaporthe grisea 70-15]
  misc_feature (83)..(382): NCBI GI: 145601394 Blast Desc: MGG_14205 [Magnaporthe grisea 70-15] gi|145009476|gb|EDJ94143.1| MGG_14205 [Magnaporthe grisea 70-15]
  misc_feature (80)..(382): NCBI GI: 85111757 Blast Desc: NCU00537 [Neurospora crassa OR74A] gi|28925854|gb|EAA34853.1| NCU00537 [Neurospora crassa OR74A]
  misc_feature (66)..(382): NCBI GI: 171684133 Blast Desc: protein product [Podospora anserina] gi|170942027|emb|CAP67679.1| protein product [Podospora anserina]
  misc_feature (82)..(382): NCBI GI: 154303188 Blast Desc: BC1G_09614 [Botryotinia fuckeliana B05.10] gi|150855077|gb|EDN30269.1| BC1G_09614 [Botryotinia fuckeliana B05.10]
  misc_feature (84)..(382): NCBI GI: 156058590 Blast Desc: SS1G_03307 [Sclerotinia sclerotiorum 1980] gi|154701094|gb|EDO00833.1| SS1G_03307 [Sclerotinia sclerotiorum 1980]
  misc_feature (84)..(381): NCBI GI: 242799052 Blast Desc: conserved [Talaromyces stipitatus ATCC 10500] gi|218716641|gb|EED16062.1| conserved [Talaromyces stipitatus ATCC 10500]
MIESIFDALDTIFAFDIPDLLNTILFTLIGIVFGSKVTNHINTLRSVSGQPPIMIRGGRGMWRRQPLRPARNTAPPELTNTHQPTPKDCAEVKSMIADVANFPPELVDIVMDFAEYWACSVAAIDYSVTAQDGTGERKVLGGHGHEDQFLLRTEPVGLTTWHAENKEGWQSEAPPRKLEVEYSRPELERFVEGPPSSLEHPFRKIVFDITSHDQGWSAEVADHHTFRPAYTWFDAGIDRFDKGHICSDSCKASASSNARKVPTTCAIRPIWPVLEDNEGSVNLEAGYHHELHAVGAHRIQCNRHAERNWQHHHVEWSSTDRIDPDSTAAAELVENGRGHATGDGSFVRKLKVGDMVTIWGRARYAGWVNHVQKIEVRVYWAL

SEQ ID NO: 11542 - DNA, 1613 bp, Muscodor strobelii
  misc_feature: SGI EST ID NO. CUFF.27493.1
  misc_feature: Variant of the nucleotide sequence at SEQ ID NO 11540
gcccggtcgagcgatggccaatgtttgtcaaataagggaaaccctagccatgtctattgctacggaccagtcaccgtggcaagagatattgcgctttatctccctcaccatcccaatgtgacaagtgacgccttcatcgacactgcttcaagtttttggttactcacgtcgctgtctgacacagaataggtcacacctgccaaaccggtttcccctctgctggcatgagtctgtggtgcctgtcaattcagagatagccattgtcgtcattgtccccaccattctcccagtgaattgaacggcccaacgggcaggataatagccgcctctcgcttgggtccacccccagacttgattatacctcccagcatcatgatcgagagtattttcgatgccctcgataccatatttgcctttgacatccccgacctactgaataccatcctcttcaccctcatcggtatcgtatttggctctaaagtcaccaatcacatcaacaccctcagatccgtctcaggtcaaccacccatcatgatcagaggtggcagaggcatgtggaggagacagcctctaaggccggctcgtaacacagcgcctcccgagctcaccaacacccaccagccaacgccgaaggattgcgccgaggtcaagagtatgattgccgatgtcgccaatttcccacccgaactcgtagacattgttatggactttgcagagtactgggcttgctccgtcgccgccatcgactactcagtcactgcccaagacggcactggagaacgtaaagtccttggtggacacggccatgaggatcagtttctcctgcgcacggagccagtaggtctcacgacttggcatgccgagaataaagagggttggcaatctgaggcgcctccgcgtaaactggaggtggaatactcgcgtccagagttggagcgcttcgtcgaaggccctccatccagcttggagcatccgttccggaagattgtcttcgacatcaccagtcatgaccaaggctggagcgccgaggttgctgatcatcacacgtttcgacctgcatatacctggttcgacgccggaatcgatcggtttgataaagggcatatatgctcggacagttgcaaggccagcgcatcaagcaacgcacgaaaggtgccaacgacctgcgcaatacgcccgatttggcctgtgctggaggataatgagggaagtgttaatttggaagctggatatcaccatgaattacatgcggtcggcgctcacaggatccaatgcaacagacatgccgagaggaattggcagcatcatcatgttgagtggtcgtccacggacagaattgaccccgactcgacagcggctgcagaactagtggagaacggccgtggccatgccactggtgatggcagcttcgtcaggaagctgaaagtcggcgacatggtgacgatctggggccgagcgagatacgcgggatgggtaaatcacgtacagaagattgaagttcgagtctattgggcgttgtaacattcatagcatggttcctccttgtcgattatcccctgactttttctccttgtgggagtcttatgattattaatatattgtatcacttccac

SEQ ID NO: 11543 - DNA, 1581 bp, Muscodor strobelii
  misc_feature: SGI cDNA ID NO. 563712
  misc_feature: Encodes the peptide sequence at SEQ ID NO 11544
atgaacacgcaacggtatggccttgcgaccttgcgcagggccggtgcctctttacgatcagcccaagcgacgaatatccaggcactctcgcgaagtcaaacggccgcaccacccgtgccgagagcttcagtcggtggtcatcgtgcgcgaaagctgcactcccagccttcgcgacgatccaatgccagccagaccgaggcctcgaacccagccatggcgtttccttgcctcgacgccctggagacgagatcggccacgctcgaagccaaatcgctagccagcggccccgagcccgcctacaccgccggcgcgaccgatgtcttccgctgccaagagcccctcctgctcgactggggcggagtcctccccgagttcgacgtcgcctacgaggcctggggcaccatgaacgccaacaagtccaacgtcatcctcgtgcacaccggcctgtccgcgtcttcgcacgcccactcgacccagagcaacccgcagccgggctggtgggagaagttcatcggccccggcggatgcatcgacacggacaagtacttcgtcatctgcaccaacgtcctcggcggctgcttcggatcgacggggcccagcagcatcgacccggctgacggccagcgatacgccactcggttccccatcctgactatggaggacatggtcagggctcagttcaggctgctcgaccatctgggtgtcgacaagctctacgccagcgtcggctccagcatgggcggcatgcagtccctcgcagccggcgtgctgttcccctcgagagttgggcgtgtcgtctccatcagcggatgcgcgcggagccatccctacagcatagccatgcgccatacccagcgacaggtcttgatgatggatcccaactggagtcgcggcttctactacggaaaggtcccgccacacgcaggcatgaagctggccagagagattgccacagtcacgtaccgctctggtccggagtgggagcagcgtttcggacggaggagagccgactcttccaagccccctgcattgtgcccagattttcttattgagacatacttggatcatgctggagaaaagttctgcttgacctacgatcccaacagtcttctatacgtcagcaaagccatggatctattcgaccttggccgtgccactcagcaagccgcagctcagcgaagaattgagcgggaagagatgctacaatccggttctcagcctcagccaaacgacccctcctgcagtctgacgctccccgattcgccctacacagagcagacagatgtcgaatccaaaatggacgaatctgtaacctcgccgccaggcaatgttcgcccgcccgcggacctcattgggggattagcaccactgcgagatacgccaactctagtaatgggcgtggccagtgacatcctcttcccagcttggcagcagcgtgaaatcgccagtgcgctacagcatgccggtaatagaaatgtcaatcatgttgagcttagcgaggaacagagtatgttcggacacgacaccttcctactcgacgtcaagaacgtcggcggtaatatcaagaacttcctcggatga

SEQ ID NO: 11544 - protein, 526 aa, Muscodor strobelii
  misc_feature: SGI Peptide ID NO. 563712
  misc_feature (182)..(439): Pfam Id: PF00561 Pfam Desc: alpha/beta hydrolase fold
  misc_feature (182)..(378): Pfam Id: PF00561 Pfam Desc: alpha/beta hydrolase fold
  misc_feature (1)..(525): NCBI GI: 85111755 Blast Desc: NCU00536 [Neurospora crassa OR74A] gi|28925853|gb|EAA34852.1| NCU00536 [Neurospora crassa OR74A]
  misc_feature (29)..(525): NCBI GI: 119183740 Blast Desc: CIMG_06764 [Coccidioides immitis RS]
  misc_feature (17)..(525): NCBI GI: 256732372 Blast Desc: [Nectria haematococca mpVI 77-13-4]
  misc_feature (1)..(526): NCBI GI: 154303190 Blast Desc: BC1G_09615 [Botryotinia fuckeliana B05.10] gi|150855078|gb|EDN30270.1| BC1G_09615 [Botryotinia fuckeliana B05.10]
  misc_feature (50)..(525): NCBI GI: 119479593 Blast Desc: homoserine O-acetyltransferase [Neosartorya fischeri NRRL 181] gi|119407979|gb|EAW17928.1| homoserine O-acetyltransferase [Neosartorya fischeri NRRL 181]
  misc_feature (2)..(525): NCBI GI: 149211203 Blast Desc: MGCH7_ch7g1062 [Magnaporthe grisea 70-15] gi|86197017|gb|EAQ71655.1| MGCH7_ch7g1062 [Magnaporthe grisea 70-15]
  misc_feature (50)..(525): NCBI GI: 70998092 Blast Desc: homoserine O-acetyltransferase [Aspergillus fumigatus Af293] gi|66851413|gb|EAL91739.1| homoserine O-acetyltransferase [Aspergillus fumigatus Af293] gi|159126487|gb|EDP51603.1| A1163]
  misc_feature (12)..(526): NCBI GI: 46105116 Blast Desc: FG00186.1 [Gibberella zeae PH-1]
  misc_feature (29)..(525): NCBI GI: 240109687 Blast Desc: Serine O-acetyltransferase, [Coccidioides posadasii C735 delta SOWgp]
  misc_feature (69)..(526): NCBI GI: 156058588 Blast Desc: SS1G_03306 [Sclerotinia sclerotiorum 1980] gi|154701093|gb|EDO00832.1| SS1G_03306 [Sclerotinia sclerotiorum 1980]
  misc_feature (113)..(525): SWISSPROT Homolog: EC 2.3.1.31 Homoserine O-acetyltransferase
MNTQRYGLATLRRAGASLRSAQATNIQALSRSQTAAPPVPRASVGGHRARKLHSQPSRRSNASQTEASNPAMAFPCLDALETRSATLEAKSLASGPEPAYTAGATDVFRCQEPLLLDWGGVLPEFDVAYEAWGTMNANKSNVILVHTGLSASSHAHSTQSNPQPGWWEKFIGPGGCIDTDKYFVICTNVLGGCFGSTGPSSIDPADGQRYATRFPILTMEDMVRAQFRLLDHLGVDKLYASVGSSMGGMQSLAAGVLFPSRVGRVVSISGCARSHPYSIAMRHTQRQVLMMDPNWSRGFYYGKVPPHAGMKLAREIATVTYRSGPEWEQRFGRRRADSSKPPALCPDFLIETYLDHAGEKFCLTYDPNSLLYVSKAMDLFDLGRATQQAAAQRRIEREEMLQSGSQPQPNDPSCSLTLPDSPYTEQTDVESKMDESVTSPPGNVRPPADLIGGLAPLRDTPTLVMGVASDILFPAWQQREIASALQHAGNRNVNHVELSEEQSMFGHDTFLLDVKNVGGNIKNFLG

SEQ ID NO: 11545 - DNA, 2641 bp, Muscodor strobelii
  misc_feature: SGI EST ID NO. CUFF.27437.0
  misc_feature: Variant of the nucleotide sequence at SEQ ID NO 11543
tcgaggcccatcgtccttctctagatcgcttttcgggctttcggtgctgacaaacccaaccatgaaatagctctctcgcagcaaggactattcgtccatcttggatttgtattctaattctacacggaaaaatacaccctcaggctttcggaatccagcgataccgccatgaacacgcaacggtatggccttgcgaccttgcgcagggccggtgcctctttacgatcagcccaagcgacgaatatccaggcactctcgcgaagtcaaacggccgcaccacccgtgccgagagcttcagtcggtggtcatcgtgcgcgaaagctgcactcccagccttcgcgacgatccaatgccagccagaccgaggcctcgaacccagccatggcgtttccttgcctcgacgccctggagacgagatcggccacgctcgaagccaaatcgctagccagcggccccgagcccgcctacaccgccggcgcgaccgatgtcttccgctgccaagagcccctcctgctcgactggggcggagtcctccccgagttcgacgtcgcctacgaggcctggggcaccatgaacgccaacaagtccaacgtcatcctcgtgcacaccggcctgtccgcgtcttcgcacgcccactcgacccagagcaacccgcagccgggctggtgggagaagttcatcggccccggcggatgcatcgacacggacaagtacttcgtcatctgcaccaacgtcctcggcggctgcttcggatcgacggggcccagcagcatcgacccggctgacggccagcgatacgccactcggttccccatcctgactatggaggacatggtcagggctcagttcaggctgctcgaccatctgggtgtcgacaagctctacgccagcgtcggctccagcatgggcggcatgcagtccctcgcagccggcgtgctgttcccctcgagagttgggcgtgtcgtctccatcagcggatgcgcgcggagccatccctacagcatagccatgcgccatacccagcgacaggtcttgatgatggatcccaactggagtcgcggcttctactacggaaaggtcccgccacacgcaggcatgaagctggccagagagattgccacagtcacgtaccgctctggtccggagtgggagcagcgtttcggacggaggagagccgactcttccaagccccctgcattgtgcccagattttcttattgagacatacttggatcatgctggagaaaagttctgcttgacctacgatcccaacagtcttctatacgtcagcaaagccatggatctattcgaccttggccgtgccactcagcaagccgcagctcagcgaagaattgagcgggaagagatgctacaatccggttctcagcctcagccaaacgacccctcctgcagtctgacgctccccgattcgccctacacagagcagacagatgtcgaatccaaaatggacgaatctgtaacctcgccgccaggcaatgttcgcccgcccgcggacctcattgggggattagcaccactgcgagatacgccaactctagtaatgggcgtggccagtgacatcctcttcccagcttggcagcagcgtgaaatcgccagtgcgctacagcatgccggtaatagaaatgtcaatcatgttgagcttagcgaggaacagagtatgttcggacacgacaccttcctactcgacgtcaagaacgtcggcggtaatatcaagaacttcctcggatgatcgtcgcggcgcattaacaaaagttcgacaaccgcttaacgagatcaacttgattccatctctgcctctcgtcaatctgaagatcccagagccatgaaaccgccaaaattgaacgcaatccccacaaactgaggggaagaattggagttttaaaaaaaagcgactctcatgtttgattctgctggggcgttttgatataaatcatgaccatgaaaatacttctgtctctcgagtcttgaccagtaaacgtaatatgacgatgatgaaaaggagtccacatgcttggggtatcattaagttgaacctcagctcaccatcgaccaacacaacgcggctacccattcggatgcccattcgggatcatgaataccacatacgaagtgcctcgcgatggttccggcgcaacttgtcttgcccagtgtcgataatcataattcccacatcaccaaagataaccagcaacatggaagccgaccaaatctacgtcgtcacaatcaagcgcaatatcaatgctgtgaaacatcccgactgccatccagtcacaaatggtctacattgaaccaaccaagtgcatgcccaaggactctcttcgccagaacatgacctgttctctcaggtaatggctgcgatgactcggagaatttgaactaaactcgtattcgggtgcatacgtaagccaatgaaatatctagatagtcgttagggcctagtgagtagttataagttaatgaagatcatactggtttaggcagattaagaagaaagccaagacatatatatcccgatcttgtttaaatctagaagttaagcctgcataaggttattaaaatgacgtcagttttaatataatgttaatttataatgctttaataatattatgactcatattttt

SEQ ID NO: 11546 - DNA, 789 bp, Muscodor strobelii
  misc_feature: SGI cDNA ID NO. 563713
  misc_feature: Encodes the peptide sequence at SEQ ID NO 11547
atggccaaatacaacaagctcgccggaaagcacatcgccgtcatcggcggatcaaggggtattgggcgtggagtagtcgaggcatcgatcgagtccggtgcccgcgtgacactcacaggttcctctcaagcaagcgccgacaaagcggtctcgtccatcaaaaccgagtatccatctgcttccctagttggtctagggattgatctgtccaccacgacgatagagaaggatctcgatgcaatgttatcacgtgctggagagctgggcggtgaaatcgaccatatcgtcttcacagccgccgataacttgacgctgggaacattggacaatctcgaggcggatatggcgatgaaggctgcgcagttgcgattccttgtccccgttatgctaggaaaagtggcgccgaggcatctgggaaatgctggacaggggaaggacaagagtctcactctgacgtctgggcgaatagcagataagcctcacaaggattggtctctgattgcgtattttgcggcgggattgttaggattgacgcgaaacttagcccttgatctttctcccattcgagtcaacgccgtcgcgccagggccagtcaacacaggcctctgggacccttattacaacagcgttgaggagcgcaaggcaggcttggcgaagatgttcggaaatgtgcccacgggaaaggcaggcatagttgaggaggttgccgaggcctatgtctatcttcttcgcgattcgaacgctacgggcgaggtcgttcgtaccaggagcggtgatcatctaatttag

SEQ ID NO: 11547 - protein, 262 aa, Muscodor strobelii
  misc_feature: SGI Peptide ID NO. 563713
  misc_feature (3)..(261): NCBI GI: 154310582 Blast Desc: BC1G_06765 [Botryotinia fuckeliana B05.10] gi|150851305|gb|EDN26498.1| BC1G_06765 [Botryotinia fuckeliana B05.10]
  misc_feature (4)..(262): NCBI GI: 145237954 Blast Desc: An07g05440 [Aspergillus niger] gi|134076101|emb|CAK39460.1| protein product [Aspergillus niger]
  misc_feature (3)..(258): NCBI GI: 169612836 Blast Desc: SNOG_09545 [Phaeosphaeria nodorum SN15] gi|111061690|gb|EAT82810.1| SNOG_09545 [Phaeosphaeria nodorum SN15]
  misc_feature (12)..(262): NCBI GI: 121700462 Blast Desc: short-chain dehydrogenase [Aspergillus clavatus NRRL 1] gi|119396638|gb|EAW07070.1| short-chain dehydrogenase [Aspergillus clavatus NRRL 1]
  misc_feature (12)..(262): NCBI GI: 70983914 Blast Desc: oxidoreductase, short chain dehydrogenase/reductase family [Aspergillus fumigatus Af293] gi|66845109|gb|EAL85445.1| oxidoreductase, short chain dehydrogenase/reductase family Af293]
  misc_feature (12)..(262): NCBI GI: 159123537 Blast Desc: oxidoreductase, short chain dehydrogenase/reductase family [Aspergillus fumigatus A1163]
  misc_feature (3)..(258): NCBI GI: 189188664 Blast Desc: short chain dehydrogenase [Pyrenophora tritici-repentis Pt-1C-BFP] gi|187972277|gb|EDU39776.1| short chain dehydrogenase [Pyrenophora tritici-repentis Pt-1C-BFP]
  misc_feature (12)..(262): NCBI GI: 119485743 Blast Desc: peroxisomal 2,4-dienoyl-CoA reductase, [Neosartorya fischeri NRRL 181] gi|119410370|gb|EAW20317.1| peroxisomal 2,4-dienoyl-CoA reductase, [Neosartorya fischeri NRRL 181]
  misc_feature (12)..(250): NCBI GI: 115383944 Blast Desc: conserved [Aspergillus terreus NIH2624] gi|114196211|gb|EAU37911.1| conserved [Aspergillus terreus NIH2624]
  misc_feature (12)..(262): NCBI GI: 121720082 Blast Desc: short-chain dehydrogenase [Aspergillus clavatus NRRL 1] gi|119404951|gb|EAW15313.1| short-chain dehydrogenase [Aspergillus clavatus NRRL 1]
  misc_feature (31)..(203): SWISSPROT Homolog: EC 1.1.1.184 Carbonyl reductase (NADPH)
MAKYNKLAGKHIAVIGGSRGIGRGVVEASIESGARVTLTGSSQASADKAVSSIKTEYPSASLVGLGIDLSTTTIEKDLDAMLSRAGELGGEIDHIVFTAADNLTLGTLDNLEADMAMKAAQLRFLVPVMLGKVAPRHLGNAGQGKDKSLTLTSGRIADKPHKDWSLIAYFAAGLLGLTRNLALDLSPIRVNAVAPGPVNTGLWDPYYNSVEERKAGLAKMFGNVPTGKAGIVEEVAEAYVYLLRDSNATGEVVRTRSGDHLI

SEQ ID NO: 11548 - DNA, 883 bp, Muscodor strobelii
  misc_feature: SGI EST ID NO. CUFF.27449.0
  misc_feature: Variant of the nucleotide sequence at SEQ ID NO 11546
catcgatcgagtccggtgcccgcgtgacactcacaggttcctctcaagcaagcgccgacaaagcggtctcgtccatcaaaaccgagtatccatctgcttccctagttggtctagggattgatctgtccaccacgacgatagagaaggatctcgatgcaatgttatcacgtgctggagagctgggcggtgaaatcgaccatatcgtcttcacagccgccgataacttgacgctgggaacattggacaatctcgaggcggatatggcgatgaaggctgcgcagttgcgattccttgtccccgttatgctaggaaaagtggcgccgaggcatctgggaaatgctggacaggggaaggacaagagtctcactctgacgtctgggcgaatagcagataagcctcacaaggattggtctctgattgcgtattttgcggcgggattgttaggattgacgcgaaacttagcccttgatctttctcccattcgagtcaacgccgtcgcgccagggccagtcaacacaggcctctgggacccttattacaacagcgttgaggagcgcaaggcaggcttggcgaagatgttcggaaatgtgcccacgggaaaggcaggcatagttgaggaggttgccgaggcctatgtctatcttcttcgcgattcgaacgctacgggcgaggtcgttcgtaccaggagcggtgatcatctaatttagacactggagactggttggcattgatccgccatatctcctccctaaaagagttctagaagtcaagttgtggaaatcaagtacaggttgagacagaggcaagctcatgagcagagaagggggcaacgggttgaatatggaagaggggggagaacctgagccgggtacagaaatttcag

SEQ ID NO: 11549 - DNA, 2082 bp, Muscodor strobelii
  misc_feature: SGI cDNA ID NO. 563714
  misc_feature: Reduced expression when VOC is produced
  misc_feature: Encodes the peptide sequence at SEQ ID NO 11550
atgggaaacgctccctccatcgagggtcccaggaagggctcaaggacgactcaaaagctgtccaaaccccgaactggcaatcctgctgcagctggtctgttgaaaccgagtggtggctctgatctgacccatcgtccttccatatccgccataggaagacgtctatcgctgccgtacggctcaaaaccttcaccttcaacccgagatctcaccgtggatgctaatacactggaggcgttattgggtgggaacgaagagtcgacacccggcgagcgatcttcacgattattgtttcgatcaaactcgtcccagcagcagaggagccagagtttgggagctggggccgctcaacaacgaggccggcgcatgacgagggccaattcgattcgcgcagaatcagatgacggccaacctcctttatcacgctcactgtcaagaaatgtgtcacccacctgcctctggaacagcaacccctataccccgaaccaattcagacgcttccctatatacaccgatgcgaaggagatccctgatgactcctggactcgcaactcgcagacaggtgcatacaaacttggtaccttgaggattacaaatggcagtccggccagaacaccggcgcgagaaaacgccgaggaaagcatgtgcggcaagaaagggtcaagcattgctaaggtttcaagcgagtattttgagattagcatcaaaagggaagagcaacgagagaataagaccgataattctaaccttctgccttctgttaccactaccgtcacatccgggctaacaatcagtaagtcattcgctgtggccaccgaccaggctacaatgcctgcggtaccgcttgtcaggagccgacttgaggaacttgagccaagatcgccagaactacagactaccagcaaacacactgctatggaagacgagttatttgatgatgcagccacagactatccggaagaaatcttggatatccgcaatgatcctaatgcgaaatctcgctcttctcgtccaggctctgcgatcaagagcgctcatcccggagaaatcaatcgatccgatagtggaatcgtggctagtccgacgttggaaactcctcacaaagcgttatcgaaagccgattctggttatagctcgaacgtttctcttcgctcgttttcttcaaagcgaaacgacaatgggagcgaacctcaaaccacagagaatgaatcgcaacgagcgagagttttccggctagcagaactgccgcccaggacgcgaggctcccgctccagctcccgcaatcgtcctgaattagtggtgcaggtgtcgtcgccaggcgaccccccaccgccagttccgaagaaggactcaccgtatggacgtagttacggtgaaacagcccgtaagccaaatctgggattgacaacgagtcttcccgtcgagcccaacacgtcagcttcgatatcaaatagagcgaaggccacttcgaatagcattgtgggctcgtcgcgagcttcgccgctaagtccaaatagtgcgaccaccatgccctcgcccctaagcatcagcaatgctactcgcaagcaaggacggcttcaacgacttctcagtagcgcccgcgtccctctgactgtccatgttacacatgctttggacgccgaagtcgatgttcctcccgttcctaaagcagtacaagagaaattgcgcgagcataccgcaactttaccggagtcctcgttagacccagaaattggcccaaatgctcctccaagtacggcgacacagccagacgcatcaactcttcacagtaatgtttcgacatcacaaaaaacggtccccaaacttcacgatcggaagtcgaatctcaaacttcactcaatcagttcatcgattacacgaacagcatcttcctttttgtccaagaattccatcaggacctctttgcataacaagacaagactctctcaggaaaaggacagcaaggcatcttaccatacctcagatatcagtgaaggcactagcgaattcgctgtcctgcgcgaagacatggagatcaatatcagtgtcttcgcccagacttctgaggaagccatcaactaa

SEQ ID NO: 11550 - protein, 693 aa, Muscodor strobelii
  misc_feature: SGI Peptide ID NO. 563714
  misc_feature (188)..(645): NCBI GI: 171684839 Blast Desc: protein product [Podospora anserina] gi|170942380|emb|CAP68032.1| protein product [Podospora anserina]
  misc_feature (188)..(559): NCBI GI: 116193473 Blast Desc: CHGG_06454 [Chaetomium globosum CBS 148.51] gi|88182367|gb|EAQ89835.1| CHGG_06454 [Chaetomium globosum CBS 148.51]
  misc_feature (188)..(386): NCBI GI: 145610143 Blast Desc: MGG_12617 [Magnaporthe grisea 70-15] gi|145017513|gb|EDK01876.1| MGG_12617 [Magnaporthe grisea 70-15]
  misc_feature (188)..(386): NCBI GI: 149209873 Blast Desc: MGCH7_ch7g418 [Magnaporthe grisea 70-15] gi|86196373|gb|EAQ71011.1| MGCH7_ch7g418 [Magnaporthe grisea 70-15]
  misc_feature (186)..(570): NCBI GI: 261353120 Blast Desc: conserved [Verticillium albo-atrum VaMs.102]
  misc_feature (321)..(570): NCBI GI: 85113467 Blast Desc: NCU02172 [Neurospora crassa OR74A] gi|28926316|gb|EAA35295.1| NCU02172 [Neurospora crassa OR74A]
  misc_feature (186)..(390): NCBI GI: 256733505 Blast Desc: NECHADRAFT_59040 [Nectria haematococca mpVI 77-13-4]
  misc_feature (186)..(390): NCBI GI: 46128975 Blast Desc: FG08789.1 [Gibberella zeae PH-1]
  misc_feature: Useful for introducing or modulating the production of volatile compounds
MGNAPSIEGPRKGSRTTQKLSKPRTGNPAAAGLLKPSGGSDLTHRPSISAIGRRLSLPYGSKPSPSTRDLTVDANTLEALLGGNEESTPGERSSRLLFRSNSSQQQRSQSLGAGAAQQRGRRMTRANSIRAESDDGQPPLSRSLSRNVSPTCLWNSNPYTPNQFRRFPIYTDAKEIPDDSWTRNSQTGAYKLGTLRITNGSPARTPARENAEESMCGKKGSSIAKVSSEYFEISIKREEQRENKTDNSNLLPSVTTTVTSGLTISKSFAVATDQATMPAVPLVRSRLEELEPRSPELQTTSKHTAMEDELFDDAATDYPEEILDIRNDPNAKSRSSRPGSAIKSAHPGEINRSDSGIVASPTLETPHKALSKADSGYSSNVSLRSFSSKRNDNGSEPQTTENESQRARVFRLAELPPRTRGSRSSSRNRPELVVQVSSPGDPPPPVPKKDSPYGRSYGETARKPNLGLTTSLPVEPNTSASISNRAKATSNSIVGSSRASPLSPNSATTMPSPLSISNATRKQGRLQRLLSSARVPLTVHVTHALDAEVDVPPVPKAVQEKLREHTATLPESSLDPEIGPNAPPSTATQPDASTLHSNVSTSQKTVPKLHDRKSNLKLHSISSSITRTASSFLSKNSIRTSLHNKTRLSQEKDSKASYHTSDISEGTSEFAVLREDMEINISVFAQTSEEAIN

SEQ ID NO: 11551 - DNA, 4468 bp, Muscodor strobelii
  misc_feature: SGI EST ID NO. CUFF.27487.0
  misc_feature: Variant of the nucleotide sequence at SEQ ID NO 11549
ccaaggtcaagggctcttctgacctgttcctctgaccaccttgtcacttactcaccacctccctcgctcctccagtcgtcccttttgcttgtctcaaatgtcaaagcctgtttctgaacccaaatgagaaccaaagtaaaccctcttccttcggtgattgtcatctcatttcttagaccagccaaccataataatataatcgcctccttcctaccatcatcatccaagcaccttagcttcttgtcatggttacgactcttcgtattcacgttccaccacttcaacgaagcatatacaccaacttccatcgtacacttgagtagacctggtgatgtaggctatcttctgcatattgtagccaacatatcaaccaagcttaatgtagattattggcccggcttagccctgtcccgcctcatcccccaaccccatcaagcctcgtccatcctcgctagtcataccccggccactatagctcatgcttcctgacgtctagctttaagtcacccactctgctccggcttgattctgcttgatatcctcatttacatcccgtgtgttctgcggatttgtctgtcactcggtcgatggcatccgcggcatggatcaattaatctatgtatagcaatctaactgccgctcctcggctcaagtcttggagcacctgccaacatcatcatgggaaacgctccctccatcgagggtcccaggaagggctcaaggacgactcaaaagctgtccaaaccccgaactggcaatcctgctgcagctggtctgttgaaaccgagtggtggctctgatctgacccatcgtccttccatatccgccataggaagacgtctatcgctgccgtacggctcaaaaccttcaccttcaacccgagatctcaccgtggatgctaatacactggaggcgttattgggtgggaacgaagagtcgacacccggcgagcgatcttcacgattattgtttcgatcaaactcgtcccagcagcagaggagccagagtttgggagctggggccgctcaacaacgaggccggcgcatgacgagggccaattcgattcgcgcagaatcagatgacggccaacctcctttatcacgctcactgtcaagaaatgtgtcacgtacgtcggtcaattacgatttatcatcatatgaggccagtcggatgttgaacttagtccacgaaacttcactcgaagatatatctgttgcgtctgaaagccaaatacaagtctctgtctcacgaaggcagagctatacacggtctcatcagccacctgcctctggaacagcaacccctataccccgaaccaattcagacgcttccctatatacaccgatgcgaaggagatccctgatgactcctggactcgcaactcgtcctactccggtggacgtacctgcaacggtgaaggcaaagcccagacatagtcttccggccacaccaatccggaaaagttctctcgagacgatgacaattgacatgcccccatttccgactcatccatttgatcccagttcaataccccgcgtcataactccatctgaaggcgaatataggcagacaggtgcatacaaacttggtaccttgaggattacaaatggcagtccggccagaacaccggcgcgagaaaacgccgaggaaagcatgtgcggcaagaaagggtcaagcattgctaaggtttcaagcgagtattttgagattagcatcaaaagggaagagcaacgagagaataagaccgataattctaaccttctgccttctgttaccactaccgtcacatccgggctaacaatcagtaagtcattcgctgtggccaccgaccaggctacaatgcctgcggtaccgcttgtcaggagccgacttgaggaacttgagccaagatcgccagaactacagactaccagcaaacacactgctatggaagacgagttatttgatgatgcagccacagactatccggaagaaatcttggatatccgcaatgatcctaatgcgaaatctcgctcttctcgtccaggctctgcgatcaagagcgctcatcccggagaaatcaatcgatccgatagtggaatcgtggctagtccgacgttggaaactcctcacaaagcgttatcgaaagccgattctggttatagctcgaacgtttctcttcgctcgttttcttcaaagcgaaacgacaatgggagcgaacctcaaaccacagagaatgaatcgcaacgagcgagagttttccggctagcagaactgccgcccaggacgcgaggctcccgctccagctcccgcaatcgtcctgaattagtggtgcaggtgtcgtcgccaggcgaccccccaccgccagttccgaagaaggactcaccgtatggacgtagttacggtgaaacagcccgtaagccaaatctgggattgacaacgagtcttcccgtcgagcccaacacgtcagcttcgatatcaaatagagcgaaggccacttcgaatagcattgtgggctcgtcgcgagcttcgccgctaagtccaaatagtgcgaccaccatgccctcgcccctaagcatcagcaatgctactcgcaagcaaggacggcttcaacgacttctcagtagcgcccgcgtccctctgactgtccatgttacacatgctttggacgccgaagtcgatgttcctcccgttcctaaagcagtacaagagaaattgcgcgagcataccgcaactttaccggagtcctcgttagacccagaaattggcccaaatgctcctccaagtacggcgacacagccagacgcatcaactcttcacagtaatgtttcgacatcacaaaaaacggtccccaaacttcacgatcggaagtcgaatctcaaacttcactcaatcagttcatcgattacacgaacagcatcttcctttttgtccaagaattccatcaggacctctttgcataacaagacaagactctctcaggaaaaggacagcaaggcatcttaccatacctcagatatcagtgaaggcactagcgaattcgctgtcctgcgcgaagacatggagatcaatatcaggtcaacaacattcactacttcagcatcgagtaatcgaggacgtacagtgtctctttctgcaccatcacacggggtcctagatacgacaggagtgggtagcacagatcagtacagcaaccgtacacccgagaacaaagtgtcttcgcccagacttctgaggaagccatcaactaatccttactcgatttcgaaaacaccgccaccacctgtgagcatgcggacgaggactttaggatcatatcgagttccgccacccttgagggcacgatcaacacctccggtattatcgcagaaatcaagtcgggaagccatccagagctatccgccaaccggcgccggattatcgcgacggacaagccaagactcactgtatgcctacaccccagctcagatccgagaatttttgaatggtacagtttcaacgcctgccatgaagaacaatttctctatggatgttcagtcttcggcaaaggaatacagagttcccgattggagcacgcaaccagatttaggctcatcgcagcgcccatcctttgacagaagtcgacgaagctcgatttcgagccagaaaagtgggcagagcgttcccaatcatagacagccggagctgccacctcaccgtgctcttcagcatcgctcaagttatgatggatattcgtacttgaggcgagacaacggtccatatccatcgcttcactcagacaccgctgcgcagaatgcttgggaaacacagcatgctgtgatccagcatgtcgatcagtctcgacaatatgtgccgcatgtatcaagaacacattcgcggcatcgtagcctggatcgacaagggcctactgcaccataccgtatactccacagctataactcgccagcttatcggaatgcaccgatttggagctaataattcgatttccacgatagcccccaattacttcctttcagccgccacaattttctaactttcgcacaatctgatactgaagcatttgcaaacgtcagcgtactcgacttgtattgcagttcaaaccatctcggtgctttttaagcctttccttcaacgatcgcactcctcgcggatggtaaacgagtgcttgcatctctgccaatttcctttgttttaagccataggccatcgaagccaaccaagacggcgttttgtttcgttctggacgatgacagcaacaattaatgacactaggcaacggtcagggaataggatttataccaggattagagtgggcttgcatgaaggatgctgcaacaagcagatttgataccccgttctccaccctttcatgacatcgggagtcatgaataggcagtatactacagaagccctttgtatatacccagataatgacataagatatatagtgatttaccaagttcctgcattggctctactgccttctgct

SEQ ID NO: 11552 - DNA, 1176 bp, Muscodor strobelii
  misc_feature: SGI cDNA ID NO. 563715
  misc_feature: Reduced expression when VOC is produced
  misc_feature: Encodes the peptide sequence at SEQ ID NO 11553
atggccgccaccgtcgcccacagccagcagctctcctcagccatatccggcgtaggacagagccccggctccagctccatcgccgccaatgtcgagattggcggggtgtcgcagcagggcggcgatcgatccgcggctgcggggcctagagtgccaccgcagcaccggcgagtgaagctttccgatttctcactcgtccgaaccctcggtaccgggacctttgctcgtgtgtgtctggtgcggcccgctgtgggctccgaccaagacaaggaaaaggtctttgcgctgaagatactgcgcaagactgaggtcgtcaaattaaaacagatcgaccatgtgcgtgacgagcgccggattctcagcgacgtcgccggccatcctttcatcacggaactcatcactacgttttccgatcacgactccctttacatgctactcgactacgtccctggcggcgaactgttcagctatctcagaagacaccgccgcttcccggaggagtgggctcagttctatgccgccgagattgtgttagtcctagaatacctgcacgagcaccagggcggcgtggcatatagggatttaaagcccgaaaacctattgctggatggtcagggccatgtcaaactagtggacttcggctttgccaagagattagggagcaaagatgacagaccggttgagacatatacactttgcggcacccccgaatatcttgctcccgaggtcatccagaacaaaggccacactactgcagtcgattggtgggcgctgggaatcctgatctacgagtttctgactggataccctccattttggcatcagaacccaattgaaatatacaaacaaattatcgagaaaccagtgctctttccccaggagccgcccgtctcccccaacgcacaacatcttatcagatccttctgcacagttgaccggtcaaggcggttaggcaacataagtggcggctccggccgagtcaaatctcatccgttcttccacggcatagactgggaagcattataccaccgccgagtccggcccccgatccagccgaatgtgcggtatcccggggacgcgcagtgcttcgacatttatcccgaagacgacgggaagcgggacccgtacacggagtcgatgagatctcagttcgaccatttgttcgacagcttctag

SEQ ID NO: 11553 - protein, 391 aa, Muscodor strobelii
  misc_feature: SGI Peptide ID NO. 563715
  misc_feature (63)..(333): Pfam Id: PF00069 Pfam Desc: Protein kinase domain
  misc_feature (199)..(286): Pfam Id: PF07714 Pfam Desc: Protein tyrosine kinase
  misc_feature (1)..(391): NCBI GI: 39970731 Blast Desc: MGG_02832 [Magnaporthe grisea 70-15] gi|149210219|ref|XP_001522484.1| MGCH7_ch7g587 [Magnaporthe grisea 70-15] gi|27802543|gb|AAO21201.1| cAMP-dependent protein
  misc_feature (56)..(391): NCBI GI: 171684827 Blast Desc: protein product [Podospora anserina] gi|170942374|emb|CAP68026.1| protein product [Podospora anserina]
  misc_feature (1)..(391): NCBI GI: 46128703 Blast Desc: FG08729.1 [Gibberella zeae PH-1]
  misc_feature (1)..(391): NCBI GI: 256733499 Blast Desc: [Nectria haematococca mpVI 77-13-4]
  misc_feature (1)..(391): NCBI GI: 261353637 Blast Desc: protein kinase DC2 [Verticillium albo-atrum VaMs.102]
  misc_feature (56)..(391): NCBI GI: 225685571 Blast Desc: catalytic subunit of the PKA [Botryotinia fuckeliana]
  misc_feature (58)..(391): NCBI GI: 45360225 Blast Desc: cAMP-dependent protein kinase A [Sclerotinia sclerotiorum]
  misc_feature (56)..(391): NCBI GI: 164428522 Blast Desc: serine/threonine-protein kinase PRKX [Neurospora crassa OR74A] gi|157072180|gb|EAA36586.2| serine/threonine-protein kinase PRKX [Neurospora crassa OR74A]
  misc_feature (58)..(391): NCBI GI: 156058320 Blast Desc: SS1G_03171 [Sclerotinia sclerotiorum 1980] gi|154700959|gb|EDO00698.1| SS1G_03171 [Sclerotinia sclerotiorum 1980]
  misc_feature (58)..(391): NCBI GI: 169612898 Blast Desc: SNOG_09577 [Phaeosphaeria nodorum SN15] gi|160702607|gb|EAT82842.2| SNOG_09577 [Phaeosphaeria nodorum SN15]
  misc_feature (56)..(372): SWISSPROT Homolog: EC 2.7.11.1 Non-specific serine/threonine protein kinase
  misc_feature: Useful for introducing or modulating the production of volatile compounds
MAATVAHSQQLSSAISGVGQSPGSSSIAANVEIGGVSQQGGDRSAAAGPRVPPQHRRVKLSDFSLVRTLGTGTFARVCLVRPAVGSDQDKEKVFALKILRKTEVVKLKQIDHVRDERRILSDVAGHPFITELITTFSDHDSLYMLLDYVPGGELFSYLRRHRRFPEEWAQFYAAEIVLVLEYLHEHQGGVAYRDLKPENLLLDGQGHVKLVDFGFAKRLGSKDDRPVETYTLCGTPEYLAPEVIQNKGHTTAVDWWALGILIYEFLTGYPPFWHQNPIEIYKQIIEKPVLFPQEPPVSPNAQHLIRSFCTVDRSRRLGNISGGSGRVKSHPFFHGIDWEALYHRRVRPPIQPNVRYPGDAQCFDIYPEDDGKRDPYTESMRSQFDHLFDSF

SEQ ID NO: 11554 - DNA, 2794 bp, Muscodor strobelii
  misc_feature: SGI EST ID NO. CUFF.27678.0
  misc_feature: Variant of the nucleotide sequence at SEQ ID NO 11552
tctccatgcatacttctgctcttcggcccatcctttttcagatacttcaggacgcatttggacgaagcctgcgaagcataggatgaagtatcagcccacattgccattgttattaagcaattgagcgctcacgatatctttccatttctagcaattgtcaatgatttgcttgacctcggttcatttgctcttgcagatcaggggatcaagatatcttttataatagccaggagcccccctgatgtcacgtagatgagcgagctcaggcccagccttactagtcgcatcgtagtaaaataccttagctaacctaccgcctacctccctctatggtgttgaacctgagacgcacaccctacacgccaactctcgtaagttgtcaacttccaaatccgtctgcacggcatctcatcgcaagagtcaagactgccgtcctcgtctaaagatatacctcgatttagcactgcactttgcctatctaacatgttataatatgggccggcgtctcccccgcctcgcccgcctctgcccgccaacctggatccaagaagagccaggccgaattgagaaccaccaggctcataacgtcattgcttgatagcccgcatctgcccttgctatcgtcatcccagctccgcgtcctcgtcgtgcgttggtagtagtaatcttgaattatggccgtgtttctcgttgaagcttgactcttttttttctttctgatttccccaattagcttttgtcattcgcgccattcgtcgacgctgctgctgctagagtccaacggtcgacttacatgtgtttattgcctcagcagcgcctctcgagacgacgacgcactatgactaccgctggatggtagacactcacgagagtgctgacgaggactccgcagagcacagccgcccactcaaactggtcccccgctgggttcgcattccatgtggatctgacttatgtacccttcagctcctcatcgccccctcgttgcccaccgcaccatctcctatacttaacctgaaccgcgccgcgccaggctggtgcgtcccctctcacctctgccaccgccgacgaggcccgatcacaccatggccgccaccgtcgcccacagccagcagctctcctcagccatatccggcgtaggacagagccccggctccagctccatcgccgccaatgtcgagattggcggggtgtcgcagcagggcggcgatcgatccgcggctgcggggcctagagtgccaccgcagcaccggcgagtgaagctttccgatttctcactcgtccgaaccctcggtaccgggacctttgctcgtgtgtgtctggtgcggcccgctgtgggctccgaccaagacaaggaaaaggtctttgcgctgaagatactgcgcaagactgaggtcgtcaaattaaaacagatcgaccatgtgcgtgacgagcgccggattctcagcgacgtcgccggccatcctttcatcacggaactcatcactacgttttccgatcacgactccctttacatgctactcgactacgtccctggcggcgaactgttcagctatctcagaagacaccgccgcttcccggaggagtgggctcagttctatgccgccgagattgtgttagtcctagaatacctgcacgagcaccagggcggcgtggcatatagggatttaaagcccgaaaacctattgctggatggtcagggccatgtcaaactagtggacttcggctttgccaagagattagggagcaaagatgacagaccggttgagacatatacactttgcggcacccccgaatatcttgctcccgaggtcatccagaacaaaggccacactactgcagtcgattggtgggcgctgggaatcctgatctacgagtttctgactggataccctccattttggcatcagaacccaattgaaatatacaaacaaattatcgagaaaccagtgctctttccccaggagccgcccgtctcccccaacgcacaacatcttatcagatccttctgcacagttgaccggtcaaggcggttaggcaacataagtggcggctccggccgagtcaaatctcatccgttcttccacggcatagactgggaagcattataccaccgccgagtccggcccccgatccagccgaatgtgcggtatcccggggacgcgcagtgcttcgacatttatcccgaagacgacgggaagcgggacccgtacacggagtcgatgagatctcagttcgaccatttgttcgacagcttctaggctcggtttcgacatctacttatctacttatctatctatcacgaaagttcattgtatatgggcggcgttcgagagcattggcggaagcatttgacgagttgggcaatgatcggcttatctaggcgatactgcaactaactatgtgcggcctgagagtggaaaagtgatcggtaatggaaggctccagcattgtttgagggggcgtaatctgaggtcacacggttaaaaattccacatcccgtataagcgccattttgtattatagaaatttcaagattcagcattatttggatcgtaatggcgctttatatagggtaatgagtcaatgagaggattcaatgagagcttacgacctgggttcgaagaagaagatgtggactaagaaggacggtgaaggacagcatgacgacctatcctcctcttcgtccatcgacaagtagtcattccaaatgctgagacatttcatctcatgcataatatttagccctcaagtacttgataccggagtataaagtcatgaagcgactgtgccc

SEQ ID NO: 11555 - DNA, 174 bp, Muscodor strobelii
  misc_feature: SGI cDNA ID NO. 563716
  misc_feature: Reduced expression when VOC is produced
  misc_feature: Encodes the peptide sequence at SEQ ID NO 11556
atgttcaacaacctcacgagcctcgtccagaaggcgtcgacggcggcgcagcagctgatggacccgatgcagggcctcaacctgaccaacgcggaccgcaacccgtccaaggcctcgctcttccagcaccagttccgcctgcccgcctcccagacgccgctgtacgagatcccc

SEQ ID NO: 11556 - protein, 58 aa, Muscodor strobelii
  misc_feature: SGI Peptide ID NO. 563716
  misc_feature (1)..(57): NCBI GI: 46128701 Blast Desc: FG08728.1 [Gibberella zeae PH-1]
  misc_feature (4)..(57): NCBI GI: 171684829 Blast Desc: protein product [Podospora anserina] gi|170942375|emb|CAP68027.1| protein product [Podospora anserina]
  misc_feature (4)..(57): NCBI GI: 85074907 Blast Desc: NCU00681 [Neurospora crassa OR74A] gi|28927634|gb|EAA36585.1| NCU00681 [Neurospora crassa OR74A]
  misc_feature (4)..(57): NCBI GI: 149210221 Blast Desc: MGCH7_ch7g588 [Magnaporthe grisea 70-15] gi|86196543|gb|EAQ71181.1| MGCH7_ch7g588 [Magnaporthe grisea 70-15]
  misc_feature (4)..(57): NCBI GI: 39970733 Blast Desc: MGG_02833 [Magnaporthe grisea 70-15] gi|145017352|gb|EDK01715.1| MGG_02833 [Magnaporthe grisea 70-15]
  misc_feature (4)..(57): NCBI GI: 261353638 Blast Desc: GTPase-activating protein GYP2 [Verticillium albo-atrum VaMs.102]
  misc_feature (16)..(57): NCBI GI: 116193263 Blast Desc: CHGG_06349 [Chaetomium globosum CBS 148.51] gi|88182262|gb|EAQ89730.1| CHGG_06349 [Chaetomium globosum CBS 148.51]
  misc_feature (1)..(57): NCBI GI: 154296632 Blast Desc: BC1G_12724 [Botryotinia fuckeliana B05.10] gi|150843307|gb|EDN18500.1| BC1G_12724 [Botryotinia fuckeliana B05.10]
  misc_feature (1)..(57): NCBI GI: 156059020 Blast Desc: SS1G_03522 [Sclerotinia sclerotiorum 1980] gi|154701309|gb|EDO01048.1| SS1G_03522 [Sclerotinia sclerotiorum 1980]
  misc_feature (6)..(57): NCBI GI: 169777997 Blast Desc: [Aspergillus oryzae RIB40] gi|83772201|dbj|BAE62331.1| protein product [Aspergillus oryzae]
  misc_feature: Useful for introducing or modulating the production of volatile compounds
MFNNLTSLVQKASTAAQQLMDPMQGLNLTNADRNPSKASLFQHQFRLPASQTPLYEIP

SEQ ID NO: 11557 - DNA, 629 bp, Muscodor strobelii
  misc_feature: SGI EST ID NO. CUFF.27471.0
  misc_feature: Variant of the nucleotide sequence at SEQ ID NO 11555
gggcaggttccgtcataccgtgagtggcagccgagggcagctaaggcggacgcgctaaggtgctgctgcttcgttttggtgttcagatgcacggggacggcaacagcagctggtcgtggtcgtagcgtgcctgccgaccagcctcagctcccccccagctcctccaaccccacgacatccaacgacaccgctcgacatcctcatcctcatcctcatcgccttcgcgtagctacctacctacctacctacataccttgcagacacaccacgcaacgtctcgtctcgacctacaccgagaccgaccagcgctctttcgtcccttcgtcccttcgtccccttcgtccgccgcccgtgccgcccgcgtctcgacacaggcgctgtcgacagagcgctatgccaccgacgacgacgtctacctagcaccgaagtcgaggggctccgaccgcgctgcccagcatgttcaacaacctcacgagcctcgtccagaaggcgtcgacggcggcgcagcagctgatggacccgatgcagggcctcaacctgaccaacgcggaccgcaacccgtccaaggcctcgctcttccagcaccagttccgcctgcccgcctcccagacgccgctgtacgagatccc

SEQ ID NO: 11558 - DNA, 804 bp, Muscodor strobelii
  misc_feature: SGI cDNA ID NO. 563717
  misc_feature: Elevated expression when VOC is produced
  misc_feature: Encodes the peptide sequence at SEQ ID NO 11559
atgaagttctcaagtattgtcaccaccatttcggtggctgctgccggcgtgtacggccagcctagctatcccagctatcctcagggcgtcggcgtcgacaagttccccacgaccttcgtcggcggcgtcaaagttatcgatactcaacttgttcgcgatgctcgcaaagtaattcagaacttcgacggcttcctgtacaagcacagcatgcgaacatggcttttcggagctgctgccattaacgccaataagacactccagaagacaatcgacattgagctacatgctgttgcgactgttctccacgacttgggctgggacatgacacccaactctcctcatgtcagcactgacaagcgcttcgaggttgatggcgccctcggcgcagtcaaatttatcaaggagtataagggcagactcggcagcaagtgggatgagaatcgactaaacactctccacgacagtatcgccctgcacggatcgcctggtctcaatgttgggaagaacgtcgatgtccaacatgcgctcgcgagtatctcttttgacaacccaggcgctcgcaatccggcgatcccagagaaagagttcaacagcgtcctcaaggacttcccggccgacgacatcggtgctgggaccaacacaacgtggacctggttggcaagaactaaacctttggcaacttataacacaatcgttgagccctttggcgttgctttcgttcctggctacaacgcttctcagcaccgtatcttcaacctgctcaacccgcaatacgtgggtggctgtgatgtatcagtctcgtaa

SEQ ID NO: 11559 - protein, 267 aa, Muscodor strobelii
  misc_feature: SGI Peptide ID NO. 563717
  misc_feature (24)..(258): NCBI GI: 116200323 Blast Desc: CHGG_08317 [Chaetomium globosum CBS 148.51] gi|88179596|gb|EAQ87064.1| CHGG_08317 [Chaetomium globosum CBS 148.51]
  misc_feature (36)..(252): NCBI GI: 256721693 Blast Desc: NECHADRAFT_44823 [Nectria haematococca mpVI 77-13-4]
  misc_feature (34)..(246): NCBI GI: 171681192 Blast Desc: protein product [Podospora anserina] gi|170940554|emb|CAP65782.1| protein product [Podospora anserina]
  misc_feature (39)..(249): NCBI GI: 116202473 Blast Desc: CHGG_09121 [Chaetomium globosum CBS 148.51] gi|88177639|gb|EAQ85107.1| CHGG_09121 [Chaetomium globosum CBS 148.51]
  misc_feature (35)..(252): NCBI GI: 171693093 Blast Desc: protein product [Podospora anserina] gi|170946495|emb|CAP73296.1| protein product [Podospora anserina]
  misc_feature (40)..(228): NCBI GI: 116204295 Blast Desc: CHGG_10031 [Chaetomium globosum CBS 148.51] gi|88176159|gb|EAQ83627.1| CHGG_10031 [Chaetomium globosum CBS 148.51]
  misc_feature (76)..(239): NCBI GI: 116178824 Blast Desc: CHGG_00040 [Chaetomium globosum CBS 148.51] gi|88184337|gb|EAQ91805.1| CHGG_00040 [Chaetomium globosum CBS 148.51]
  misc_feature (32)..(245): NCBI GI: 260460254 Blast Desc: conserved [Mesorhizobium opportunistum WSM2075] gi|259033899|gb|EEW35158.1| conserved [Mesorhizobium opportunistum WSM2075]
  misc_feature (30)..(232): NCBI GI: 242795716 Blast Desc: conserved [Talaromyces stipitatus ATCC 10500] gi|218719237|gb|EED18657.1| conserved [Talaromyces stipitatus ATCC 10500]
  misc_feature (37)..(245): NCBI GI: 13471098 Blast Desc: mlr0982 [Mesorhizobium loti MAFF303099] gi|14021842|dbj|BAB48453.1| mlr0982 [Mesorhizobium loti MAFF303099]
  misc_feature: Useful for introducing or modulating the production of volatile compounds
MKFSSIVTTISVAAAGVYGQPSYPSYPQGVGVDKFPTTFVGGVKVIDTQLVRDARKVIQNFDGFLYKHSMRTWLFGAAAINANKTLQKTIDIELHAVATVLHDLGWDMTPNSPHVSTDKRFEVDGALGAVKFIKEYKGRLGSKWDENRLNTLHDSIALHGSPGLNVGKNVDVQHALASISFDNPGARNPAIPEKEFNSVLKDFPADDIGAGTNTTWTWLARTKPLATYNTIVEPFGVAFVPGYNASQHRIFNLLNPQYVGGCDVSVS

SEQ ID NO: 11560 - DNA, 1198 bp, Muscodor strobelii
  misc_feature: SGI EST ID NO. CUFF.27489.0
  misc_feature: Variant of the nucleotide sequence at SEQ ID NO 11558
accagaagtcaaattggtatagacaactcaagaatgacaattacgggtactacgactgttactaagactttcctgagtataatacacgatggcttccgcatcagttcatcctcttcattgccaacaggattatccattaagcttaggctcatctgatagcttgcgaccggcttttctgcctttctcgctcacattcgatcttgtaactgaaaagcacctccggacaagatgaagttctcaagtattgtcaccaccatttcggtggctgctgccggcgtgtacggccagcctagctatcccagctatcctcagggcgtcggcgtcgacaagttccccacgaccttcgtcggcggcgtcaaagttatcgatactcaacttgttcgcgatgctcgcaaagtaattcagaacttcgacggcttcctgtacaagcacagcatgcgaacatggcttttcggagctgctgccattaacgccaataagacactccagaagacaatcgacattgagctacatgctgttgcgactgttctccacgacttgggctgggacatgacacccaactctcctcatgtcagcactgacaagcgcttcgaggttgatggcgccctcggcgcagtcaaatttatcaaggagtataagggcagactcggcagcaagtgggatgagaatcgactaaacactctccacgacagtatcgccctgcacggatcgcctggtctcaatgttgggaagaacgtcgatgtccaacatgcgctcgcgagtatctcttttgacaacccaggcgctcgcaatccggcgatcccagagaaagagttcaacagcgtcctcaaggacttcccggccgacgacatcggtgctgggaccaacacaacgtggacctggttggcaagaactaaacctttggcaacttataacacaatcgttgagccctttggcgttgctttcgttcctggctacaacgcttctcagcaccgtatcttcaacctgctcaacccgcaatacgtgggtggctgtgatgtatcagtctcgtaaaaagtgacggcgacagtttcgtggttgacaacgctttcaactaggaacgggcacttcacttacgtgtatatgaataagatgaattttaattggatgttaaaatttccggtatatatatttagataatggcaaaatcgactaatgcactcacttcgcttgctgagaa

SEQ ID NO: 11561 - DNA, 810 bp, Muscodor strobelii
  misc_feature: SGI cDNA ID NO. 563718
  misc_feature: Encodes the peptide sequence at SEQ ID NO 11562
atgctccatttgctcccgtaccggaaggaagtgatacattcccaacactgctgttcgggcccggcggcacaggtccacctacggaagcttgataccatattgatctctgagctggtttcgcgtggctatgtcgtcgcaggattagaccatccctacgagcagcctttcgtccgatatcccaatggcaccgccctctatggcgtaccaacggattatgtaatttcaaacgccgatgcggcgattgcatacgagattcgtgtcaaggacaatgtgcgttttatcgaaatatggccggacctagtgtcggatttgaaggcaccatgggcgaccaagaacttaggcgcatttggtcattccctcggtggtgccgcagctgctggtgctgctcttcttgtcgagcctgagattctggcttcgacactgaatctggacggttcgtactgggatgcaacaaatgacacagcaactgccgataccgagaggccaacgctactgctaggaggctcttatcatactctggaagagtcaggcgacatcagttggacgatctttcccgaggcacagactcgctggtggcgaacattacttgtacaagatgcgcagcatctagattttagcgactttgcgttttggaagacactcggcggtttagaacttggagagatagatggactaagggcaattgcagttacgagagaattcgtcacagcattcttcaactacactttacatggacaacaagaggacattttgtccaaccctggttctgcgtggccagaggtgttcattttcgatagaagcaaggactaa

SEQ ID NO: 11562 - protein, 269 aa, Muscodor strobelii
  misc_feature: SGI Peptide ID NO. 563718
  misc_feature (6)..(261): NCBI GI: 39977415 Blast Desc: MGG_06610 [Magnaporthe grisea 70-15] gi|145015942|gb|EDK00432.1| MGG_06610 [Magnaporthe grisea 70-15]
  misc_feature (28)..(261): NCBI GI: 271968446 Blast Desc: Sros_7209 [Streptosporangium roseum DSM 43021] gi|270511621|gb|ACZ89899.1| conserved [Streptosporangium roseum DSM 43021]
  misc_feature (26)..(263): NCBI GI: 121704577 Blast Desc: PAF acetylhydrolase family protein [Aspergillus clavatus NRRL 1] gi|119398697|gb|EAW09126.1| PAF acetylhydrolase family protein [Aspergillus clavatus NRRL 1]
  misc_feature (32)..(261): NCBI GI: 154313952 Blast Desc: BC1G_04919 [Botryotinia fuckeliana B05.10] gi|150849065|gb|EDN24258.1| BC1G_04919 [Botryotinia fuckeliana B05.10]
  misc_feature (28)..(261): NCBI GI: 189188012 Blast Desc: PAF acetylhydrolase family protein [Pyrenophora tritici-repentis Pt-1C-BFP] gi|187971951|gb|EDU39450.1| PAF acetylhydrolase family protein [Pyrenophora tritici-repentis
  misc_feature (32)..(266): NCBI GI: 239942101 Blast Desc: lipase [Streptomyces roseosporus NRRL 15998]
  misc_feature (32)..(266): NCBI GI: 239988566 Blast Desc: lipase [Streptomyces roseosporus NRRL 11379]
  misc_feature (32)..(261): NCBI GI: 169763002 Blast Desc: [Aspergillus oryzae RIB40] gi|83770429|dbj|BAE60562.1| protein product [Aspergillus oryzae]
  misc_feature (28)..(263): NCBI GI: 242805475 Blast Desc: PAF acetylhydrolase family protein [Talaromyces stipitatus ATCC 10500] gi|218715163|gb|EED14585.1| PAF acetylhydrolase family protein [Talaromyces stipitatus ATCC
  misc_feature (28)..(263): NCBI GI: 119482435 Blast Desc: PAF acetylhydrolase family protein [Neosartorya fischeri NRRL 181] gi|119409400|gb|EAW19349.1| PAF acetylhydrolase family protein [Neosartorya fischeri NRRL 181]
MLHLLPYRKEVIHSQHCCSGPAAQVHLRKLDTILISELVSRGYVVAGLDHPYEQPFVRYPNGTALYGVPTDYVISNADAAIAYEIRVKDNVRFIEIWPDLVSDLKAPWATKNLGAFGHSLGGAAAAGAALLVEPEILASTLNLDGSYWDATNDTATADTERPTLLLGGSYHTLEESGDISWTIFPEAQTRWWRTLLVQDAQHLDFSDFAFWKTLGGLELGEIDGLRAIAVTREFVTAFFNYTLHGQQEDILSNPGSAWPEVFIFDRSKD

SEQ ID NO: 11563 - DNA, 725 bp, Muscodor strobelii
  misc_feature: SGI EST ID NO. CUFF.27499.0
  misc_feature: Variant of the nucleotide sequence at SEQ ID NO 11561
tctgagctggtttcgcgtggctatgtcgtcgcaggattagaccatccctacgagcagcctttcgtccgatatcccaatggcaccgccctctatggcgtaccaacggattatgtaatttcaaacgccgatgcggcgattgcatacgagattcgtgtcaaggacaatgtgcgttttatcgaaatatggccggacctagtgtcggatttgaaggcaccatgggcgaccaagaacttaggcgcatttggtcattccctcggtggtgccgcagctgctggtgctgctcttcttgtcgagcctgagattctggcttcgacactgaatctggacggttcgtactgggatgcaacaaatgacacagcaactgccgataccgagaggccaacgctactgctaggaggctcttatcatactctggaagagtcaggcgacatcagttggacgatctttcccgaggcacagactcgctggtggcgaacattacttgtacaagatgcgcagcatctagattttagcgactttgcgttttggaagacactcggcggtttagaacttggagagatagatggactaagggcaattgcagttacgagagaattcgtcacagcattcttcaactacactttacatggacaacaagaggacattttgtccaaccctggttctgcgtggccagaggtgttcattttcgatagaagcaaggactaattagtatatggtgattcaac

SEQ ID NO: 11564 - DNA, 1575 bp, Muscodor strobelii
  misc_feature: SGI cDNA ID NO. 563719
  misc_feature: Elevated expression when VOC is produced
  misc_feature: Encodes the peptide sequence at SEQ ID NO 11565
atgacgcttcaacatcgtgaggacttcgttcctggaacgattcatctcgttgacacagatcatcatgacattgtgttacatccaaagcccagtgatgatccagaagatcccctaaattggtcaccgcgacgtaagcaatgggccgcatgcatgctgttgacctacgtctttggcatcggtatttcggctactgttcaatattccgtgcttgcgaacattgcggaggagacaggcatctccgttgctgatttgaatactggcactgggctaatgttcctatttcttggttggagctgtctgatatggcagcctgtcgccctggtcttcggtcgtcgtggcgttctcgtcgcgactagtctcctttctattgcaccaatggtttggacaccatatacgcactcctcagctgcgtggtacgcacatcgcattctctatggtgtgtttgccgcagccgtagagtcgctgcctgagatctgcatggctgatatatttttcgcacacgaaagagggttctacatcggtctctacacattgttcctcttcggaacaaacgcgcttgcaccgcttattgcaggcttcgttgccgattcactcggctggcgcgctgccatttggtttggcaccatcacgctgattgtgacaaccgttattatcttcttcggactggaagaaactatgtacttccgcggtgtcattgagggtgcggaggaactggaaaaggagaagacgaagagcgagatggcggctgctcataccaccagcacagatacaacgtcgagatccacgtggggaacgccgtcttatgtcagtcgactgaggctcttcagacgcctgcctggaggtccgtcgatcaagcagatgttcattatgatgtatcggccgctcgctatgctcttctattttcctaatatcgcttgggctggattcctgtacggcagcaacttgtcgtggtatctggtcgtcaacgggacagtcagtgccgtcctaagcgcagccccatataactttcgcccaagcatagtcggtttgtcgtacctgtcgccgacaattggctctgtgctgggggccttgtacgccggcgtgggcggcgatagggtatcgctttatctggcacgacgaaacgctggtatccgcgagccggaacatcgactttggatattgcttatcccggccgtcatctctgccgcaggcttcatcctgtggggtgttggcgccgctgttcaacttcattacattgctctaatcttcggtgtgggcatggtcatggctagtgtcacatcaggcgcgtccgtcgcgctctcgtacggtgtagactgctttaaggagatatcgggtgagggcatgatcctcatcatcatcatccgcaacacgatgggtttcgcattctcttacggaattgttccttggatcaatgcccaaggttacctccggacttttatagccattgctttcctatcgcttggcaccactttgactttcatctttatgatagtatttggaaaatctttgcgaaagcgtgcagcaggaagatactatgagtggactgagatgctgactgttgtcgctggccactga

SEQ ID NO: 11565 - protein, 524 aa, Muscodor strobelii
  misc_feature: SGI Peptide ID NO. 563719
  misc_feature (52)..(463): Pfam Id: PF07690 Pfam Desc: Major Facilitator Superfamily
  misc_feature (5)..(523): NCBI GI: 119180428 Blast Desc: CIMG_08848 [Coccidioides immitis RS]
  misc_feature (5)..(523): NCBI GI: 240110332 Blast Desc: Major Facilitator Superfamily protein [Coccidioides posadasii C735 delta SOWgp]
  misc_feature (5)..(523): NCBI GI: 258578145 Blast Desc: conserved [Uncinocarpus reesii 1704] gi|237903520|gb|EEP77921.1| conserved [Uncinocarpus reesii 1704]
  misc_feature (6)..(524): NCBI GI: 242206561 Blast Desc: [Postia placenta Mad-698-R] gi|220731807|gb|EED85648.1| [Postia placenta Mad-698-R]
  misc_feature (2)..(524): NCBI GI: 225558811 Blast Desc: conserved [Ajellomyces capsulatus G186AR]
  misc_feature (3)..(514): NCBI GI: 256721899 Blast Desc: NECHADRAFT_78282 [Nectria haematococca mpVI 77-13-4]
  misc_feature (1)..(524): NCBI GI: 242206559 Blast Desc: [Postia placenta Mad-698-R] gi|220731806|gb|EED85647.1| [Postia placenta Mad-698-R]
  misc_feature (7)..(487): NCBI GI: 169623720 Blast Desc: SNOG_15103 [Phaeosphaeria nodorum SN15] gi|160705036|gb|EAT77646.2| SNOG_15103 [Phaeosphaeria nodorum SN15]
  misc_feature (1)..(514): NCBI GI: 171684665 Blast Desc: protein product [Podospora anserina] gi|170942293|emb|CAP67945.1| protein product [Podospora anserina]
  misc_feature (4)..(524): NCBI GI: 46119870 Blast Desc: FG04804.1 [Gibberella zeae PH-1]
  misc_feature: Useful for introducing or modulating the production of volatile compounds
MTLQHREDFVPGTIHLVDTDHHDIVLHPKPSDDPEDPLNWSPRRKQWAACMLLTYVFGIGISATVQYSVLANIAEETGISVADLNTGTGLMFLFLGWSCLIWQPVALVFGRRGVLVATSLLSIAPMVWTPYTHSSAAWYAHRILYGVFAAAVESLPEICMADIFFAHERGFYIGLYTLFLFGTNALAPLIAGFVADSLGWRAAIWFGTITLIVTTVIIFFGLEETMYFRGVIEGAEELEKEKTKSEMAAAHTTSTDTTSRSTWGTPSYVSRLRLFRRLPGGPSIKQMFIMMYRPLAMLFYFPNIAWAGFLYGSNLSWYLVVNGTVSAVLSAAPYNFRPSIVGLSYLSPTIGSVLGALYAGVGGDRVSLYLARRNAGIREPEHRLWILLIPAVISAAGFILWGVGAAVQLHYIALIFGVGMVMASVTSGASVALSYGVDCFKEISGEGMILIIIIRNTMGFAFSYGIVPWINAQGYLRTFIAIAFLSLGTTLTFIFMIVFGKSLRKRAAGRYYEWTEMLTVVAGH

SEQ ID NO: 11566 - DNA, 2086 bp, Muscodor strobelii
  misc_feature: SGI EST ID NO. CUFF.27586.1
  misc_feature: Variant of the nucleotide sequence at SEQ ID NO 11564
cgcggagactccgatttcaccgagtgtgcttgagcggtctgcgcttcagcggttggacggttgcacttcctgttccggaaacatgtgtctgctaaaaccaatcactaccgacgccatcgattagttgtgtatctcatgccacgagttatgcatcggtctagactgatatcgacatgaggcccccgcgatccaacaaggcttgagatagcaaagatagcaaaaacatggtgatgacgatgctcctaacatgtttattaaatccccagataaactacaagacgcccagctcgaatgctagtagaactctccctaacgacaatgttcccctaacttctctctgctattgcctggcacttgttgcaatttgtagctttatatagcgatgatgacgcttcaacatcgtgaggacttcgttcctggaacgattcatctcgttgacacagatcatcatgacattgtgttacatccaaagcccagtgatgatccagaagatcccctaaattggtcaccgcgacgtaagcaatgggccgcatgcatgctgttgacctacgtctttggcatcggtatttcggctactgttcaatattccgtgcttgcgaacattgcggaggagacaggcatctccgttgctgatttgaatactggcactgggctaatgttcctatttcttggttggagctgtctgatatggcagcctgtcgccctggtcttcggtcgtcgtggcgttctcgtcgcgactagtctcctttctattgcaccaatggtttggacaccatatacgcactcctcagctgcgtggtacgcacatcgcattctctatggtgtgtttgccgcagccgtagagtcgctgcctgagatctgcatggctgatatatttttcgcacacgaaagagggttctacatcggtctctacacattgttcctcttcggaacaaacgcgcttgcaccgcttattgcaggcttcgttgccgattcactcggctggcgcgctgccatttggtttggcaccatcacgctgattgtgacaaccgttattatcttcttcggactggaagaaactatgtacttccgcggtgtcattgagggtgcggaggaactggaaaaggagaagacgaagagcgagatggcggctgctcataccaccagcacagatacaacgtcgagatccacgtggggaacgccgtcttatgtcagtcgactgaggctcttcagacgcctgcctggaggtccgtcgatcaagcagatgttcattatgatgtatcggccgctcgctatgctcttctattttcctaatatcgcttgggctggattcctgtacggcagcaacttgtcgtggtatctggtcgtcaacgggacagtcagtgccgtcctaagcgcagccccatataactttcgcccaagcatagtcggtttgtcgtacctgtcgccgacaattggctctgtgctgggggccttgtacgccggcgtgggcggcgatagggtatcgctttatctggcacgacgaaacgctggtatccgcgagccggaacatcgactttggatattgcttatcccggccgtcatctctgccgcaggcttcatcctgtggggtgttggcgccgctgttcaacttcattacattgctctaatcttcggtgtgggcatggtcatggctagtgtcacatcaggcgcgtccgtcgcgctctcgtacggtgtagactgctttaaggagatatcgggtgagggcatgatcctcatcatcatcatccgcaacacgatgggtttcgcattctcttacggaattgttccttggatcaatgcccaaggttacctccggacttttatagccattgctttcctatcgcttggcaccactttgactttcatctttatgatagtatttggaaaatctttgcgaaagcgtgcagcaggaagatactatgagtggactgagatgctgactgttgtcgctggccactgaggcgtgtttcgagttcgaatcggaactctaagcgctagggaagaattggtctaggtttgcaatagcattagaagatgaagagagtcgctaataaactaaatacaatcacattgatttgtagttgcg

SEQ ID NO: 11567 - DNA, 1491 bp, Muscodor strobelii
  misc_feature: SGI cDNA ID NO. 563720
  misc_feature: Encodes the peptide sequence at SEQ ID NO 11568
atgacgagacgtacgattggtgagacgcctacgccacggcaagcgtcgcggtcgccacaagatgcgctgccagactacatctactcgacggcatttggtattccggtgcgaccgagagcggattgcgagagcaactctagagtccaggcaaatgaggtcgccgaagagccgttctacaccatcatcaaatctgggctgctcatcccgggtgatggagagccgctcgaaaatggcactcttgttgtcgagaagaagatgattgtgtggattggaccagatgccgagctgcctgccaaatatcgcgatgctgccaacaggatattcgcgattcccttcgtcatgcctggtctttgggatgttcatgcgcattttggcggtgagccgactaactcagaccaaggcgacttcgaatcgctcatgttttctcagcatcctgcaacgggaggtgcaagaatcacgagaggctgtactaacttctttacagtaagtggctgggaagcaatacaacggggttacacttcgcttcgcgacgtcgcagggtttggttgcgagattgcccgtgcaattgatgacaactcgattgttggcccaaacgtctactccgctggggcgtgcctgagccagactggcgggcacggcgacgttcacaatctgccccctggcgatgtgcatcagaatcttggtgtctcgaacgtgcgtcctggacaatggggctcaactatggctgtactctgtgatggcgtagaggagtgccgacgagcagtccgccttcaaatccgacgcggtgctaagtgcatcaagctgtttgcaagtggtggcgtcctctcgctcgaggataatccactttatgcgcaatttagtcccgaggagttaaaatgcatcgtcgatgaggcagcgcgacaagaacgtatcgttgctgctcacgtgcatggcaaaccggggatcatggccgcggtcaatgctggcgtagggacagtcgagcatgtctcgttcgctgacgatgagtgtatcgagcttattaagaagaaaggcacggtgtatgtcgctacacgtaccatcgttgacatgcttatacaaggtggtggaaagggcttaacgaaataccagtgggagaaagcacaattgtgcaattcgaatcatctccgggcttacaaagctgccatcaaggctggcgttacctttgcactcggcaccgatacagcgcctggatttaacatggcgatggagctagactacgccgtgaaagctggtatgacttcactagaggctatcaagtgcgcgacggccaatggaccactcagcgttggagcaatggcgcccaagacgggtcagctgaaagcgggctacgaggcagatattcttggattacatgcgaacccggttgaggacgtcaaggttcttcaagacaaggacacgattggctgggtttggaaaggtggacgattatggaaggggccgggcgttgggccatggggcgaggaccccttgtag

SEQ ID NO: 11568 - protein, 496 aa, Muscodor strobelii
  misc_feature: SGI Peptide ID NO. 563720
  misc_feature (112)..(457): Pfam Id: PF01979 Pfam Desc: Amidohydrolase family
  misc_feature (166)..(457): Pfam Id: PF01979 Pfam Desc: Amidohydrolase family
  misc_feature (55)..(494): NCBI GI: 145248990 Blast Desc: An14g02080 [Aspergillus niger] gi|134081509|emb|CAK41945.1| protein product [Aspergillus niger]
  misc_feature (45)..(486): NCBI GI: 164425109 Blast Desc: NCU06400 [Neurospora crassa OR74A] gi|157070793|gb|EAA33002.2| [Neurospora crassa OR74A]
  misc_feature (62)..(485): NCBI GI: 242772093 Blast Desc: conserved [Talaromyces stipitatus ATCC 10500] gi|218721591|gb|EED21009.1| conserved [Talaromyces stipitatus ATCC 10500]
  misc_feature (62)..(484): NCBI GI: 238508228 Blast Desc: conserved [Aspergillus flavus NRRL3357] gi|220688832|gb|EED45184.1| conserved [Aspergillus flavus NRRL3357]
  misc_feature (53)..(484): NCBI GI: 145249284 Blast Desc: An14g03560 [Aspergillus niger] gi|134081659|emb|CAK46593.1| protein product [Aspergillus niger]
  misc_feature (62)..(480): NCBI GI: 239945030 Blast Desc: amidohydrolase [Streptomyces roseosporus NRRL 15998] gi|239991492|ref|ZP_04712156.1| amidohydrolase [Streptomyces roseosporus NRRL 11379]
  misc_feature (62)..(480): NCBI GI: 159037742 Blast Desc: amidohydrolase [Salinispora arenicola CNS-205] gi|157916577|gb|ABV98004.1| amidohydrolase [Salinispora arenicola CNS-205]
  misc_feature (67)..(401): NCBI GI: 256724000 Blast Desc: NECHADRAFT_17402 [Nectria haematococca mpVI 77-13-4]
  misc_feature (62)..(399): NCBI GI: 169784594 Blast Desc: [Aspergillus oryzae RIB40] gi|83775505|dbj|BAE65625.1| protein product [Aspergillus oryzae]
  misc_feature (244)..(485): NCBI GI: 212531113 Blast Desc: conserved [Penicillium marneffei ATCC 18224] gi|210071077|gb|EEA25166.1| conserved [Penicillium marneffei ATCC 18224]
  misc_feature (75)..(453): SWISSPROT Homolog: EC 3.5.2.7 Imidazolonepropionase
MTRRTIGETPTPRQASRSPQDALPDYIYSTAFGIPVRPRADCESNSRVQANEVAEEPFYTIIKSGLLIPGDGEPLENGTLVVEKKMIVWIGPDAELPAKYRDAANRIFAIPFVMPGLWDVHAHFGGEPTNSDQGDFESLMFSQHPATGGARITRGCTNFFTVSGWEAIQRGYTSLRDVAGFGCEIARAIDDNSIVGPNVYSAGACLSQTGGHGDVHNLPPGDVHQNLGVSNVRPGQWGSTMAVLCDGVEECRRAVRLQIRRGAKCIKLFASGGVLSLEDNPLYAQFSPEELKCIVDEAARQERIVAAHVHGKPGIMAAVNAGVGTVEHVSFADDECIELIKKKGTVYVATRTIVDMLIQGGGKGLTKYQWEKAQLCNSNHLRAYKAAIKAGVTFALGTDTAPGFNMAMELDYAVKAGMTSLEAIKCATANGPLSVGAMAPKTGQLKAGYEADILGLHANPVEDVKVLQDKDTIGWVWKGGRLWKGPGVGPWGEDPL

SEQ ID NO: 11569 - DNA, 1727 bp, Muscodor strobelii
  misc_feature: SGI EST ID NO. CUFF.27516.0
  misc_feature: Variant of the nucleotide sequence at SEQ ID NO 11567
ttctggctaccaggctgggaagcaatacaacggggttacacttcgcttcgcgacgtcgcagggtttggttgcgagattgcccgtgcaattgatgacaactcgattgttggcccaaacgtctactccgctggggcgtgcctgagccagactggcgggcacggcgacgttcacaatctgccccctggcgatgtgcatcagaatcttggtgtctcgaacgtgcgtcctggacaatggggctcaactatggctgtactctgtgatggcgtagaggagtgccgacgagcagtccgccttcaaatccgacgcggtgctaagtgcatcaagctgtttgcaagtggtggcgtcctctcgctcgaggataatccactttatgcgcaatttagtcccgaggagttaaaatgcatcgtcgatgaggcagcgcgacaagaacgtatcgttgctgctcacgtgcatggcaaaccggggatcatggccgcggtcaatgctggcgtagggacagtcgagcatgtctcgttcgctgacgatgagtgtatcgagcttattaagaagaaaggcacggtgtatgtcgctacacgtaccatcgttgacatgcttatacaaggtggtggaaagggcttaacgaaataccagtgggagaaagcacaattgtgcaattcgaatcatctccgggcttacaaagctgccatcaaggctggcgttacctttgcactcggcaccgatacagcgcctggatttaacatggcgatggagctagactacgccgtgaaagctggtatgacttcactagaggctatcaagtgcgcgacggccaatggaccactcagcgttggagcaatggcgcccaagacgggtcagctgaaagcgggctacgaggcagatattcttggattacatgcgaacccggttgaggacgtcaaggttcttcaagacaaggacacgattggctgggtttggaaaggtggacgattatggaaggggccgggcgttgggccatggggcgaggaccccttgtaggctacatattatgaagagcataggagcaatctttgtgcgtgcatgcacataagccaacagcaactctaacgtacagccattgtgtgattgatcatatctcgataactagcctgctctctccacgcgcttctctataccgatttgacgcctcgatcagttcatgacatccccttaacaaaaaggcccaattgtcggcgaatccttgcgtgacctcccatgatgtctcacaccagggttctccccatagcaccagacccttgatatctatgtcgttatatccctcgtacagtccgcccgttgcctcttcgcagaatttatcttcgtcgatcatgccggcatatgatatgacttgtgttgagttagcatactgtgtctatctagacgggcatgtagactgcggggcacaactagccctccgcgatctatagattgctcactacgaaaaacaattagcgtgagactccttttcgatatttgggacacgataaaaagcgattaagtagcagacgtatttacggacctgttgtccctgaactgtggggatggtatcatatcaatccacatgtcatgtggtgtcgtctgctggatccatgtctcttgtaaatttacgggtagcaccttcgccggagcaggcaagtttgtgatgtaaagaatagcgccacattccagtggcaggcggtccatcagccccagcagagcgaagttggtcattg

SEQ ID NO: 11570 - DNA, 600 bp, Muscodor strobelii
  misc_feature: SGI cDNA ID NO. 563721
  misc_feature: Elevated expression when VOC is produced
  misc_feature: Encodes the peptide sequence at SEQ ID NO 11571
atgcagttcaccaagttcgccctcgccgccctctccttcggctctgccatcgccgctcccgtcgccaagcgcgagattgcccttctcggcgatgctctctctgctgttgccaacgtacaggccgtcctcaaacaggagactgccaccatcactggcctcattagcctcgacactctccccgtcgacgctgttggtactgtcaaggtcgctctgacgactgttggccagtctgtcaacggcctccttgccgaggccactgctctgaacgatatcaccgacactctctctgagaccgatattaccgatctcaagcaagtcttgtcggagaccaagaccattgtcgctgatgtcaagtccctcggtacttccattgttaagggtgttgctcaggacgtcctcgaccaggtcaaccctgctcttcaatacgttctggctactgccggctctctcaccactcctctcatcggcttcgttgagactgctgtccccgccactagccctgtcttcaacgaggtccaggctcttgttggcgaggttgagggtgttgccaacggtcttcttgctcccgttaactccatccttggtggcctccttgcttaa

SEQ ID NO: 11571 - protein, 199 aa, Muscodor strobelii
  misc_feature: SGI Peptide ID NO. 563721
  misc_feature: Useful for introducing or modulating the production of volatile compounds
MQFTKFALAALSFGSAIAAPVAKREIALLGDALSAVANVQAVLKQETATITGLISLDTLPVDAVGTVKVALTTVGQSVNGLLAEATALNDITDTLSETDITDLKQVLSETKTIVADVKSLGTSIVKGVAQDVLDQVNPALQYVLATAGSLTTPLIGFVETAVPATSPVFNEVQALVGEVEGVANGLLAPVNSILGGLLA

SEQ ID NO: 11572 - DNA, 1300 bp, Muscodor strobelii
  misc_feature: SGI EST ID NO. CUFF.27713.0
  misc_feature: Variant of the nucleotide sequence at SEQ ID NO 11570
gccctttttgctctatatatcgagcccatctctcttctcagtgtgccagtcttcctgtctctcatcaagccaatagccaatagtcattctttcattcagctcactaaagtcattccttaataccacaaagaaccaataagcttaatatctagtcatccgttttctagtcacaaccaacccgccaaaatgcagttcaccaagttcgccctcgccgccctctccttcggctctgccatcgccgctcccgtcgccaagcgcgagattgcccttctcggcgatgctctctctgctgttgccaacgtacaggccgtcctcaaacaggagactgccaccatcactggcctcattagcctcgacactctccccgtcgacgctgttggtactgtcaaggtcgctctgacgactgttggccagtctgtcaacggcctccttgccgaggccactgctctgaacgatatcaccgacactctctctgagaccgatattaccgatctcaagcaagtcttgtcggagaccaagaccattgtcgctgatgtcaagtccctcggtacttccattgttaagggtgttgctcaggacgtcctcgaccaggtcaaccctgctcttcaatacgttctggctactgccggctctctcaccactcctctcatcggcttcgttgagactgctgtccccgccactagccctgtcttcaacgaggtccaggctcttgttggcgaggttgagggtgttgccaacggtcttcttgctcccgttaactccatccttggtggcctccttgcttaagtgacttgacagagtatgtcggtcccaactgcctgcggtgttttcagtagtacataattcttctcttcaagcggagcattgtgtgaaactggagtctggatataatgatgatggttcttgcttcggctttctgatatcatgtacttgcaaatgcaaatgaaatagaggttatcgtcacccaacatgatattactgtgacgttctctcggtgacttttccttccatgtcttgcgcatcgtgaatggcaagtggggcttttcggagcaaataaccctgccacttgtcttgctcaactccagcgcttgcttcccagctcatcactgctcatgagcttgtcgttctggtttaatttcgaattccgtgcttgttctctcgggtctttacttggttgccattattccggcctgtgcaatctcgatatttatcattaggtcttattttgcctggtcgcgtcgcaatggccgctgtgcgtgacctcatccgccgaaattggctcgtcgccaatcctcccgag

SEQ ID NO: 11573 - DNA, 1263 bp, Muscodor strobelii
  misc_feature: SGI cDNA ID NO. 563722
  misc_feature: Encodes the peptide sequence at SEQ ID NO 11574
atggccgctgtgcgtgacctcatccgccgaaattggctcgtcgccaatcctcccgagcccgagaagtcaacgagtcctctggtctttggcgtcctcggcgcggctgatattgccccaatggcgcttatacttccgatcaaaaaccatccagatgtacttctccagactgtagctgcgcgtaatgttgacaaagcaaaagcgtacgcgcaaaaacacgggattcccgatgtcgcaatatcttatcaagagatactcgataatcctaaggttgacgctgtgtatatcccgctgccaaatgggttacactacgaatgggcgcaacgcgctctgaaagccggcaaacatgttctcttggagaaaccatcggtgaacaatgcgaccgaggccacgcagctcttcctgtcacaatggcctgatgctgcaagctcgcctcgacccgtgcttctcgaggctgttcactacgctttccatccggcttgggcggcattcatggctcacgtcacgccttcagaagtagcatacgccaaagcctgtctttgggtaccccgttggaagttaggtgccgatgatatcaggtacaacttcgagcttggcggaggcgcaatgatggatctaggtgcgtacacagcaagcgcgctgtcgcgcatttttggaagtgcagcagacacgtgtaaatcgtgcgagactagtcctggatcggacccccgatgtgatcgatggtaccgcacgcaatatctttttcccaatggtggcatcggagagatggaaggtgatctgaaagcaccactgaataaattgacgcctgaaatccaggtcacgcacaaacctgtcgtgatttctgatccggaagctagcggcatcatgattgaagatggcgaacaagtcatgcgaacgcgcaagatctcattcagcaacttcgtgatccctacttatcttcacacgatcactgtgaatgatcattttgagataagaaaaattgtctcatattctacccctgcgcggccgaggaagaagtggaagacgagcaagactatcaaagcatacacctggcgagataccgagttaaagggcgcggaggaacaagccggcgaggcctattggacgacctatcgctaccagcttgagcagttcgttaacaagatccgcggtcactatacgccccagtggatagatggcgaggactccattgcaacggccaagatgatcgatatggcgtataagacagcaaaacttcctctgaggccgaccagcggatataaatga

SEQ ID NO: 11574 - protein, 420 aa, Muscodor strobelii
  misc_feature: SGI Peptide ID NO. 563722
  misc_feature (27)..(151): Pfam Id: PF01408 Pfam Desc: Oxidoreductase family, NAD-binding Rossmann fold
  misc_feature (28)..(135): Pfam Id: PF01118 Pfam Desc: Semialdehyde dehydrogenase, NAD binding domain
  misc_feature (27)..(121): Pfam Id: PF01408 Pfam Desc: Oxidoreductase family, NAD-binding Rossmann fold
  misc_feature (46)..(116): Pfam Id: PF01118 Pfam Desc: Semialdehyde dehydrogenase, NAD binding domain
  misc_feature (7)..(420): NCBI GI: 242779084 Blast Desc: oxidoreductase, [Talaromyces stipitatus ATCC 10500] gi|218722990|gb|EED22408.1| oxidoreductase, [Talaromyces stipitatus ATCC 10500]
  misc_feature (1)..(420): NCBI GI: 255932579 Blast Desc: Pc12g10220 [Penicillium chrysogenum Wisconsin 54-1255] gi|211582465|emb|CAP80649.1| Pc12g10220 [Penicillium chrysogenum Wisconsin 54-1255]
  misc_feature (1)..(420): NCBI GI: 145611164 Blast Desc: MGG_11542 [Magnaporthe grisea 70-15] gi|145018479|gb|EDK02758.1| MGG_11542 [Magnaporthe grisea 70-15]
  misc_feature (1)..(420): NCBI GI: 67526133 Blast Desc: AN3524.2 [Aspergillus nidulans FGSC A4] gi|40739895|gb|EAA59085.1| AN3524.2 [Aspergillus nidulans FGSC A4] gi|259481961|tpe|CBF75974.1| TPA: NAD binding Rossmann fold
  misc_feature (7)..(420): NCBI GI: 189196488 Blast Desc: oxidoreductase domain containing protein [Pyrenophora tritici-repentis Pt-1C-BFP] gi|187980461|gb|EDU47087.1| oxidoreductase domain containing protein [Pyrenophora Pt-1C-BFP]
  misc_feature (22)..(420): NCBI GI: 256729502 Blast Desc: NECHADRAFT_84144 [Nectria haematococca mpVI 77-13-4]
  misc_feature (6)..(420): NCBI GI: 145247152 Blast Desc: An12g07740 [Aspergillus niger] gi|134080556|emb|CAK41224.1| protein product [Aspergillus niger]
  misc_feature (16)..(416): NCBI GI: 212533825 Blast Desc: oxidoreductase, [Penicillium marneffei ATCC 18224] gi|210072433|gb|EEA26522.1| oxidoreductase, [Penicillium marneffei ATCC 18224]
  misc_feature (42)..(417): NCBI GI: 169596054 Blast Desc: SNOG_00777 [Phaeosphaeria nodorum SN15] gi|160701219|gb|EAT92272.2| SNOG_00777 [Phaeosphaeria nodorum SN15]
  misc_feature (7)..(419): NCBI GI: 242815583 Blast Desc: dimeric dihydrodiol dehydrogenase, [Talaromyces stipitatus ATCC 10500] gi|218714936|gb|EED14359.1| dimeric dihydrodiol dehydrogenase, [Talaromyces stipitatus ATCC 10500]
MAAVRDLIRRNWLVANPPEPEKSTSPLVFGVLGAADIAPMALILPIKNHPDVLLQTVAARNVDKAKAYAQKHGIPDVAISYQEILDNPKVDAVYIPLPNGLHYEWAQRALKAGKHVLLEKPSVNNATEATQLFLSQWPDAASSPRPVLLEAVHYAFHPAWAAFMAHVTPSEVAYAKACLWVPRWKLGADDIRYNFELGGGAMMDLGAYTASALSRIFGSAADTCKSCETSPGSDPRCDRWYRTQYLFPNGGIGEMEGDLKAPLNKLTPEIQVTHKPVVISDPEASGIMIEDGEQVMRTRKISFSNFVIPTYLHTITVNDHFEIRKIVSYSTPARPRKKWKTSKTIKAYTWRDTELKGAEEQAGEAYWTTYRYQLEQFVNKIRGHYTPQWIDGEDSIATAKMIDMAYKTAKLPLRPTSGYK

SEQ ID NO: 11575 - DNA, 5960 bp, Muscodor strobelii
  misc_feature: SGI EST ID NO. CUFF.27795.0
  misc_feature: Variant of the nucleotide sequence at SEQ ID NO 11573
tctccagactgtagctgcgcgtaatgttgacaaagcaaaagcgtacgcgcaaaaacacgggattcccgatgtcgcaatatcttatcaagagatactcgataatcctaaggttgacgctgtgtatatcccgctgccaaatgggttacactacgaatgggcgcaacgcgctctgaaagccggcaaacatgttctcttggagaaaccatcggtgaacaatgcgaccgaggccacgcagctcttcctgtcacaatggcctgatgctgcaagctcgcctcgacccgtgcttctcgaggctgttcactacgctttccatccggcttgggcggcattcatggctcacgtcacgccttcagaagtagcatacgccaaagcctgtctttgggtaccccgttggaagttaggtgccgatgatatcaggtacaacttcgagcttggcggaggcgcaatgatggatctaggtgcgtacacagcaagcgcgctgtcgcgcatttttggaagtgcagcagacacgtgtaaatcgtgcgagactagtcctggatcggacccccgatgtgatcgatggtaccgcacgcaatatctttttcccaatggtggcatcggagagatggaaggtgatctgaaagcaccactgaataaattgacgcctgaaatccaggtcacgcacaaacctgtcgtgatttctgatccggaagctagcggcatcatgattgaagatggcgaacaagtcatgcgaacgcgcaagatctcattcagcaacttcgtgatccctacttatcttcacacgatcactgtgaatgatcattttgagataagaaaaattgtctcatattctacccctgcgcggccgaggaagaagtggaagacgagcaagactatcaaagcatacacctggcgagataccgagttaaagggcgcggaggaacaagccggcgaggcctattggacgacctatcgctaccagcttgagcagttcgttaacaagatccgcggtcactatacgccccagtggatagatggcgaggactccattgcaacggccaagatgatcgatatggcgtataagacagcaaaacttcctctgaggccgaccagcggatataaatgagagttggcaatcattaaggtttcaaactcatgcgcttaactatacaggcaaagcagtacaactatatgccagcatagataatggacgacgccattcaaaagcccctttggccatgcttcaatgatcggctaagtgggttacagctggcgcaggaaagcgaccaatttctctgcgcctatctcccaggtagtgtcattttgtagatgatgtgccgcacctggaacgcggaccatctggacaccatggccctcatcagcttctactccattttccatggcgcaaattggctcgtcattcgcttcaaacttcttttcgccgattagcgcagagaatgcttgacgataagtatccgcagtcgcttgttgtatcggtttcgtcacaagtgcctcgtccgtgcccgccatgatcagcattctacttcctttgccccagcctgtgatattcaataacaaattcttcgggtcaatgaagcgcgacatcatgcccaatggccagagatagctttcgtaacggttcagatgctttgtgaactctgcgagcttgtcttcaggataggtcctgctgaagaatgcctgcttcactagatacggatgtgacagaggcgaattggaatgccatccgtggaatagcaagcggattgtaaaccagggatcaaactgccaccaattaagatatacgccaagtctaccgaaaagtcagaagtctagctctaacgatctgagttgaaacctacgatcctgtccctggaattgctcctagtagtgcgagtcccttcaccttcaccatcccctctgcaacaatgaattggctcaatccaccaccactcgagtgacccaccatcaccacctcatcaccttccgaatcttgcaccgcttgtatacatgcgacgacatcttgagccagcgctcgcttcggcgtcgcatatagcatacggaaaaatgacggatgccagctcgcgccatgaccccgcgttgagaccgcgtagcttgtaataccgtggtctgctaggtagcgcatgtattcatgccatacccatgcacttcccatgccgccatgtacgaagaacaccggcgggatacctggcgctgaatgcgcaggctttgcgacgaggagctctaggtcgccaccctttgtcgcgatgaaacgccgttcagtgcccaccggcggagcatctgatgggctggtgggcttccgccagtacaggtgttgatagcttaaatgtaggaaattgaacatattaacttaagagattgattgaatccaacgcaaaaacggattgcaattcaggaggccatttgacgaagttatactgaaaaggatcgtagagcggctgagtctaacttgtcgccttggcggtaagccactctggcgtccggccaatgctaatgcatgaataaggtttgttgactcaccggcgaagtttcccgcatttcacgcgagacatcggcggcagactagcaaaatcatccccatgctgattttaaatgtccacggaagtgatattgaggcgattgctgcatcgatcaatttgaaaggtgttcttattccatgtatgggagcgctttaatagtcgcggttattttataatgcacaaaaacaatatcttcttgcgtttcgactggtaaagaggaagcacggagtatgatttgtagtaattgccagtcaaacgtaatggcgcaagcaatacaaagcatcatcacgcggataagacaaactgtagaatgtccgttatttgttataaagatggagaagaaacaagcgagaagaatccacagcctgtctgatattagacgcaaggttacccaaacctcttgatcagaacgatataggggttgtattcaagaggcatctcgatgaatcgcacatgcctctcaagcacattgacagcaacagtttcgtacctgctgatatctcaataatcatgattacctcaggggagaatactaaaccctgtgtacgcatcagccctagactgaaatcgtattccctcattcgagccaatcactgaatgtctcttctccgtagcctcgcagacgggcagtagaatgcaatgctctacaatccccattttccggaatgtcctcgtcttttggtttgcgacgcgtttttgcccgtgtctggcgcctctcctgtccaacagaaggcgcttgggacacttcaactgcattctgcgtcctggccatagtattgcgagctttcagcgcttcaatatcccaatttttgtttttctttggtgaactggaaggggtggccgcgctcgactcgccctgagcagttaccgaatccactcttgtcggctcaaaactctctgtatatgaagagggaagcggagttgatgagggcgattgtagcggcgatggttgatttagtacacggttattggcagtagactcttcggcagtagactctttggcagtagactctttggcagtagactctttggtacgagactctctaataatgctctctttttctttttctttcaagggcgcaggaagtgaaggtcgaaaaggaccagtcgtgaaccccacgaacgagacagctgggcattccgggagcaggtcccagacggtaattgggactgtcaggaggagcaggtctgagaaacttggcgccataccgagatactcgaccccatcaggtgcactcatcatccattgtttgatctcgtactcattttgatgcccattttccaggcggatcgaaagcataaccttcggatactccgggaggctattgtccggaagctggggtgagggaacatattcttctccattgtccaaggagagaggtgagagttttatctgccttacgaccggccttgcataaaacagatgcaaagggctcactcgcctcgactgggtgatcaaaggtccgcccgtgatggggtcaactctggttcggtcattctgatcgaagatcaatgacgagtcgtagttctgtagccgatatatcaagcgatgatgaagctctgtgacggtgaattgggacttgaattcagccgcccagcccagctcgtttatgaggtgttgtgtaaatgagtctggtcccgggagtggcacccgagattcaaaacctccagcaaacaggccctcaattgccgctcgactggcaccagcaccagagaggtgagatgaggtggcaaagcaacagtcgtagagcatgagcacatcgggtgagccctgtccgccacttaccagcaagctgtgaaagacggccgtgtctacttgtagactcgggtcacatgtcaggctgttgtccttacattagcccatgaacatgaagtttgacacgagagtaataaatgtggcgatataggtgtgtacatgggtatcagccttgctatcgcgtggcttgtcactcacttcgggacccagaatggaaaatggccgctaacgttctgcctagcatgaccgttataatacaggataagaagcgtttttggcttgttgaagttctcgtcccagaacttattcatttgtaaccgaatggcctcgtgcggcattgtggatggtatcagccacctttcgaccgagtacctgtagatgtcttggaagaccgattgcagccggtctagctgccgcttcattgctccctttagcgtctcctcccagctcatcatgagcacagaaacggatgtgtacggctcgtgtcttgttggccacgcatttttgatagctgtgtcaaactgctctatcagtttcggcgcactaatatgctcgtgtactaaagaggtttcgcgcgtgttcgtgtattgtgtgcccgcgtgatgatcaaagtcggagtcactcaattcgcttatatctgatgaggaggtcatggcgattgagattggccggcaaaatacagtgcgctatctgtcacaagctcctcggtgccaaaatcagcaggaactcaagagaatcgacttgcagaaaggtcagattggaagacagacaaggtgctgaatgaaatatgggcatgctgcaaaaagagcgaatttcgcatgactaactccccatttacggccgtactgtagagctgcataagaagaccaactgcataatgcaccttgcttcaacccctgtttatcaatgctaattggccatctggacgacaacgagcatcgtacagtctccgcaagacatcctcttctgtgtcactctagaagtaaccacaattgctagagatatatcaacgtcgcacctgcccgctaagccccagacaacaatggggagggaaccacgataggaaggtaaagcctgattcgtcccagatgaatactcgcccccaaaactgcgcaacctgtattctgcacgatctgacacgagacatcacaagagatcatcggcataatttctatacctcctcagctacttcaccaacgcccgctcctttatgcatatctagcacaagtcacgcactcggacaggtaccctaacgtcgcacgtccttctcggcttgctccttgggtgtggacgggttggccggggcgggctttggctccggctttggctctggttttggctttggcttcgtacccttcacccacgtcccaccgagaaagggattctcgtcttccccgtacgagtctgcccagtgctgcgcctgctcgcgatagaactgttctgtgaaggcagcttgtgcttcctgttccgcatcgattgcttcttgcttcttcgttggcttgatcaggttgttggtagacattagacctcaatgtggataagctctcttgtaaatggataatgtatcaaggtctaaattaggtagatggcgtagtgattagtgaagtttcaaataggagagatgcgagaatgatttacagaaatccttaactcgccgattcgatgggcacagcgttcatacatatagg

SEQ ID NO: 11576 - DNA, 1050 bp, Muscodor strobelii
  misc_feature: SGI cDNA ID NO. 563723
  misc_feature: Elevated expression when VOC is produced
  misc_feature: Encodes the peptide sequence at SEQ ID NO 11577
atgttcaatttcctacatttaagctatcaacacctgtactggcggaagcccaccagcccatcagatgctccgccggtgggcactgaacggcgtttcatcgcgacaaagggtggcgacctagagctcctcgtcgcaaagcctgcgcattcagcgccaggtatcccgccggtgttcttcgtacatggcggcatgggaagtgcatgggtatggcatgaatacatgcgctacctagcagaccacggtattacaagctacgcggtctcaacgcggggtcatggcgcgagctggcatccgtcatttttccgtatgctatatgcgacgccgaagcgagcgctggctcaagatgtcgtcgcatgtatacaagcggtgcaagattcggaaggtgatgaggtggtgatggtgggtcactcgagtggtggtggattgagccaattcattgttgcagaggggatggtgaaggtgaagggactcgcactactaggagcaattccagggacaggatcacttggcgtatatcttaattggtggcagtttgatccctggtttacaatccgcttgctattccacggatggcattccaattcgcctctgtcacatccgtatctagtgaagcaggcattcttcagcaggacctatcctgaagacaagctcgcagagttcacaaagcatctgaaccgttacgaaagctatctctggccattgggcatgatgtcgcgcttcattgacccgaagaatttgttattgaatatcacaggctggggcaaaggaagtagaatgctgatcatggcgggcacggacgaggcacttgtgacgaaaccgatacaacaagcgactgcggatacttatcgtcaagcattctctgcgctaatcggcgaaaagaagtttgaagcgaatgacgagccaatttgcgccatggaaaatggagtagaagctgatgagggccatggtgtccagatggtccgcgttccaggtgcggcacatcatctacaaaatgacactacctgggagataggcgcagagaaattggtcgctttcctgcgccagctgtaa

SEQ ID NO: 11577 - protein, 349 aa, Muscodor strobelii
  misc_feature: SGI Peptide ID NO. 563723
  misc_feature (4)..(349): NCBI GI: 171689918 Blast Desc: protein product [Podospora anserina] gi|170944921|emb|CAP71032.1| protein product [Podospora anserina]
  misc_feature (1)..(349): NCBI GI: 261353010 Blast Desc: conserved [Verticillium albo-atrum VaMs.102]
  misc_feature (5)..(349): NCBI GI: 145606975 Blast Desc: MGG_03896 [Magnaporthe grisea 70-15] gi|145014596|gb|EDJ99164.1| MGG_03896 [Magnaporthe grisea 70-15]
  misc_feature (1)..(347): NCBI GI: 256729078 Blast Desc: NECHADRAFT_68995 [Nectria haematococca mpVI 77-13-4]
  misc_feature (1)..(349): NCBI GI: 46138755 Blast Desc: FG10892.1 [Gibberella zeae PH-1]
  misc_feature (4)..(349): NCBI GI: 116199911 Blast Desc: CHGG_08111 [Chaetomium globosum CBS 148.51] gi|88179390|gb|EAQ86858.1| CHGG_08111 [Chaetomium globosum CBS 148.51]
  misc_feature (30)..(349): NCBI GI: 18376343 Blast Desc: conserved [Neurospora crassa]
  misc_feature (24)..(346): NCBI GI: 170086616 Blast Desc: [Laccaria bicolor S238N-H82] gi|164649731|gb|EDR13972.1| [Laccaria bicolor S238N-H82]
  misc_feature (30)..(334): NCBI GI: 85082128 Blast Desc: NCU03408 [Neurospora crassa OR74A] gi|28917934|gb|EAA27619.1| [Neurospora crassa OR74A]
  misc_feature (40)..(346): NCBI GI: 238064216 Blast Desc: MCAG_05182 [Micromonospora sp. ATCC 39149] gi|237886027|gb|EEP74855.1| MCAG_05182 [Micromonospora sp. ATCC 39149]
  misc_feature: Useful for introducing or modulating the production of volatile compounds
MFNFLHLSYQHLYWRKPTSPSDAPPVGTERRFIATKGGDLELLVAKPAHSAPGIPPVFFVHGGMGSAWVWHEYMRYLADHGITSYAVSTRGHGASWHPSFFRMLYATPKRALAQDVVACIQAVQDSEGDEVVMVGHSSGGGLSQFIVAEGMVKVKGLALLGAIPGTGSLGVYLNWWQFDPWFTIRLLFHGWHSNSPLSHPYLVKQAFFSRTYPEDKLAEFTKHLNRYESYLWPLGMMSRFIDPKNLLLNITGWGKGSRMLIMAGTDEALVTKPIQQATADTYRQAFSALIGEKKFEANDEPICAMENGVEADEGHGVQMVRVPGAAHHLQNDTTWEIGAEKLVAFLRQL

SEQ ID NO: 11578 - DNA, 5693 bp, Muscodor strobelii
  misc_feature: SGI EST ID NO. CUFF.27796.2
  misc_feature: Variant of the nucleotide sequence at SEQ ID NO 11576
cctatatgtatgaacgctgtgcccatcgaatcggcgagttaaggatttctgtaaatcattctcgcatctctcctatttgaaacttcactaatcactacgccatctacctaatttagaccttgatacattatccatttacaagagagcttatccacattgaggtctaatgtctaccaacaacctgatcaagccaacgaagaagcaagaagcaatcgatgcggaacaggaagcacaagctgccttcacagaacagttctatcgcgagcaggcgcagcactgggcagactcgtacggggaagacgagaatccctttctcggtgggacgtgggtgaagggtacgaagccaaagccaaaaccagagccaaagccggagccaaagcccgccccggccaacccgtccacacccaaggagcaagccgagaaggacgtgcgacgttagggtacctgtccgagtgcgtgacttgtgctagatatgcataaaggagcgggcgttggtgaagtagctgaggaggtatagaaattatgccgatgatctcttgtgatgtctcgtgtcagatcgtgcagaatacaggttgcgcagttttgggggcgagtattcatctgggacgaatcaggctttaccttcctatcgtggttccctccccattgttgtctggggcttagcgggcaggtgcgacgttgatatatctctagcaattgtggttacttctagagtgacacagaagaggatgtcttgcggagactgtacgatgctcgttgtcgtccagatggccaattagcattgataaacaggggttgaagcaaggtgcattatgcagttggtcttcttatgcagctctacagtacggccgtaaatggggagttagtcatgcgaaattcgctctttttgcagcatgcccatatttcattcagcaccttgtctgtcttccaatctgacctttctgcaagtcgattctcttgagttcctgctgattttggcaccgaggagcttgtgacagatagcgcactgtattttgccggccaatctcaatcgccatgacctcctcatcagatataagcgaattgagtgactccgactttgatcatcacgcgggcacacaatacacgaacacgcgcgaaacctctttagtacacgagcatattagtgcgccgaaactgatagagcagtttgacacagctatcaaaaatgcgtggccaacaagacacgagccgtacacatccgtttctgtgctcatgatgagctgggaggagacgctaaagggagcaatgaagcggcagctagaccggctgcaatcggtcttccaagacatctacaggtactcggtcgaaaggtggctgataccatccacaatgccgcacgaggccattcggttacaaatgaataagttctgggacgagaacttcaacaagccaaaaacgcttcttatcctgtattataacggtcatgctaggcagaacgttagcggccattttccattctgggtcccgaacctgacatgtgacccgagtctacaagtagacacggccgtctttcacagcttgctggtaagtggcggacagggctcacccgatgtgctcatgctctacgactgttgctttgccacctcatctcacctctctggtgctggtgccagtcgagcggcaattgagggcctgtttgctggaggttttgaatctcgggtgccactcccgggaccagactcatttacacaacacctcataaacgagctgggctgggcggctgaattcaagtcccaattcaccgtcacagagcttcatcatcgcttgatatatcggctacagaactacgactcgtcattgatcttcgatcagaatgaccgaaccagagttgaccccatcacgggcggacctttgatcacccagtcgaggcgagtgagccctttgcatctgttttatgcaaggccggtcgtaaggcagataaaactctcacctctctccttggacaatggagaagaatatgttccctcaccccagcttccggacaatagcctcccggagtatccgaaggttatgctttcgatccgcctggaaaatgggcatcaaaatgagtacgagatcaaacaatggatgatgagtgcacctgatggggtcgagtatctcggtatggcgccaagtttctcagacctgctcctcctgacagtcccaattaccgtctgggacctgctcccggaatgcccagctgtctcgttcgtggggttcacgactggtccttttcgaccttcacttcctgcgcccttgaaagaaaaagaaaaagagagcattattagagagtctcgtaccaaagagtctactgccaaagagtctactgccaaagagtctactgccgaagagtctactgccaataaccgtgtactaaatcaaccatcgccgctacaatcgccctcatcaactccgcttccctcttcatatacagagagttttgagccgacaagagtggattcggtaactgctcagggcgagtcgagcgcggccaccccttccagttcaccaaagaaaaacaaaaattgggatattgaagcgctgaaagctcgcaatactatggccaggacgcagaatgcagttgaagtgtcccaagcgccttctgttggacaggagaggcgccagacacgggcaaaaacgcgtcgcaaaccaaaagacgaggacattccggaaaatggggattgtagagcattgcattctactgcccgtctgcgaggctacggagaagagacattcagtgattggctcgaatgagggaatacgatttcagtctagggctgatgcgtacacagggtttagtattctcccctgaggtaatcatgattattgagatatcagcaggtacgaaactgttgctgtcaatgtgcttgagaggcatgtgcgattcatcgagatgcctcttgaatacaacccctatatcgttctgatcaagaggtttgggtaaccttgcgtctaatatcagacaggctgtggattcttctcgcttgtttcttctccatctttataacaaataacggacattctacagtttgtcttatccgcgtgatgatgctttgtattgcttgcgccattacgtttgactggcaattactacaaatcatactccgtgcttcctctttaccagtcgaaacgcaagaagatattgtttttgtgcattataaaataaccgcgactattaaagcgctcccatacatggaataagaacacctttcaaattgatcgatgcagcaatcgcctcaatatcacttccgtggacatttaaaatcagcatggggatgattttgctagtctgccgccgatgtctcgcgtgaaatgcgggaaacttcgccggtgagtcaacaaaccttattcatgcattagcattggccggacgccagagtggcttaccgccaaggcgacaagttagactcagccgctctacgatccttttcagtataacttcgtcaaatggcctcctgaattgcaatccgtttttgcgttggattcaatcaatctcttaagttaatatgttcaatttcctacatttaagctatcaacacctgtactggcggaagcccaccagcccatcagatgctccgccggtgggcactgaacggcgtttcatcgcgacaaagggtggcgacctagagctcctcgtcgcaaagcctgcgcattcagcgccaggtatcccgccggtgttcttcgtacatggcggcatgggaagtgcatgggtatggcatgaatacatgcgctacctagcagaccacggtattacaagctacgcggtctcaacgcggggtcatggcgcgagctggcatccgtcatttttccgtatgctatatgcgacgccgaagcgagcgctggctcaagatgtcgtcgcatgtatacaagcggtgcaagattcggaaggtgatgaggtggtgatggtgggtcactcgagtggtggtggattgagccaattcattgttgcagaggggatggtgaaggtgaagggactcgcactactaggagcaattccagggacaggatcacttggcgtatatcttaattggtggcagtttgatccctggtttacaatccgcttgctattccacggatggcattccaattcgcctctgtcacatccgtatctagtgaagcaggcattcttcagcaggacctatcctgaagacaagctcgcagagttcacaaagcatctgaaccgttacgaaagctatctctggccattgggcatgatgtcgcgcttcattgacccgaagaatttgttattgaatatcacaggctggggcaaaggaagtagaatgctgatcatggcgggcacggacgaggcacttgtgacgaaaccgatacaacaagcgactgcggatacttatcgtcaagcattctctgcgctaatcggcgaaaagaagtttgaagcgaatgacgagccaatttgcgccatggaaaatggagtagaagctgatgagggccatggtgtccagatggtccgcgttccaggtgcggcacatcatctacaaaatgacactacctgggagataggcgcagagaaattggtcgctttcctgcgccagctgtaacccacttagccgatcattgaagcatggccaaaggggcttttgaatggcgtcgtccattatctatgctggcatatagttgtactgctttgcctgtatagttaagcgcatgagtttgaaaccttaatgattgccaactctcatttatatccgctggtcggcctcagaggaagttttgctgtcttatacgccatatcgatcatcttggccgttgcaatggagtcctcgccatctatccactggggcgtatagtgaccgcggatcttgttaacgaactgctcaagctggtagcgataggtcgtccaataggcctcgccggcttgttcctccgcgccctttaactcggtatctcgccaggtgtatgctttgatagtcttgctcgtcttccacttcttcctcggccgcgcaggggtagaatatgagacaatttttcttatctcaaaatgatcattcacagtgatcgtgtgaagataagtagggatcacgaagttgctgaatgagatcttgcgcgttcgcatgacttgttcgccatcttcaatcatgatgccgctagcttccggatcagaaatcacgacaggtttgtgcgtgacctggatttcaggcgtcaatttattcagtggtgctttcagatcaccttccatctctccgatgccaccattgggaaaaagatattgcgtgcggtaccatcgatcacatcgggggtccgatccaggactagtctcgcacgatttacacgtgtctgctgcacttccaaaaatgcgcgacagcgcgcttgctgtgtacgcacctagatccatcattgcgcctccgccaagctcgaagttgtacctgatatcatcggcacctaacttccaacggggtacccaaagacaggctttggcgtatgctacttctgaaggcgtgacgtgagccatgaatgccgcccaagccggatggaaagcgtagtgaacagcctcgagaagcacgggtcgaggcgagcttgcagcatcaggccattgtgacaggaagagctgcgtggcctcggtcgcattgttcaccgatggtttctccaagagaacatgtttgccggctttcagagcgcgttgcgcccattcgtagtgtaacccactaccgcacttggtgtcagtgatgactcttctt

SEQ ID NO: 11579 - DNA, 1719 bp, Muscodor strobelii
  misc_feature: SGI cDNA ID NO. 563724
  misc_feature: Elevated expression when VOC is produced
  misc_feature: Encodes the peptide sequence at SEQ ID NO 11580
atgacctcctcatcagatataagcgaattgagtgactccgactttgatcatcacgcgggcacacaatacacgaacacgcgcgaaacctctttagtacacgagcatattagtgcgccgaaactgatagagcagtttgacacagctatcaaaaatgcgtggccaacaagacacgagccgtacacatccgtttctgtgctcatgatgagctgggaggagacgctaaagggagcaatgaagcggcagctagaccggctgcaatcggtcttccaagacatctacaggtactcggtcgaaaggtggctgataccatccacaatgccgcacgaggccattcggttacaaatgaataagttctgggacgagaacttcaacaagccaaaaacgcttcttatcctgtattataacggtcatgctaggcagaacgttagcggccattttccattctgggtcccgaacctgacatgtgacccgagtctacaagtagacacggccgtctttcacagcttgctggtaagtggcggacagggctcacccgatgtgctcatgctctacgactgttgctttgccacctcatctcacctctctggtgctggtgccagtcgagcggcaattgagggcctgtttgctggaggttttgaatctcgggtgccactcccgggaccagactcatttacacaacacctcataaacgagctgggctgggcggctgaattcaagtcccaattcaccgtcacagagcttcatcatcgcttgatatatcggctacagaactacgactcgtcattgatcttcgatcagaatgaccgaaccagagttgaccccatcacgggcggacctttgatcacccagtcgaggcgagtgagccctttgcatctgttttatgcaaggccggtcgtaaggcagataaaactctcacctctctccttggacaatggagaagaatatgttccctcaccccagcttccggacaatagcctcccggagtatccgaaggttatgctttcgatccgcctggaaaatgggcatcaaaatgagtacgagatcaaacaatggatgatgagtgcacctgatggggtcgagtatctcggtatggcgccaagtttctcagacctgctcctcctgacagtcccaattaccgtctgggacctgctcccggaatgcccagctgtctcgttcgtggggttcacgactggtccttttcgaccttcacttcctgcgcccttgaaagaaaaagaaaaagagagcattattagagagtctcgtaccaaagagtctactgccaaagagtctactgccaaagagtctactgccgaagagtctactgccaataaccgtgtactaaatcaaccatcgccgctacaatcgccctcatcaactccgcttccctcttcatatacagagagttttgagccgacaagagtggattcggtaactgctcagggcgagtcgagcgcggccaccccttccagttcaccaaagaaaaacaaaaattgggatattgaagcgctgaaagctcgcaatactatggccaggacgcagaatgcagttgaagtgtcccaagcgccttctgttggacaggagaggcgccagacacgggcaaaaacgcgtcgcaaaccaaaagacgaggacattccggaaaatggggattgtagagcattgcattctactgcccgtctgcgaggctacggagaagagacattcagtgattggctcgaatga

SEQ ID NO: 11580 - protein, 572 aa, Muscodor strobelii
  misc_feature: SGI Peptide ID NO. 563724
  misc_feature (41)..(398): NCBI GI: 116191399 Blast Desc: CHGG_05417 [Chaetomium globosum CBS 148.51] gi|88181330|gb|EAQ88798.1| CHGG_05417 [Chaetomium globosum CBS 148.51]
  misc_feature (26)..(395): NCBI GI: 116208088 Blast Desc: CHGG_03337 [Chaetomium globosum CBS 148.51] gi|88183934|gb|EAQ91402.1| CHGG_03337 [Chaetomium globosum CBS 148.51]
  misc_feature (59)..(462): NCBI GI: 154291947 Blast Desc: BC1G_14276 [Botryotinia fuckeliana B05.10] gi|150846377|gb|EDN21570.1| BC1G_14276 [Botryotinia fuckeliana B05.10]
  misc_feature (26)..(396): NCBI GI: 256728495 Blast Desc: NECHADRAFT_50976 [Nectria haematococca mpVI 77-13-4]
  misc_feature (59)..(456): NCBI GI: 156044716 Blast Desc: SS1G_10462 [Sclerotinia sclerotiorum 1980] gi|154694850|gb|EDN94588.1| SS1G_10462 [Sclerotinia sclerotiorum 1980]
  misc_feature (60)..(395): NCBI GI: 256729718 Blast Desc: [Nectria haematococca mpVI 77-13-4]
  misc_feature (60)..(395): NCBI GI: 46122199 Blast Desc: FG05477.1 [Gibberella zeae PH-1]
  misc_feature (46)..(397): NCBI GI: 256725857 Blast Desc: [Nectria haematococca mpVI 77-13-4]
  misc_feature (59)..(397): NCBI GI: 85092078 Blast Desc: NCU04673 [Neurospora crassa OR74A] gi|28920618|gb|EAA29980.1| conserved [Neurospora crassa OR74A] gi|28950061|emb|CAD70815.1| [Neurospora crassa]
  misc_feature (28)..(424): NCBI GI: 154295188 Blast Desc: BC1G_13537 [Botryotinia fuckeliana B05.10] gi|150844220|gb|EDN19413.1| BC1G_13537 [Botryotinia fuckeliana B05.10]
  misc_feature: Useful for introducing or modulating the production of volatile compounds
MTSSSDISELSDSDFDHHAGTQYTNTRETSLVHEHISAPKLIEQFDTAIKNAWPTRHEPYTSVSVLMMSWEETLKGAMKRQLDRLQSVFQDIYRYSVERWLIPSTMPHEAIRLQMNKFWDENFNKPKTLLILYYNGHARQNVSGHFPFWVPNLTCDPSLQVDTAVFHSLLVSGGQGSPDVLMLYDCCFATSSHLSGAGASRAAIEGLFAGGFESRVPLPGPDSFTQHLINELGWAAEFKSQFTVTELHHRLIYRLQNYDSSLIFDQNDRTRVDPITGGPLITQSRRVSPLHLFYARPVVRQIKLSPLSLDNGEEYVPSPQLPDNSLPEYPKVMLSIRLENGHQNEYEIKQWMMSAPDGVEYLGMAPSFSDLLLLTVPITVWDLLPECPAVSFVGFTTGPFRPSLPAPLKEKEKESIIRESRTKESTAKESTAKESTAEESTANNRVLNQPSPLQSPSSTPLPSSYTESFEPTRVDSVTAQGESSAATPSSSPKKNKNWDIEALKARNTMARTQNAVEVSQAPSVGQERRQTRAKTRRKPKDEDIPENGDCRALHSTARLRGYGEETFSDWLE

SEQ ID NO: 11581 - DNA, 5742 bp, Muscodor strobelii
  misc_feature: SGI EST ID NO. CUFF.27796.1
  misc_feature: Variant of the nucleotide sequence at SEQ ID NO 11579
cctatatgtatgaacgctgtgcccatcgaatcggcgagttaaggatttctgtaaatcattctcgcatctctcctatttgaaacttcactaatcactacgccatctacctaatttagaccttgatacattatccatttacaagagagcttatccacattgaggtctaatgtctaccaacaacctgatcaagccaacgaagaagcaagaagcaatcgatgcggaacaggaagcacaagctgccttcacagaacagttctatcgcgagcaggcgcagcactgggcagactcgtacggggaagacgagaatccctttctcggtgggacgtgggtgaagggtacgaagccaaagccaaaaccagagccaaagccggagccaaagcccgccccggccaacccgtccacacccaaggagcaagccgagaaggacgtgcgacgttagggtacctgtccgagtgcgtgacttgtgctagatatgcataaaggagcgggcgttggtgaagtagctgaggaggtatagaaattatgccgatgatctcttgtgatgtctcgtgtcagatcgtgcagaatacaggttgcgcagttttgggggcgagtattcatctgggacgaatcaggctttaccttcctatcgtggttccctccccattgttgtctggggcttagcgggcaggtgcgacgttgatatatctctagcaattgtggttacttctagagtgacacagaagaggatgtcttgcggagactgtacgatgctcgttgtcgtccagatggccaattagcattgataaacaggggttgaagcaaggtgcattatgcagttggtcttcttatgcagctctacagtacggccgtaaatggggagttagtcatgcgaaattcgctctttttgcagcatgcccatatttcattcagcaccttgtctgtcttccaatctgacctttctgcaagtcgattctcttgagttcctgctgattttggcaccgaggagcttgtgacagatagcgcactgtattttgccggccaatctcaatcgccatgacctcctcatcagatataagcgaattgagtgactccgactttgatcatcacgcgggcacacaatacacgaacacgcgcgaaacctctttagtacacgagcatattagtgcgccgaaactgatagagcagtttgacacagctatcaaaaatgcgtggccaacaagacacgagccgtacacatccgtttctgtgctcatgatgagctgggaggagacgctaaagggagcaatgaagcggcagctagaccggctgcaatcggtcttccaagacatctacaggtactcggtcgaaaggtggctgataccatccacaatgccgcacgaggccattcggttacaaatgaataagttctgggacgagaacttcaacaagccaaaaacgcttcttatcctgtattataacggtcatgctaggcagaacgttagcggccattttccattctgggtcccgaacctgacatgtgacccgagtctacaagtagacacggccgtctttcacagcttgctggtaagtggcggacagggctcacccgatgtgctcatgctctacgactgttgctttgccacctcatctcacctctctggtgctggtgccagtcgagcggcaattgagggcctgtttgctggaggttttgaatctcgggtgccactcccgggaccagactcatttacacaacacctcataaacgagctgggctgggcggctgaattcaagtcccaattcaccgtcacagagcttcatcatcgcttgatatatcggctacagaactacgactcgtcattgatcttcgatcagaatgaccgaaccagagttgaccccatcacgggcggacctttgatcacccagtcgaggcgagtgagccctttgcatctgttttatgcaaggccggtcgtaaggcagataaaactctcacctctctccttggacaatggagaagaatatgttccctcaccccagcttccggacaatagcctcccggagtatccgaaggttatgctttcgatccgcctggaaaatgggcatcaaaatgagtacgagatcaaacaatggatgatgagtgcacctgatggggtcgagtatctcggtatggcgccaagtttctcagacctgctcctcctgacagtcccaattaccgtctgggacctgctcccggaatgcccagctgtctcgttcgtggggttcacgactggtccttttcgaccttcacttcctgcgcccttgaaagaaaaagaaaaagagagcattattagagagtctcgtaccaaagagtctactgccaaagagtctactgccaaagagtctactgccgaagagtctactgccaataaccgtgtactaaatcaaccatcgccgctacaatcgccctcatcaactccgcttccctcttcatatacagagagttttgagccgacaagagtggattcggtaactgctcagggcgagtcgagcgcggccaccccttccagttcaccaaagaaaaacaaaaattgggatattgaagcgctgaaagctcgcaatactatggccaggacgcagaatgcagttgaagtgtcccaagcgccttctgttggacaggagaggcgccagacacgggcaaaaacgcgtcgcaaaccaaaagacgaggacattccggaaaatggggattgtagagcattgcattctactgcccgtctgcgaggctacggagaagagacattcagtgattggctcgaatgagggaatacgatttcagtctagggctgatgcgtacacagggtttagtattctcccctgaggtaatcatgattattgagatatcagcaggtacgaaactgttgctgtcaatgtgcttgagaggcatgtgcgattcatcgagatgcctcttgaatacaacccctatatcgttctgatcaagaggtttgggtaaccttgcgtctaatatcagacaggctgtggattcttctcgcttgtttcttctccatctttataacaaataacggacattctacagtttgtcttatccgcgtgatgatgctttgtattgcttgcgccattacgtttgactggcaattactacaaatcatactccgtgcttcctctttaccagtcgaaacgcaagaagatattgtttttgtgcattataaaataaccgcgactattaaagcgctcccatacatggaataagaacacctttcaaattgatcgatgcagcaatcgcctcaatatcacttccgtggacatttaaaatcagcatggggatgattttgctagtctgccgccgatgtctcgcgtgaaatgcgggaaacttcgccggtgagtcaacaaaccttattcatgcattagcattggccggacgccagagtggcttaccgccaaggcgacaagttagactcagccgctctacgatccttttcagtataacttcgtcaaatggcctcctgaattgcaatccgtttttgcgttggattcaatcaatctcttaagttaatatgttcaatttcctacatttaagctatcaacacctgtactggcggaagcccaccagcccatcagatgctccgccggtgggcactgaacggcgtttcatcgcgacaaagggtggcgacctagagctcctcgtcgcaaagcctgcgcattcagcgccaggtatcccgccggtgttcttcgtacatggcggcatgggaagtgcatgggtatggcatgaatacatgcgctacctagcagaccacggtattacaagctacgcggtctcaacgcggggtcatggcgcgagctggcatccgtcatttttccgtatgctatatgcgacgccgaagcgagcgctggctcaagatgtcgtcgcatgtatacaagcggtgcaagattcggaaggtgatgaggtggtgatggtgggtcactcgagtggtggtggattgagccaattcattgttgcagaggggatggtgaaggtgaagggactcgcactactaggagcaattccagggacaggatcgtaggtttcaactcagatcgttagagctagacttctgacttttcggtagacttggcgtatatcttaattggtggcagtttgatccctggtttacaatccgcttgctattccacggatggcattccaattcgcctctgtcacatccgtatctagtgaagcaggcattcttcagcaggacctatcctgaagacaagctcgcagagttcacaaagcatctgaaccgttacgaaagctatctctggccattgggcatgatgtcgcgcttcattgacccgaagaatttgttattgaatatcacaggctggggcaaaggaagtagaatgctgatcatggcgggcacggacgaggcacttgtgacgaaaccgatacaacaagcgactgcggatacttatcgtcaagcattctctgcgctaatcggcgaaaagaagtttgaagcgaatgacgagccaatttgcgccatggaaaatggagtagaagctgatgagggccatggtgtccagatggtccgcgttccaggtgcggcacatcatctacaaaatgacactacctgggagataggcgcagagaaattggtcgctttcctgcgccagctgtaacccacttagccgatcattgaagcatggccaaaggggcttttgaatggcgtcgtccattatctatgctggcatatagttgtactgctttgcctgtatagttaagcgcatgagtttgaaaccttaatgattgccaactctcatttatatccgctggtcggcctcagaggaagttttgctgtcttatacgccatatcgatcatcttggccgttgcaatggagtcctcgccatctatccactggggcgtatagtgaccgcggatcttgttaacgaactgctcaagctggtagcgataggtcgtccaataggcctcgccggcttgttcctccgcgccctttaactcggtatctcgccaggtgtatgctttgatagtcttgctcgtcttccacttcttcctcggccgcgcaggggtagaatatgagacaatttttcttatctcaaaatgatcattcacagtgatcgtgtgaagataagtagggatcacgaagttgctgaatgagatcttgcgcgttcgcatgacttgttcgccatcttcaatcatgatgccgctagcttccggatcagaaatcacgacaggtttgtgcgtgacctggatttcaggcgtcaatttattcagtggtgctttcagatcaccttccatctctccgatgccaccattgggaaaaagatattgcgtgcggtaccatcgatcacatcgggggtccgatccaggactagtctcgcacgatttacacgtgtctgctgcacttccaaaaatgcgcgacagcgcgcttgctgtgtacgcacctagatccatcattgcgcctccgccaagctcgaagttgtacctgatatcatcggcacctaacttccaacggggtacccaaagacaggctttggcgtatgctacttctgaaggcgtgacgtgagccatgaatgccgcccaagccggatggaaagcgtagtgaacagcctcgagaagcacgggtcgaggcgagcttgcagcatcaggccattgtgacaggaagagctgcgtggcctcggtcgcattgttcaccgatggtttctccaagagaacatgtttgccggctttcagagcgcgttgcgcccattcgtagtgtaacccactaccgcacttggtgtcagtgatgactcttctt

SEQ ID NO: 11582 - DNA, 336 bp, Muscodor strobelii
  misc_feature: SGI cDNA ID NO. 563725
  misc_feature: Elevated expression when VOC is produced
  misc_feature: Encodes the peptide sequence at SEQ ID NO 11583
atgcacgagcggcctcatcaatcggtcgactgggcagtgcaatcattaagctaccatggtctaatgtctaccaacaacctgatcaagccaacgaagaagcaagaagcaatcgatgcggaacaggaagcacaagctgccttcacagaacagttctatcgcgagcaggcgcagcactgggcagactcgtacggggaagacgagaatccctttctcggtgggacgtgggtgaagggtacgaagccaaagccaaaaccagagccaaagccggagccaaagcccgccccggccaacccgtccacacccaaggagcaagccgagaaggacgtgcgacgttag

SEQ ID NO: 11583 - protein, 111 aa, Muscodor strobelii
  misc_feature: SGI Peptide ID NO. 563725
  misc_feature: Useful for introducing or modulating the production of volatile compounds
MHERPHQSVDWAVQSLSYHGLMSTNNLIKPTKKQEAIDAEQEAQAAFTEQFYREQAQHWADSYGEDENPFLGGTWVKGTKPKPKPEPKPEPKPAPANPSTPKEQAEKDVRR

SEQ ID NO: 11584 - DNA, 999 bp, Muscodor strobelii
  misc_feature: SGI cDNA ID NO. 563726
  misc_feature: Elevated expression when VOC is produced
  misc_feature: Encodes the peptide sequence at SEQ ID NO 11585
atggtcgcatctttgaaagaagtgacggtagatcaggaagcttcaaacaagcatccgacggaacaagagattcataagtatccttggaagtatattggatacaaggactttactgcctatgccgcagccgatactgatttcttcgcccttcggcggttcgatcgtctgcacacgaggtcgctattcaccctacaagaccagctcagcgagctcgaggatcgactagatcagatggacgttaggttcagtagcaaggacacaaaaatatcgggaacttatctgtacccaatcgtcagtcttggtggagttcgggttgaaaggagtggcaacgacttgagagatataaacaatggcacgatccgaaatgatctgtccgagagatccgtgcttctagcagagatcacagggaaactcaaagagtatgacaaagctgtgcttagatactcgcacctacgacagctctccccggctccgaagcgaaacataagaaacctcgagagctggttcgaagaacacgaaggagctatcatggaaaaagagacggagtttatccgctaccgcgacgaagttatctccatgtcgactccgaaatcgacggcccgcaggtggttcgaagaccagatcatttgccgggcgaacgttaagctcggcttatttaggaagcaactgtatgatggcacaaagctgagtagtcgagaccagagcgccatgtacacattcaacgacaaggctgtggacgtattcgagtccctcgcggttttcctgacggcgacggcgatgctgattgccccgttatggatccttgacagtttgaatagtctaaaactcaagcttgtggtaatcaccatctttgtcatcctctgcctcggattccttagtgttgccgctctaggacgcccgtttgaaaacctggcagctacagctgggtatgtgcaaccactctcgtacaaccacttcgtccgtgctctgaccgccctaggtattcggccgtactcgtag

SEQ ID NO: 11585 - protein, 332 aa, Muscodor strobelii
  misc_feature: SGI Peptide ID NO. 563726
  misc_feature (15)..(322): NCBI GI: 261355016 Blast Desc: conserved [Verticillium albo-atrum VaMs.102]
  misc_feature (24)..(309): NCBI GI: 171685542 Blast Desc: protein product [Podospora anserina] gi|170942732|emb|CAP68385.1| protein product [Podospora anserina]
  misc_feature (15)..(314): NCBI GI: 189204077 Blast Desc: PTRG_08042 [Pyrenophora tritici-repentis Pt-1C-BFP] gi|187985473|gb|EDU50961.1| PTRG_08042 [Pyrenophora tritici-repentis Pt-1C-BFP]
  misc_feature (19)..(302): NCBI GI: 256732079 Blast Desc: NECHADRAFT_80333 [Nectria haematococca mpVI 77-13-4]
  misc_feature (14)..(295): NCBI GI: 169619281 Blast Desc: SNOG_12835 [Phaeosphaeria nodorum SN15] gi|111058515|gb|EAT79635.1| SNOG_12835 [Phaeosphaeria nodorum SN15]
  misc_feature (33)..(311): NCBI GI: 46138151 Blast Desc: FG10590.1 [Gibberella zeae PH-1]
  misc_feature (19)..(141): NCBI GI: 169605277 Blast Desc: SNOG_05661 [Phaeosphaeria nodorum SN15] gi|111065605|gb|EAT86725.1| SNOG_05661 [Phaeosphaeria nodorum SN15]
  misc_feature (13)..(310): NCBI GI: 256721705 Blast Desc: NECHADRAFT_82461 [Nectria haematococca mpVI 77-13-4]
  misc_feature (22)..(315): NCBI GI: 145244036 Blast Desc: An11g05410 [Aspergillus niger] gi|134079214|emb|CAL00388.1| protein product [Aspergillus niger]
  misc_feature (33)..(296): NCBI GI: 255945407 Blast Desc: Pc20g09770 [Penicillium chrysogenum Wisconsin 54-1255] gi|211588206|emb|CAP86306.1| Pc20g09770 [Penicillium chrysogenum Wisconsin 54-1255]
  misc_feature: Useful for introducing or modulating the production of volatile compounds
MVASLKEVTVDQEASNKHPTEQEIHKYPWKYIGYKDFTAYAAADTDFFALRRFDRLHTRSLFTLQDQLSELEDRLDQMDVRFSSKDTKISGTYLYPIVSLGGVRVERSGNDLRDINNGTIRNDLSERSVLLAEITGKLKEYDKAVLRYSHLRQLSPAPKRNIRNLESWFEEHEGAIMEKETEFIRYRDEVISMSTPKSTARRWFEDQIICRANVKLGLFRKQLYDGTKLSSRDQSAMYTFNDKAVDVFESLAVFLTATAMLIAPLWILDSLNSLKLKLVVITIFVILCLGFLSVAALGRPFENLAATAGYVQPLSYNHFVRALTALGIRPYS

SEQ ID NO: 11586 - DNA, 1352 bp, Muscodor strobelii
  misc_feature: SGI EST ID NO. CUFF.27537.0
  misc_feature: Variant of the nucleotide sequence at SEQ ID NO 11584
tacgatttcaaattaacacggcgacagtgaagatggtcgcatctttgaaagaagtgacggtagatcaggaagcttcaaacaagcatccgacggaacaagagattcataagtatccttggaagtatattggatacaaggactttactgcctatgccgcagccgatactgatttcttcgcccttcggcggttcgatcgtctgcacacgaggtcgctattcaccctacaagaccagctcagcgagctcgaggatcgactagatcagatggacgttaggttcagtagcaaggacacaaaaatatcgggaacttatctgtacccaatcgtcagtcttggtggagttcgggttgaaaggagtggcaacgacttgagagatataaacaatggcacgatccgaaatgatctgtccgagagatccgtgcttctagcagagatcacagggaaactcaaagagtatgacaaagctgtgcttagatactcgcacctacgacagctctccccggctccgaagcgaaacataagaaacctcgagagctggttcgaagaacacgaaggagctatcatggaaaaagagacggagtttatccgctaccgcgacgaagttatctccatgtcgactccgaaatcgacggcccgcaggtggttcgaagaccagatcatttgccgggcgaacgttaagctcggcttatttaggaagcaactgtatgatggcacaaagctgagtagtcgagaccagagcgccatgtacacattcaacgacaaggctgtggacgtattcgagtccctcgcggttttcctgacggcgacggcgatgctgattgccccgttatggatccttgacagtttgaatagtctaaaactcaagcttgtggtaatcaccatctttgtcatcctctgcctcggattccttagtgttgccgctctaggacgcccgtttgaaaacctggcagctacagctgggtattcggccgtactcgtagttttcttgcaaataggattatgaagagatgattaactacaccaatgatggaatggccccgtcattatgtgccggcactcgcagggttgggggagctgtgagggggatgggaaaggggagaagaagacttgtcagccgttgtcacattgtatttatggaggagcttgccatccatctcggcatatctggatgacccgatgtggttattgcgcgtgaatcgaatttccgacttggagatttatcttgatgctacatgaacccaataccttcggccctgaggtaacgtgacgaaaagaaggaagatcagtcaagtgacaaaagcaaactaatttgctttagtcgcttgagtctacgtaatgatatacattactacgc

SEQ ID NO: 11587 - DNA, 2340 bp, Muscodor strobelii
  misc_feature: SGI cDNA ID NO. 563727
  misc_feature: Encodes the peptide sequence at SEQ ID NO 11588
atggcgacccgtttcgagggattgaaactggagtcccgccagatcaggctcttaacattttgtggcgaagatacctcacagactggggactccgacttcgaagttcatgctgacctcgaagtagtatccttggacgatgcggatgtgcgctatctggctttatcttatgtatggggacctcaagaacccaccatcccaacggtgatcggcgggcgaccttttgaagcggtgccaagtgtgatacaggccctccaatatattcaaaatctccctgggatgaaggggcaaaagatatgggtcgacgctctgtgcatcaatcagaaagacgacgccgagaagtccaaacaggtggatatgatgggcgatatttaccgcaaagctgacaaggtcctcatgtggctaggtcaagaagcggacgatagtcatttagcaatggagcttttacactctttcgaacacatcgacaaactacagcttgagaagttctttagccgaacgaaggacgacctgacttcgtggaacgcactacagaagctgtttcagcgcgactactggagtcgcgtctgggtcctgcaggaggttgtgctttccaagagcacacaaattgtatgcggcaaggagaccgctccttggaaatctgtcgaaactctcttgcgacgtgaatcatacaccgatcacatcgaaataccaataagagagcaacgggtcactgttcttgacagacgtcttcttcctgtccttctcgtagacatcattgagcgacggaaaaggggggaagcaacgctactcgactatttgttgttaagtcgccaacgttctgcgactgccccacacgatcatatctacggtgtgatgggtttgatgacggagcgaatgttgcgcgccaactacgagaagaccgccgaagaagtgtataaagaactcgtcacacatatacttctagtgaaacgggactttagtgtattgagcatgtgctgtgagatggataatcgcaccgataattcagagaaccatttgtcaacttcgactccgacaacgagtaagatcaagcctccaatgattctaccgtcatgggttccggactggcagagacggttcagtaaagactaccaatcttttccccttgtgaaactgaattatagtgctggtgctgtggctcctctagaagctccaccaatcaggattcaaaatgatgtgttagaagtatcggggtatatcattgacacaatatccttcatatctccagcccaagatctcaatcgatggccgcaagtgggagaggactgggagaaactcaataagcacataaaatcgcactcccgacggtattcgtctctacaactattgcgcgaagcatttaaaagcacgctgtactgctataaaaacgaagttcaggacccacgcgatggtagcaatcaatatttcgatctcgccacagcgctcgatggtcaattttcaactcgcgagcaactaacccatacggagaggacctttggtaccgcggggcgccaattcttcagcacggtgaatggattcgtcggccgcggattagactctgtccgagaaggagacgttgtggggattttcattggagcaaaagtacctttcgtcttgcgtccaacacaagataagaatgatttctatcttgtcggcgaatgctgggaatactttctcgatgaagcggggcgagattttgggcgcgagattgatcttgcgaaatatccttacattggtgctggtggggggcagcaggatgaagctgatgtagatggcgatgcaacacaacccttactattcgggaggaccaaccttaaggatatgcgcgtcaatcagaatacgctgaagacctgggccaagtgtttaaaggtcgctgctgaactgctggaggctggacattctgtcgttaggggttggttcagtccctttatgtcgcctggtccattaatacgtttcttaatttccgaccaatcgtgtacagacaacacgaatcctgacccaaatgggagacgtcaatggactgagcttggccgggagtacaacgctcctgtgcgcagtgtctggttcaacataccgaaggctctatgcgaacataacgacgcactacgagcattgaacaaagtgataagtccagaagcgcgtccgatcttgccgtcgatagttttcagcggttacttctctcgctttcgggagcctacggccaaagaaatcttacaagacctgcttccctttgagttcaaattcagcagacagaggacgaatacgcaattcggggcaagtactggaactagcagcacttccaccttctacgttactcatccacgcagccagcgccgaatataa

SEQ ID NO: 11588 - protein, 779 aa, Muscodor strobelii
  misc_feature: SGI Peptide ID NO. 563727
  misc_feature (51)..(193): Pfam Id: PF06985 Pfam Desc: Heterokaryon incompatibility protein (HET)
  misc_feature (555)..(751): NCBI GI: 261354419 Blast Desc: bifunctional polynucleotide phosphatase/kinase [Verticillium albo-atrum VaMs.102]
  misc_feature (14)..(551): NCBI GI: 168042194 Blast Desc: [Physcomitrella patens subsp. patens] gi|162675113|gb|EDQ61612.1| [Physcomitrella patens subsp. patens]
  misc_feature (2)..(565): NCBI GI: 169608744 Blast Desc: SNOG_07457 [Phaeosphaeria nodorum SN15] gi|111063803|gb|EAT84923.1| SNOG_07457 [Phaeosphaeria nodorum SN15]
  misc_feature (5)..(554): NCBI GI: 169616049 Blast Desc: SNOG_11196 [Phaeosphaeria nodorum SN15] gi|111060575|gb|EAT81695.1| SNOG_11196 [Phaeosphaeria nodorum SN15]
  misc_feature (13)..(540): NCBI GI: 67538668 Blast Desc: AN5504.2 [Aspergillus nidulans FGSC A4] gi|40743474|gb|EAA62664.1| AN5504.2 [Aspergillus nidulans FGSC A4] gi|259485046|tpe|CBF81783.1| TPA: HET domain protein nidulans
  misc_feature (50)..(558): NCBI GI: 154311024 Blast Desc: BC1G_06630 [Botryotinia fuckeliana B05.10] gi|150851034|gb|EDN26227.1| BC1G_06630 [Botryotinia fuckeliana B05.10]
  misc_feature (9)..(554): NCBI GI: 145245067 Blast Desc: An11g08370 [Aspergillus niger] gi|134079496|emb|CAK46028.1| protein product [Aspergillus niger]
  misc_feature (10)..(554): NCBI GI: 256723655 Blast Desc: NECHADRAFT_52103 [Nectria haematococca mpVI 77-13-4]
  misc_feature (10)..(554): NCBI GI: 145246728 Blast Desc: An12g05450 [Aspergillus niger] gi|134080334|emb|CAK46256.1| protein product [Aspergillus niger]
  misc_feature (12)..(558): NCBI GI: 256728445 Blast Desc: NECHADRAFT_54320 [Nectria haematococca mpVI 77-13-4]
MATRFEGLKLESRQIRLLTFCGEDTSQTGDSDFEVHADLEVVSLDDADVRYLALSYVWGPQEPTIPTVIGGRPFEAVPSVIQALQYIQNLPGMKGQKIWVDALCINQKDDAEKSKQVDMMGDIYRKADKVLMWLGQEADDSHLAMELLHSFEHIDKLQLEKFFSRTKDDLTSWNALQKLFQRDYWSRVWVLQEVVLSKSTQIVCGKETAPWKSVETLLRRESYTDHIEIPIREQRVTVLDRRLLPVLLVDIIERRKRGEATLLDYLLLSRQRSATAPHDHIYGVMGLMTERMLRANYEKTAEEVYKELVTHILLVKRDFSVLSMCCEMDNRTDNSENHLSTSTPTTSKIKPPMILPSWVPDWQRRFSKDYQSFPLVKLNYSAGAVAPLEAPPIRIQNDVLEVSGYIIDTISFISPAQDLNRWPQVGEDWEKLNKHIKSHSRRYSSLQLLREAFKSTLYCYKNEVQDPRDGSNQYFDLATALDGQFSTREQLTHTERTFGTAGRQFFSTVNGFVGRGLDSVREGDVVGIFIGAKVPFVLRPTQDKNDFYLVGECWEYFLDEAGRDFGREIDLAKYPYIGAGGGQQDEADVDGDATQPLLFGRTNLKDMRVNQNTLKTWAKCLKVAAELLEAGHSVVRGWFSPFMSPGPLIRFLISDQSCTDNTNPDPNGRRQWTELGREYNAPVRSVWFNIPKALCEHNDALRALNKVISPEARPILPSIVFSGYFSRFREPTAKEILQDLLPFEFKFSRQRTNTQFGASTGTSSTSTFYVTHPRSQRRI

SEQ ID NO: 11589 - DNA, 2027 bp, Muscodor strobelii
  misc_feature: SGI EST ID NO. CUFF.27541.0
  misc_feature: Variant of the nucleotide sequence at SEQ ID NO 11587
caacgggtcactgttcttgacagacgtcttcttcctgtccttctcgtagacatcattgagcgacggaaaaggggggaagcaacgctactcgactatttgttgttaagtcgccaacgttctgcgactgccccacacgatcatatctacggtgtgatgggtttgatgacggagcgaatgttgcgcgccaactacgagaagaccgccgaagaagtgtataaagaactcgtcacacatatacttctagtgaaacgggactttagtgtattgagcatgtgctgtgagatggataatcgcaccgataattcagagaaccatttgtcaacttcgactccgacaacgagtaagatcaagcctccaatgattctaccgtcatgggttccggactggcagagacggttcagtaaagactaccaatcttttccccttgtgaaactgaattatagtgctggtgctgtggctcctctagaagctccaccaatcaggattcaaaatgatgtgttagaagtatcggggtatatcattgacacaatatccttcatatctccagcccaagatctcaatcgatggccgcaagtgggagaggactgggagaaactcaataagcacataaaatcgcactcccgacggtattcgtctctacaactattgcgcgaagcatttaaaagcacgctgtactgctataaaaacgaagttcaggacccacgcgatggtagcaatcaatatttcgatctcgccacagcgctcgatggtcaattttcaactcgcgagcaactaacccatacggagaggacctttggtaccgcggggcgccaattcttcagcacggtgaatggattcgtcggccgcggattagactctgtccgagaaggagacgttgtggggattttcattggagcaaaagtacctttcgtcttgcgtccaacacaagataagaatgatttctatcttgtcggcgaatgctatctgcatggaattatgcatggggaggcactcacagacgcgacgttacagcagagactcattcgatgccgatagcaatgtccttccggtcgtataacgttcgaacgacatgtagtatataacagtcccctgagtgagcatactgctatttacgtgctgatagatgccaactcataattcgtaatcatatttctcacaaatctcgggtccctctagagagacttcccgcgcgaccactctcaatcttgcatgccaggcggggagaaaatagtacgatcttttcggttattggctcagaaacagtcttgtggaaatctgagctccgagtagattgaacattgtattacgtaaagtattgcggtctttaagccaaagagacgaaggcgccagacgccatattgctctcaaaccccggctgaaggacttcagttgcttcgaccgcaacttcgcgcaagttttggcatcaaatatcatactccaggggaatactttctcgatgaagcggggcgagattttgggcgcgagattgatcttgcgaaatatccttacattggtgctggtggggggcagcaggatgaagctgatgtagatggcgatgcaacacaacccttactattcgggaggaccaaccttaaggatatggtccacttctatggtccacctagtactagcaagagcactttctactagtgttacttaaaactatgagcgcgtcaatcagaatacgctgaagacctgggccaagtgtttaaaggtcgctgctgaactgctggaggctggacattctgtcgttaggggttggttcagtccctttatgtcgcctggtccattaatacgtttcttaatttccgaccaatcgtgtacagacaacacgaatcctgacccaaatgggagacgtcaatggactgagcttggccgggagtacaacgctcctgtgcgcagtgtctggttcaacataccgaaggctctatgcgaacataacgacgcactacgagcattgaacaaagtggtatgtcacttctcttgtctctcagtgacctcgtgtcgagtcgatgagctgttgtttt

SEQ ID NO: 11590 - DNA, 822 bp, Muscodor strobelii
  misc_feature: SGI cDNA ID NO. 563728
  misc_feature: Encodes the peptide sequence at SEQ ID NO 11591
atggagcaacgggacaagacttcggaggacggtctagtagtcatccacgcagctctgtttcgcatgggaacaacgtctctggccaaagcctataggactctgggctacacagtacaccatggagttgacgatattcgcggaaacccgtgggttcttatagaaaaggcagctgaggcaacttggcccacgatacctggagcgacgaaacggccaccatacaccaggcgggactgggatactctatggggctctaaatatgacatagttactgatttagcctcgcctttcgttccccaactcctaaaggcttatccgaatgccaaagtagttgttgtccaaagagattttgaatcttggtggccgagctttagatcccaacttttaaccacgctatttactcatccctttgtcaacattggcctctttttcgattggcacatcaacggcattcgcgcaggctatgcaatgcggaaagtccatttcggattctttagagctaagaacttagaggaaatcgaggccaatgcgcgcgatacgtatgacagatattataagacagtacgagagatggttccgcctgaaagaagactcgagtataagatgggcgacgggtgggaaccgctgtgcgcgttcctcgggaagggcatccccgacattccatttccgcagctgaacgtgagaagaaggcgctcgaaaggggctccgccgcggcgaattgaaagaatcaaaagaatacttagaaaggccataccctgggttctgttgtctctcagcgtggtgatcgccgtttggtacaaacgccctgtcaaaacaataagttag

SEQ ID NO: 11591 - protein, 273 aa, Muscodor strobelii
  misc_feature: SGI Peptide ID NO. 563728
  misc_feature (2)..(263): NCBI GI: 46116006 Blast Desc: FG03845.1 [Gibberella zeae PH-1]
  misc_feature (74)..(265): NCBI GI: 116179296 Blast Desc: CHGG_00276 [Chaetomium globosum CBS 148.51] gi|88184573|gb|EAQ92041.1| CHGG_00276 [Chaetomium globosum CBS 148.51]
  misc_feature (12)..(225): NCBI GI: 154304931 Blast Desc: BC1G_09051 [Botryotinia fuckeliana B05.10] gi|150853913|gb|EDN29105.1| BC1G_09051 [Botryotinia fuckeliana B05.10]
  misc_feature (14)..(225): NCBI GI: 238837557 Blast Desc: conserved [Microsporum canis CBS 113480]
  misc_feature (14)..(252): NCBI GI: 256728993 Blast Desc: NECHADRAFT_93184 [Nectria haematococca mpVI 77-13-4]
  misc_feature (9)..(264): NCBI GI: 46120546 Blast Desc: FG04920.1 [Gibberella zeae PH-1]
  misc_feature (12)..(225): NCBI GI: 116198675 Blast Desc: CHGG_07493 [Chaetomium globosum CBS 148.51] gi|88178772|gb|EAQ86240.1| CHGG_07493 [Chaetomium globosum CBS 148.51]
  misc_feature (14)..(263): NCBI GI: 145607804 Blast Desc: MGG_10067 [Magnaporthe grisea 70-15] gi|145015300|gb|EDJ99836.1| MGG_10067 [Magnaporthe grisea 70-15]
  misc_feature (12)..(264): NCBI GI: 189196286 Blast Desc: conserved [Pyrenophora tritici-repentis Pt-1C-BFP] gi|187980360|gb|EDU46986.1| conserved [Pyrenophora tritici-repentis Pt-1C-BFP]
  misc_feature (34)..(248): NCBI GI: 169605543 Blast Desc: SNOG_05797 [Phaeosphaeria nodorum SN15] gi|160706786|gb|EAT86861.2| SNOG_05797 [Phaeosphaeria nodorum SN15]
MEQRDKTSEDGLVVIHAALFRMGTTSLAKAYRTLGYTVHHGVDDIRGNPWVLIEKAAEATWPTIPGATKRPPYTRRDWDTLWGSKYDIVTDLASPFVPQLLKAYPNAKVVVVQRDFESWWPSFRSQLLTTLFTHPFVNIGLFFDWHINGIRAGYAMRKVHFGFFRAKNLEEIEANARDTYDRYYKTVREMVPPERRLEYKMGDGWEPLCAFLGKGIPDIPFPQLNVRRRRSKGAPPRRIERIKRILRKAIPWVLLSLSVVIAVWYKRPVKTIS

SEQ ID NO: 11592 - DNA, 1198 bp, Muscodor strobelii
  misc_feature: SGI EST ID NO. CUFF.27555.0
  misc_feature: Variant of the nucleotide sequence at SEQ ID NO 11590
gtcacgatctgacagtgacctgttctgcttcttaagatatcctaggttccctacctcgctcaacaattgctcaattcgctcatgacttgacttttatctttattcatcgcatcgaataccctcgaagtgttggaatacatcctgacatcatggagcaacgggacaagacttcggaggacggtctagtagtcatccacgcagctctgtttcgcatgggaacaacgtctctggccaaagcctataggactctgggctacacagtacaccatggagttgacgatattcgcggaaacccgtgggttcttatagaaaaggcagctgaggcaacttggcccacgatacctggagcgacgaaacggccaccatacaccaggcgggactgggatactctatggggctctaaatatgacatagttactgatttagcctcgcctttcgttccccaactcctaaaggcttatccgaatgccaaagtagttgttgtccaaagagattttgaatcttggtggccgagctttagatcccaacttttaaccacgctatttactcatccctttgtcaacattggcctctttttcgattggcacatcaacggcattcgcgcaggctatgcaatgcggaaagtccatttcggattctttagagctaagaacttagaggaaatcgaggccaatgcgcgcgatacgtatgacagatattataagacagtacgagagatggttccgcctgaaagaagactcgagtataagatgggcgacgggtgggaaccgctgtgcgcgttcctcgggaagggcatccccgacattccatttccgcagctgaacgtgagaagaaggcgctcgaaaggggctccgccgcggcgaattgaaagaatcaaaagaatacttagaaaggccataccctgggttctgttgtctctcagcgtggtgatcgccgtttggtacaaacgccctgtcaaaacaataagttagcatatgccaacactaagtgccttctactatttttaagttggagaagataatctaggtgtagcaggaatgcatgcgcaggtcaagactgacggacaacagctatgcggaccccaggcgtgattgttcaacggcatgttggttatatcttcggctagtagatattccagccgtcagtcgtagtagtaataccttctcacatcaatcaatcttcagatagcagcttgtcc

SEQ ID NO: 11593 - DNA, 1059 bp, Muscodor strobelii
  misc_feature: SGI cDNA ID NO. 563729
  misc_feature: Encodes the peptide sequence at SEQ ID NO 11594
atggtatcgccctacgcaaatctgtttccgccaggaacagatttatgccaagtcccgagtggccgaccgccgactggacaggtcccaaactttgaagccgaaggactgagaccgttgatcatatctctcagtgtcattctcacgactattggtgttatttttggtctcgggaggctatttgtgaatctgcgaaagcttcaatggtctgacttgtttgtcacattcgcgatcctcctgaacgtcagctataccgtcttattgattgtttattcgcggtacttcagacattgtctgttcttcgcgaagacggctaccttgttgctactcagacaagtattttctgtgtcgcgtttggtcaacattgctatctggatcggcattgcctacgattttgtgatttacacgacaagtttgatcctggtcacgtactgggccacgcctcactcaggccagagttgggatacattcataaatggagcaggaagtactgcgcagtatgtcatttacgttgcgattggtcagggagcagccagcatccttctagatgcgtatatgttcattctaccgcttcccattatcgctcgcttgaacctttccgccaagcgaaagttgaagataggggcgatcttcctagttgcttttcttggcgtggtatcaagtatcatctcgtttgtttaccgtgtgttggaactcacagaatcggaatcattgtatctcggcagcgttgtacttttggctactcttattgagatggatatcgctctcatcgtctgctctgctccagcttttaccgccttcatgcgggtctatgttctccagtcgtcggcttttctatctatccgagcagcgctttcggggcacagcatgcacccaagcagcagggaagctattccgagccggagcgagtcacaggctgatccggccatggagcaacgcggagatataggaggactgagagggcaagatagattgagtgatacgtggctttttgatagtagaggcacatctgatgttgagacgcaaacgaggcggcccgagagccatgagcgggctacatag

SEQ ID NO: 11594 - protein, 352 aa, Muscodor strobelii
  misc_feature: SGI Peptide ID NO. 563729
  misc_feature (9)..(275): NCBI GI: 119481749 Blast Desc: NFIA_089630 [Neosartorya fischeri NRRL 181] gi|119409057|gb|EAW19006.1| conserved [Neosartorya fischeri NRRL 181]
  misc_feature (9)..(347): NCBI GI: 242764820 Blast Desc: TSTA_068860 [Talaromyces stipitatus ATCC 10500] gi|218724045|gb|EED23462.1| TSTA_068860 [Talaromyces stipitatus ATCC 10500]
  misc_feature (9)..(285): NCBI GI: 71002194 Blast Desc: AFUA_2G14450 [Aspergillus fumigatus Af293] gi|66853416|gb|EAL93740.1| AFUA_2G14450 [Aspergillus fumigatus Af293] gi|159129833|gb|EDP54947.1| AFUB_030070 [Aspergillus
  misc_feature (14)..(284): NCBI GI: 212538419 Blast Desc: PMAA_097870 [Penicillium marneffei ATCC 18224] gi|210069107|gb|EEA23198.1| PMAA_097870 [Penicillium marneffei ATCC 18224]
  misc_feature (13)..(352): NCBI GI: 242764997 Blast Desc: conserved [Talaromyces stipitatus ATCC 10500] gi|218724081|gb|EED23498.1| conserved [Talaromyces stipitatus ATCC 10500]
  misc_feature (98)..(274): NCBI GI: 238845707 Blast Desc: conserved [Microsporum canis CBS 113480]
  misc_feature (47)..(327): NCBI GI: 156056717 Blast Desc: [Sclerotinia sclerotiorum 1980] gi|154701875|gb|EDO01614.1| [Sclerotinia sclerotiorum 1980]
  misc_feature (14)..(266): NCBI GI: 169612652 Blast Desc: SNOG_09450 [Phaeosphaeria nodorum SN15] gi|111061595|gb|EAT82715.1| SNOG_09450 [Phaeosphaeria nodorum SN15]
  misc_feature (14)..(320): NCBI GI: 145252774 Blast Desc: An16g05920 [Aspergillus niger] gi|134083454|emb|CAK46932.1| protein product [Aspergillus niger]
  misc_feature (10)..(268): NCBI GI: 156041152 Blast Desc: [Sclerotinia sclerotiorum 1980] gi|154695938|gb|EDN95676.1| [Sclerotinia sclerotiorum 1980]
MVSPYANLFPPGTDLCQVPSGRPPTGQVPNFEAEGLRPLIISLSVILTTIGVIFGLGRLFVNLRKLQWSDLFVTFAILLNVSYTVLLIVYSRYFRHCLFFAKTATLLLLRQVFSVSRLVNIAIWIGIAYDFVIYTTSLILVTYWATPHSGQSWDTFINGAGSTAQYVIYVAIGQGAASILLDAYMFILPLPIIARLNLSAKRKLKIGAIFLVAFLGVVSSIISFVYRVLELTESESLYLGSVVLLATLIEMDIALIVCSAPAFTAFMRVYVLQSSAFLSIRAALSGHSMHPSSREAIPSRSESQADPAMEQRGDIGGLRGQDRLSDTWLFDSRGTSDVETQTRRPESHERAT

SEQ ID NO: 11595 - DNA, 1079 bp, Muscodor strobelii
  misc_feature: SGI EST ID NO. CUFF.27570.0
  misc_feature: Variant of the nucleotide sequence at SEQ ID NO 11593
tttgctggctcgacggccgttttgaacagatatcttacatttgggagagtatatcttctattagtctgttcttcgcgaagacggctaccttgttgctactcagacaagtattttctgtgtcgcgtttggtcaacattgctatctggatcggcattgcctacgattttgtgatttacacgacaagtttgatcctggtcacgtactgggccacgcctcactcaggccagagttgggatacattcataaatggagcaggaagtactgcgcagtatgtcatttacgttgcgattggtcagggagcagccagcatccttctagatgcgtatatgttcattctaccgcttcccattatcgctcgcttgaacctttccgccaagcgaaagttgaagataggggcgatcttcctagttgcttttcttggcgtggtatcaagtatcatctcgtttgtttaccgtgtgttggaactcacagaatcggaatcattgtatctcggcagcgttgtacttttggctactcttattgagatggatatcgctctcatcgtctgctctgctccagcttttaccgccttcatgcgggtctatgttctccagtcgtcggcttttctatctatccgagcagcgctttcggggcacagcatgcacccaagcagcagggaagctattccgagccggagcgagtcacaggctgatccggccatggagcaacgcggagatataggaggactgagagggcaagatagattgagtgatacgtggctttttgatagtagaggcacatctgatgttgagacgcaaacgaggcggcccgagagccatgagcgggctacatagagaggagaaaactattgtgtatcatagttgcacaattgcactattggtagaatgagttaacctatcaacaattcccttcttaactgcgaagcgtggtctctcttcgcagtaggttaacacacagcgttttggcaacgatattctcctgcgggtgagttgaatgagtagatatatacatcccctcgtctagttggccaattgacaattggcctttgtctctccagccatcgagcccttcaattcaag

SEQ ID NO: 11596 - DNA, 714 bp, Muscodor strobelii
  misc_feature: SGI cDNA ID NO. 563730
  misc_feature: Encodes the peptide sequence at SEQ ID NO 11597
atgggacttaactggaactccgacggcaacttctctcttggcgctggcccccgagtcggtacatccgtcgctcgcacgttcgcctcaaagggattcaaagtcgcacttgcagcacgctcagtgaaggaagctgatagcacagacagccagctcaacatcccgacagacctctctaaaactgacgaagtagttaacacttttactaaagtgaagaatacactgggaatacctagcgttgtcgtctacaatgccagcgctgtacatttctcgcccgcgaacgaccctttcgctgtctcattcgcggatttcaaaaatgacaccaacatcaacctccacagtgcgtatgttgctgcgcaacaggccgtcttaggtttcgcgcagctttcggattcagcggcacgcacgttcatttacaccggcaatgttttgaatacaacgatcttaccgaagtttatggacgcaggtattggcaagtctggcgccgctcatatgatgtgggcagcatcagctgcttacgcagaccgtggatacaaattctactatgccgatgagcgcaaggtagatggtgcacctaaatatgcaattgacggcgacgcacatgcggaactgttctggggcttggctcagggcaagacgcaaggtccgtggctgcagacattcgttcaaggggtcgggtataagaaatttgacaactcgtatacgtctgccgcatga

SEQ ID NO: 11597 - protein, 237 aa, Muscodor strobelii
  misc_feature: SGI Peptide ID NO. 563730
  misc_feature (13)..(237): NCBI GI: 256720872 Blast Desc: NECHADRAFT_50337 [Nectria haematococca mpVI 77-13-4]
  misc_feature (13)..(229): NCBI GI: 116214433 Blast Desc: CHGG_11057 [Chaetomium globosum CBS 148.51] gi|88175412|gb|EAQ82881.1| CHGG_11057 [Chaetomium globosum CBS 148.51]
  misc_feature (13)..(234): NCBI GI: 46126551 Blast Desc: FG07653.1 [Gibberella zeae PH-1]
  misc_feature (13)..(229): NCBI GI: 242797822 Blast Desc: short-chain dehydrogenase, [Talaromyces stipitatus ATCC 10500] gi|218716386|gb|EED15807.1| short-chain dehydrogenase, [Talaromyces stipitatus ATCC 10500]
  misc_feature (61)..(222): NCBI GI: 46102612 Blast Desc: FG00010.1 [Gibberella zeae PH-1]
  misc_feature (6)..(229): NCBI GI: 256723611 Blast Desc: NECHADRAFT_52180 [Nectria haematococca mpVI 77-13-4]
  misc_feature (13)..(229): NCBI GI: 46111007 Blast Desc: FG02385.1 [Gibberella zeae PH-1]
  misc_feature (13)..(229): NCBI GI: 212529432 Blast Desc: short-chain dehydrogenases/reductase, [Penicillium marneffei ATCC 18224] gi|210074271|gb|EEA28358.1| short-chain dehydrogenases/reductase, [Penicillium marneffei ATCC 18224]
  misc_feature (13)..(229): NCBI GI: 156059224 Blast Desc: SS1G_03624 [Sclerotinia sclerotiorum 1980] gi|154701411|gb|EDO01150.1| SS1G_03624 [Sclerotinia sclerotiorum 1980]
  misc_feature (13)..(229): NCBI GI: 212545000 Blast Desc: short chain type dehydrogenase, [Penicillium marneffei ATCC 18224] gi|210065623|gb|EEA19717.1| short chain type dehydrogenase, [Penicillium marneffei ATCC 18224]
MGLNWNSDGNFSLGAGPRVGTSVARTFASKGFKVALAARSVKEADSTDSQLNIPTDLSKTDEVVNTFTKVKNTLGIPSVVVYNASAVHFSPANDPFAVSFADFKNDTNINLHSAYVAAQQAVLGFAQLSDSAARTFIYTGNVLNTTILPKFMDAGIGKSGAAHMMWAASAAYADRGYKFYYADERKVDGAPKYAIDGDAHAELFWGLAQGKTQGPWLQTFVQGVGYKKFDNSYTSAA

SEQ ID NO: 11598 - DNA, 1497 bp, Muscodor strobelii
  misc_feature: SGI cDNA ID NO. 563731
  misc_feature: Encodes the peptide sequence at SEQ ID NO 11599
atgcccgactacacaagtatccagcttcacccatcgacgcactcgcccaagagcctcaaacaggacatctacgatgtgatctgtcttggatctggatgggccgctcgagtcatggccgctcgccttgttaaggccggtctcaatgtcttgatcatcgagcgagagctcatcgggggagactgcccgttctgggcctgcgtgcccagtaaggtcctgctgcgctcgcaagatgcgctagatggagcctcgtcggtaggcggcgcaaaagagagagtcaaaggcgatatcgccaaactcggtgtggacgcagtatttcaaaggcgcgacaaatttacatcacagtgggacgacactgctgtcctcgtaccgatggttgaaaatagtggcgcagaggtcgtacgcggtcacggcaagctcattggtcctaagtgtgtctccatccagtcgacggatggcacgtcggtcatcgtcaatgctcgacatgcggtggcgatatgcagtggcagcgaacctgtcatcccaaatacccccgggttgatggaggcgaaaccatggaccccgcgtcaggctacgagtacaagcatagctcccaaaagtcttgttatcatcggaactggtgcggttggcactgagatggctacagcatattcaagcttcggcactacagttacccttgtttccagagggtcggagatcctcggccgcatggaacctgaagctgggaggctcgttcgcgagtcactggtatccaagggagtagacgtgcggctgtctactatgctaactagtgttgagaggatctctaataatgttgttaaggtttacctgtccgacggcaccgttgtcgaagctgaagagattctcgtcgccgcgggtagacgccccatcacacaagacatggggctagagcagcttggcattgccgtgaacggcgctccgattgatgtcgacgaggccctgcgcgtaaagtctgttctggacgggtggctatatgccggtggagatgtggtgggtagacaaccgctgacgcatgggagcaaataccacggccggatcatgagcaacgcagtattagctcatattcaaggcgaacagccaggccaggctgcctggagcaatacgtctgctactgctgatatcgaggcgctcccacaggtagtattcactgagccaaatgtggcatcggttggccacaccaaggcgtcggcggccaaggcggggttggaggtaaaggctatcacagcaccgtttgctacgattgcgacgcgtatccggtcagataatgcaatgcagggatgggcgcaatggctcgtcgaagagggctcgaatcggcttgttggcgcgacgatggtaggtagcgacgccggagaccagctgcatgcttccactgtcgccatcgtaggccagatgacacttgaccgactggcccatgccatcccatgtttcccaacactgagcgaggtgtatctgaatcttatggaggcggccggcctatga

SEQ ID NO: 11599 - protein, 498 aa, Muscodor strobelii
  misc_feature: SGI Peptide ID NO. 563731
  misc_feature (199)..(292): Pfam Id: PF00070 Pfam Desc: Pyridine nucleotide-disulphide oxidoreductase
  misc_feature (25)..(340): Pfam Id: PF07992 Pfam Desc: Pyridine nucleotide-disulphide oxidoreductase
  misc_feature (383)..(493): Pfam Id: PF02852 Pfam Desc: Pyridine nucleotide-disulphide oxidoreductase, dimerisation domain
  misc_feature (15)..(495): NCBI GI: 57116784 Blast Desc: oxidoreductase [Mycobacterium tuberculosis H37Rv] gi|148660572|ref|YP_001282095.1| oxidoreductase [Mycobacterium tuberculosis H37Ra] gi|148822001|ref|YP_001286755.1| tuberculosis
  misc_feature (15)..(495): NCBI GI: 215429646 Blast Desc: oxidoreductase [Mycobacterium tuberculosis EAS054]
  misc_feature (24)..(495): NCBI GI: 118616260 Blast Desc: dihydrolipoamide dehydrogenase, LpdB [Mycobacterium ulcerans Agy99] gi|118568370|gb|ABL03121.1| dihydrolipoamide dehydrogenase, LpdB [Mycobacterium ulcerans Agy99]
  misc_feature (24)..(495): NCBI GI: 183984862 Blast Desc: dihydrolipoamide dehydrogenase, LpdB [Mycobacterium marinum M] gi|183178188|gb|ACC43298.1| dihydrolipoamide dehydrogenase, LpdB [Mycobacterium marinum M]
  misc_feature (24)..(497): NCBI GI: 284033755 Blast Desc: pyridine nucleotide-disulphide oxidoreductase dimerization region [Kribbella flavida DSM 17836] gi|283813048|gb|ADB34887.1| pyridine nucleotide-disulphide region
  misc_feature (24)..(497): NCBI GI: 170781848 Blast Desc: oxidoreductase [Clavibacter michiganensis subsp. sepedonicus] gi|169156416|emb|CAQ01564.1| oxidoreductase [Clavibacter michiganensis subsp. sepedonicus]
  misc_feature (24)..(497): NCBI GI: 148272312 Blast Desc: pyridine nucleotide-disulphide oxidoreductase [Clavibacter michiganensis subsp. michiganensis NCPPB 382] gi|147830242|emb|CAN01176.1| pyridine nucleotide-disulphide NCPPB
  misc_feature (24)..(498): NCBI GI: 269797013 Blast Desc: pyruvate/2-oxoglutarate dehydrogenase complex, dihydrolipoamide dehydrogenase component [Sanguibacter keddieii DSM 10542] gi|269099198|gb|ACZ23634.1| pyruvate/2-oxoglutarate
  misc_feature (25)..(495): NCBI GI: 229822040 Blast Desc: pyridine nucleotide-disulphide oxidoreductase dimerisation region [Beutenbergia cavernae DSM 12333] gi|229567953|gb|ACQ81804.1| pyridine nucleotide-disulphide region
  misc_feature (6)..(498): NCBI GI: 212541574 Blast Desc: dihydrolipoyl dehydrogenase, [Penicillium marneffei ATCC 18224] gi|210068241|gb|EEA22333.1| dihydrolipoyl dehydrogenase, [Penicillium marneffei ATCC 18224]
  misc_feature (25)..(496): SWISSPROT Homolog: EC 1.8.1.4 Dihydrolipoyl dehydrogenase
MPDYTSIQLHPSTHSPKSLKQDIYDVICLGSGWAARVMAARLVKAGLNVLIIERELIGGDCPFWACVPSKVLLRSQDALDGASSVGGAKERVKGDIAKLGVDAVFQRRDKFTSQWDDTAVLVPMVENSGAEVVRGHGKLIGPKCVSIQSTDGTSVIVNARHAVAICSGSEPVIPNTPGLMEAKPWTPRQATSTSIAPKSLVIIGTGAVGTEMATAYSSFGTTVTLVSRGSEILGRMEPEAGRLVRESLVSKGVDVRLSTMLTSVERISNNVVKVYLSDGTVVEAEEILVAAGRRPITQDMGLEQLGIAVNGAPIDVDEALRVKSVLDGWLYAGGDVVGRQPLTHGSKYHGRIMSNAVLAHIQGEQPGQAAWSNTSATADIEALPQVVFTEPNVASVGHTKASAAKAGLEVKAITAPFATIATRIRSDNAMQGWAQWLVEEGSNRLVGATMVGSDAGDQLHASTVAIVGQMTLDRLAHAIPCFPTLSEVYLNLMEAAGL

SEQ ID NO: 11600 - DNA, 1634 bp, Muscodor strobelii
  misc_feature: SGI EST ID NO. CUFF.27579.0
  misc_feature: Variant of the nucleotide sequence at SEQ ID NO 11598
ttcaaaggcgcgacaaatttacatcacagtgggacgacactgctgtcctcgtaccgatggttgaaaatagtggcgcagaggtcgtacgcggtcacggcaagctcattggtcctaagtgtgtctccatccagtcgacggatggcacgtcggtcatcgtcaatgctcgacatgcggtggcgatatgcagtggcagcgaacctgtcatcccaaatacccccgggttgatggaggcgaaaccatggaccccgcgtcaggctacgagtacaagcatagctcccaaaagtcttgttatcatcggaactggtgcggttggcactgagatggctacagcatattcaagcttcggcactacagttacccttgtttccagagggtcggagatcctcggccgcatggaacctgaagctgggaggctcgttcgcgagtcactggtatccaagggagtagacgtgcggctgtctactatgctaactagtgttgagaggatctctaataatgttgttaaggtttacctgtccgacggcaccgttgtcgaagctgaagagattctcgtcgccgcgggtagacgccccatcacacaagacatggggctagagcagcttggcattgccgtgaacggcgctccgattgatgtcgacgaggccctgcgcgtaaagtctgttctggacgggtggctatatgccggtggagatgtggtgggtagacaaccgctgacgcatgggagcaaataccacggccggatcatgagcaacgcagtattagctcatattcaaggcgaacagccaggccaggctgcctggagcaatacgtctgctactgctgatatcgaggcgctcccacaggtagtattcactgagccaaatgtggcatcggttggccacaccaaggcgtcggcggccaaggcggggttggaggtaaaggctatcacagcaccgtttgctacgattgcgacgcgtatccggtcagataatgcaatgcagggatgggcgcaatggctcgtcgaagagggctcgaatcggcttgttggcgcgacgatggtaggtagcgacgccggagaccagctgcatgcttccactgtcgccatcgtaggccagatgacacttgaccgactggcccatgccatcccatgtttcccaacactgagcgaggtgtatctgaatcttatggaggcggccggcctatgattgataaaaaggaagctaaagggaattggcaatctgtattccatcgcatatatgtgacataaagatactgcgtcacgtcgtaacaattaagtcatcatcagcctcctgtttctcaatcaacttgttcattctagcgctatgtcatttgaaaagcgtgatccatcatcatcatcaccatcatcatcaccatcatcatcaccatcatcatcaccatcatcatcaccatcatcatcaccatcatcatcatcgccgtggagctgaaatgatgagtttgataggtagataaggcgtggggggcgatggcgaaaatgaagagcttgacgcttaagggtttggaatcaactaacctagagtggtgatcacgagtttagctcgtcctctgctctgccttgtttgttagccactacctagaagtctaggtggaagagcatggaccaggcttggtcgtgg

SEQ ID NO: 11601 - DNA, 1017 bp, Muscodor strobelii
  misc_feature: SGI cDNA ID NO. 563732
  misc_feature: Reduced expression when VOC is produced
  misc_feature: Encodes the peptide sequence at SEQ ID NO 11602
atgtcgctcagccagctgatgcgcgagggcccgcccgacgggcaggtcgacaacgcgctcgccaagttgcgcgagaaggtgctggtcgagggtgtcaagagcgacagcgacggcatgtcctccaaccgcatctacatctggctcatcttcctcgacgccccgctgttgcccaccgacacatacctcaagttcgtccaccgcggcgcctccccggcctactccaagatccgcaacgacaccttccgaaccctgaccaccgaccccctcttccgccgccgtgtcagcgaggccagtctgatccgcctgctcaatgccatcgcctggagtctgcacgacaccaacgaggagcgcagacctgccagcagccgccagtctctcccggccatgagcggcgccagtcccgcccgcagcgacatcatcgcctcgtctcccgcacgcagtcgtgctcgcgccctgaccctcactacagagggctccgacgccggtgcctccgagcccggcacgtacgtacagggcatgaacgtgctggctgctccattcttgtacgccgcgcgaagtgaagccgaagccttccaagcatttcatcagctggtgaccaaggagtgccccggctatattcgaggcgctatggacggcgtacaccgcggtctggcgcttgtcgacaaggtcctgggcatcgtcgacgccaaattgagtctctatctaacatccaagggtctgtcggccgagatatatgcttttccgtctgtcctcacgctctgcgcgtgcacgcctccgcttcccgaggtcttaaacctctgggactttctcttcgcctacgggccgcatctgaatattctctgcattgttgcccaacttattctcatgcgcgatgagctgcttggctctgcaagccctaataagatactgcgctccttcccagcgctccaagcagacaagattaagagccaggctctgaacatcattcagcgaatcccggctgaggtctacgaagacatcattaagcatgctctttga

SEQ ID NO: 11602 - protein, 338 aa, Muscodor strobelii
  misc_feature: SGI Peptide ID NO. 563732
  misc_feature (34)..(296): Pfam Id: PF00566 Pfam Desc: TBC domain
  misc_feature (169)..(296): Pfam Id: PF00566 Pfam Desc: TBC domain
  misc_feature (34)..(108): Pfam Id: PF00566 Pfam Desc: TBC domain
  misc_feature (1)..(338): NCBI GI: 46108366 Blast Desc: FG01065.1 [Gibberella zeae PH-1]
  misc_feature (1)..(338): NCBI GI: 256734430 Blast Desc: [Nectria haematococca mpVI 77-13-4]
  misc_feature (3)..(337): NCBI GI: 85117829 Blast Desc: NCU03237 [Neurospora crassa OR74A] gi|28927144|gb|EAA36101.1| NCU03237 [Neurospora crassa OR74A]
  misc_feature (1)..(337): NCBI GI: 154319408 Blast Desc: BC1G_02185 [Botryotinia fuckeliana B05.10] gi|150855843|gb|EDN31035.1| BC1G_02185 [Botryotinia fuckeliana B05.10]
  misc_feature (1)..(337): NCBI GI: 39945388 Blast Desc: MGG_04676 [Magnaporthe grisea 70-15] gi|145011301|gb|EDJ95957.1| MGG_04676 [Magnaporthe grisea 70-15]
  misc_feature (1)..(337): NCBI GI: 156030889 Blast Desc: SS1G_14225 [Sclerotinia sclerotiorum 1980] gi|154700616|gb|EDO00355.1| SS1G_14225 [Sclerotinia sclerotiorum 1980]
  misc_feature (1)..(337): NCBI GI: 116182502 Blast Desc: CHGG_01879 [Chaetomium globosum CBS 148.51] gi|88186176|gb|EAQ93644.1| CHGG_01879 [Chaetomium globosum CBS 148.51]
  misc_feature (1)..(337): NCBI GI: 171695134 Blast Desc: protein product [Podospora anserina] gi|170947809|emb|CAP59972.1| protein product [Podospora anserina]
  misc_feature (2)..(337): NCBI GI: 242804306 Blast Desc: mitotic check point protein (Bub2), [Talaromyces stipitatus ATCC 10500] gi|218717693|gb|EED17114.1| mitotic check point protein (Bub2), [Talaromyces stipitatus ATCC 10500]
  misc_feature (3)..(337): NCBI GI: 119497187 Blast Desc: mitotic check point protein (Bub2), [Neosartorya fischeri NRRL 181] gi|119413519|gb|EAW23460.1| mitotic check point protein (Bub2), [Neosartorya fischeri NRRL 181]
  misc_feature: Useful for introducing or modulating the production of volatile compounds
MSLSQLMREGPPDGQVDNALAKLREKVLVEGVKSDSDGMSSNRIYIWLIFLDAPLLPTDTYLKFVHRGASPAYSKIRNDTFRTLTTDPLFRRRVSEASLIRLLNAIAWSLHDTNEERRPASSRQSLPAMSGASPARSDIIASSPARSRARALTLTTEGSDAGASEPGTYVQGMNVLAAPFLYAARSEAEAFQAFHQLVTKECPGYIRGAMDGVHRGLALVDKVLGIVDAKLSLYLTSKGLSAEIYAFPSVLTLCACTPPLPEVLNLWDFLFAYGPHLNILCIVAQLILMRDELLGSASPNKILRSFPALQADKIKSQALNIIQRIPAEVYEDIIKHAL

SEQ ID NO: 11603 - DNA, 2460 bp, Muscodor strobelii
  misc_feature: SGI EST ID NO. CUFF.27582.0
  misc_feature: Variant of the nucleotide sequence at SEQ ID NO 11601
ggcgcgcggccctcagcagaacgccctcagccgtcgacggcatgtcgctcagccagctgatgcgcgagggcccgcccgacgggcaggtcgacaacgcgctcgccaagttgcgcgagaaggtgctggtcgagggtgtcaagagcgacagcgacggcatgtcctccaaccgcatctacatctggctcatcttcctcgacgccccgctgttgcccaccgacacatacctcaagttcgtccaccgcggcgcctccccggcctactccaagatccgcaacgacaccttccgaaccctgaccaccgaccccctcttccgccgccgtgtcagcgaggccagtctgatccgcctgctcaatgccatcgcctggagtctgcacgacaccaacgaggagcgcagacctgccagcagccgccagtctctcccggccatgagcggcgccagtcccgcccgcagcgacatcatcgcctcgtctcccgcacgcagtcgtgctcgcgccctgaccctcactacagagggctccgacgccggtgcctccgagcccggcacgtacgtacagggcatgaacgtgctggctgctccattcttgtacgccgcgcgaagtgaagccgaagccttccaagcatttcatcagctggtgaccaaggagtgccccggctatattcgaggcgctatggacggcgtacaccgcggtctggcgcttgtcgacaaggtcctgggcatcgtcgacgccaaattgagtctctatctaacatccaagggtctgtcggccgagatatatgcttttccgtctgtcctcacgctctgcgcgtgcacgcctccgcttcccgaggtcttaaacctctgggactttctcttcgcctacgggccgcatctgaatattctctgcattgttgcccaacttattctcatgcgcgatgagctgcttggctctgcaagccctaataagatactgcgctccttcccagcgctccaagcagacaagattaagagccaggctctgaacatcattcagcgaatcccggctgaggtctacgaagacatcattaagcatgctctttgacggtagggtctttattcgccttttcatctcggcatcgatgagctacaatgtactataatatacgaggagatgacatcacggggcctaaaagcaaaggagcacgatctgtatgagtatcttgcatgaaaatccggaaaaggcaatgggatcaaaaggcatttaggtaatgaataatgatgaatgagaatgatgattacttcgcagaaggaatcttctatacaagtcgctgcacgcctggcttaacggttgcgtggtgttcctgtccaggtttgttgatgatgcctggcggaaacgaccgatcaatgctggtttcgataaacctcctcagggtatcgacgaacattggcccacaacaagcgtcgacaatactccttcgattgaccctcacaaacgcgtggttgtcgaaatgcgtccgccatttctccttggccgcgcaaattttaggccgccgtagcgtcctatatcgctcgtaaaaggggttgttgcaagcgccacggccgactaaaacagtcgtgttgatgaagccgaagggccgcatgaacatccactccaccgagtcgacggtcggtgacagaataagaaatatctgcatagcagaggcttggtcgtagcagttgacaagccgtccactgccgatatcttccaaatacgacttgaggaggaaggtgtttctaggctcattttctgatggccactgatagtatcgcggcgccccaaggtgtacgtcgtaccggaagccctggaaggcgatggtgctacagtattcttcccatgtcgagccgagcggccaggctcggcgcggcaggaccacccgccggagcaacttgacaggaaccccggtaaacccaaagaaagttggctgtacgcctatggcgtagaactctagccgacttgagttcaggcactcagatcgtccattatctctatgtgacactttccacacgatgttatctgctataccccaaggaatgtcgtcccggctccagctaggcgccactttcatctccattgtatactgtccagtctttgtgaaggtggtagcaggctgtacggaccgaatgattttctcggccacatcgttgctgccatatatagatattggatggtttaacagacgatcgtccaatattttgatggtgattgtgattcgtctatgctgaggcaactcgatgttaactgcaaccggatataatgagccgcatatttgtggcgaatcagttcggttgtcttcaaagacgtgctgcgttgcttggtcccatagattataggggccagtatgccgggcgctgggaacttgtcccttagaattcgttacaggtgtgccaataaactcccttgcgacatcaattgatgtaatttgtgatgaaatggccattctgcagtttaaatgatcatgttcaaa

SEQ ID NO: 11604 - DNA, 1161 bp, Muscodor strobelii
  misc_feature: SGI cDNA ID NO. 563733
  misc_feature: Encodes the peptide sequence at SEQ ID NO 11605
atggccatttcatcacaaattacatcaattgatgtcgcaagggagtttattggcacacctgtaacgaattctaagggacaagttcccagcgcccggcatactggcccctataatctatgggaccaagcaacgcagcacgtctttgaagacaaccgaactgattcgccacaaatatgcggctcattatatccggttgcagttaacatcgagttgcctcagcatagacgaatcacaatcaccatcaaaatattggacgatcgtctgttaaaccatccaatatctatatatggcagcaacgatgtggccgagaaaatcattcggtccgtacagcctgctaccaccttcacaaagactggacagtatacaatggagatgaaagtggcgcctagctggagccgggacgacattccttggggtatagcagataacatcgtgtggaaagtgtcacatagagataatggacgatctgagtgcctgaactcaagtcggctagagttctacgccataggcgtacagccaactttctttgggtttaccggggttcctgtcaagttgctccggcgggtggtcctgccgcgccgagcctggccgctcggctcgacatgggaagaatactgtagcaccatcgccttccagggcttccggtacgacgtacaccttggggcgccgcgatactatcagtggccatcagaaaatgagcctagaaacaccttcctcctcaagtcgtatttggaagatatcggcagtggacggcttgtcaactgctacgaccaagcctctgctatgcagatatttcttattctgtcaccgaccgtcgactcggtggagtggatgttcatgcggcccttcggcttcatcaacacgactgttttagtcggccgtggcgcttgcaacaaccccttttacgagcgatataggacgctacggcggcctaaaatttgcgcggccaaggagaaatggcggacgcatttcgacaaccacgcgtttgtgagggtcaatcgaaggagtattgtcgacgcttgttgtgggccaatgttcgtcgataccctgaggaggtttatcgaaaccagcattgatcggtcgtttccgccaggcatcatcaacaaacctggacaggaacaccacgcaaccgttaagccaggcgtgcagcgacttgtatag

SEQ ID NO: 11605 - protein, 386 aa, Muscodor strobelii
  misc_feature: SGI Peptide ID NO. 563733
  misc_feature (253)..(361): NCBI GI: 46127187 Blast Desc: FG07971.1 [Gibberella zeae PH-1]
MAISSQITSIDVAREFIGTPVTNSKGQVPSARHTGPYNLWDQATQHVFEDNRTDSPQICGSLYPVAVNIELPQHRRITITIKILDDRLLNHPISIYGSNDVAEKIIRSVQPATTFTKTGQYTMEMKVAPSWSRDDIPWGIADNIVWKVSHRDNGRSECLNSSRLEFYAIGVQPTFFGFTGVPVKLLRRVVLPRRAWPLGSTWEEYCSTIAFQGFRYDVHLGAPRYYQWPSENEPRNTFLLKSYLEDIGSGRLVNCYDQASAMQIFLILSPTVDSVEWMFMRPFGFINTTVLVGRGACNNPFYERYRTLRRPKICAAKEKWRTHFDNHAFVRVNRRSIVDACCGPMFVDTLRRFIETSIDRSFPPGIINKPGQEHHATVKPGVQRLV

SEQ ID NO: 11606 - DNA, 1212 bp, Muscodor strobelii
  misc_feature: SGI cDNA ID NO. 563734
  misc_feature: Encodes the peptide sequence at SEQ ID NO 11607
atggcagaaacagccgttgtgataggagcgtttgatgctctgcagcttcgtaatcaggagagcatcataggacgtacgctccagacgcgtactagtgatttagcaactcaagtccaaacgttagcagcacagattcccaggaagcagaagcaacaggatgaattgaaccaaaaggcatcgcaatcagtccaacggatagacaaactagcggagctcatcttgaggaaccagctcgatgatcctagcctcggagatgatctcgaacccgctaaaacgatcatggaaaagatcaaccagcaaatgggcgtagaagcgaaacggaaacggctcgaatttttgaaaaagtggctgcatagaaagagcctgcgcgagatggtgttcctgttagatcaagcgagagaactactcgagaggcgcactgagatacgacaactcgttgctctaaatcttttgcaagaaaaagccatggtggcgcctccacaatactattccaacgcaaacctggccagcttatggcagcagcattttgaacaatggaaaccgcaggaaccgagtgtggatgtcttgaaactgagtacgagacttgacctgtgcgtgagcaacgagtttagtgacgaactccgagtttctctgacactcacgacggatttccaagcggcatgcaacgagctgacgagtttcgtctcttgctgttctcgaaatatcctcgacgattttcctaacacccggactgattccggagaaatcgagatggagcagaattcagacttacttcaaccgcttcttctatgggtctaccataatatctttacacgtatagagctacggacgataaacgaaagggaatcaggcatggagacactgaaaaataccatgcgtcgaatgcgtcaggtagtgaaagaaggtctaatcgaaagcaaagaagggcgaaccacaccgattatttctataggcaaccacccatctgaagttaggataggtgagacatttgaaatcgagttggaggttgacgacaaacaatgttttcatacggtcgactcaaagaataatcagaatttcatatatgccgactctgagaaaactgaaaaggggcgaaagttcatcttccaggctaccgagattggcgaggccaaaattgacttcaactttgctgactataacacgctgaaccctagcagtgtcagtgttgatgttgttgttaaagcagcgtaa

SEQ ID NO: 11607 - protein, 403 aa, Muscodor strobelii
  misc_feature: SGI Peptide ID NO. 563734
MAETAVVIGAFDALQLRNQESIIGRTLQTRTSDLATQVQTLAAQIPRKQKQQDELNQKASQSVQRIDKLAELILRNQLDDPSLGDDLEPAKTIMEKINQQMGVEAKRKRLEFLKKWLHRKSLREMVFLLDQARELLERRTEIRQLVALNLLQEKAMVAPPQYYSNANLASLWQQHFEQWKPQEPSVDVLKLSTRLDLCVSNEFSDELRVSLTLTTDFQAACNELTSFVSCCSRNILDDFPNTRTDSGEIEMEQNSDLLQPLLLWVYHNIFTRIELRTINERESGMETLKNTMRRMRQVVKEGLIESKEGRTTPIISIGNHPSEVRIGETFEIELEVDDKQCFHTVDSKNNQNFIYADSEKTEKGRKFIFQATEIGEAKIDFNFADYNTLNPSSVSVDVVVKAA

SEQ ID NO: 11608 - DNA, 1178 bp, Muscodor strobelii
  misc_feature: SGI EST ID NO. CUFF.27595.0
  misc_feature: Variant of the nucleotide sequence at SEQ ID NO 11606
ctcgatgatcctagcctcggagatgatctcgaacccgctaaaacgatcatggaaaagatcaaccagcaaatgggcgtagaagcgaaacggaaacggctcgaatttttgaaaaagtggctgcatagaaagagcctgcgcgagatggtgttcctgttagatcaagcgagagaactactcgagaggcgcactgagatacgacaactcgttgctctaaatcttttgcaagaaaaagccatggtggcgcctccacaatactattccaacgcaaacctggccagcttatggcagcagcattttgaacaatggaaaccgcaggaaccgagtgtggatgtcttgaaactgagtacgagacttgacctgtgcgtgagcaacgagtttagtgacgaactccgagtttctctgacactcacgacggatttccaagcggcatgcaacgagctgacgagtttcgtctcttgctgttctcgaaatatcctcgacgattttcctaacacccggactgattccggagaaatcgagatggagcagaattcagacttacttcaaccgcttcttctatgggtctaccataatatctttacacgtatagagctacggacgataaacgaaagggaatcaggcatggagacactgaaaaataccatgcgtcgaatgcgtcaggtagtgaaagaaggtctaatcgaaagcaaagaagggcgaaccacaccgattatttctataggcaaccacccatctgaagttaggataggtgagacatttgaaatcgagttggaggttgacgacaaacaatgttttcatacggtcgactcaaagaataataatttcatatatgccgactctgagaaaactgaaaaggggcgaaagttcatcttccaggctaccgagattggcgaggccaaaattgacttcaactttgctgactataacacgctgaaccctagcagtgtcagtgttgatgttgttgttaaagcagcgtaaagcgcggcaagctaccgagagaggacagcagtgttctcgacatttagtgaagatgtccctgttattacgttacctagtaagtattaggagttgaaatgggtatacaggggcataatagtatgataggtagatcaagtgtctcgaagaatttaagaatactccgtgcccagtctgtttaggattggaagataagtcacacc

SEQ ID NO: 11609 - DNA, 711 bp, Muscodor strobelii
  misc_feature: SGI cDNA ID NO. 563735
  misc_feature: Encodes the peptide sequence at SEQ ID NO 11610
atgttcaccactactttttgtgttctctcccttttcgcatactgtgcacagacaacagacgacttaccagtcttgtctgctcgactctctcagcggcaagccacattgagctgtgcacaaacatacggcaatggctccctcccctgcggcgcagctgacagcggcttgtgtttcaacccaagccttggacagacgtgctgtccgttagagaatggcttctgcggcaagggcacatattgcgcgccggttccgggatattgctgcgctgagagcgaggatttagaagcgtgcgcgagaaatagggggttcgcacttccgaatgcggcgactaccttgagcgggatcgatcttctgacgagtggattaccgggtggaacaagtcgaacctttactgtgacaccgttcctcccggtcgcgtcagagcccgtattggtaggcgccgttgacgttgtcacgagcagttgtaacgaaagcccggacgaaacagcggtaccagcagctgctcaagttgctactgacataccagcagaagtgccggcgcctgtggtgacagcaccagtcgtcgaaacccagtcgtcaagtgccgaagtctcggcggctacagactttccacaagtcgttcaggttgccttcgccccccgagaccaacatcaagtatcgtcaagttgtttcattgttattatggcagttgctgtattgatagcggtgtaa

SEQ ID NO: 11610 - protein, 236 aa, Muscodor strobelii
  misc_feature: SGI Peptide ID NO. 563735
  misc_feature (7)..(111): NCBI GI: 171695136 Blast Desc: protein product [Podospora anserina] gi|170947810|emb|CAP59973.1| protein product [Podospora anserina]
MFTTTFCVLSLFAYCAQTTDDLPVLSARLSQRQATLSCAQTYGNGSLPCGAADSGLCFNPSLGQTCCPLENGFCGKGTYCAPVPGYCCAESEDLEACARNRGFALPNAATTLSGIDLLTSGLPGGTSRTFTVTPFLPVASEPVLVGAVDVVTSSCNESPDETAVPAAAQVATDIPAEVPAPVVTAPVVETQSSSAEVSAATDFPQVVQVAFAPRDQHQVSSSCFIVIMAVAVLIAV

SEQ ID NO: 11611 - DNA, 1530 bp, Muscodor strobelii
  misc_feature: SGI cDNA ID NO. 563736
  misc_feature: Encodes the peptide sequence at SEQ ID NO 11612
atgtcttgcacttcgtcttataccctgggctcctctcacgatgaccctgttgccgcgagctcgagttctggcgccgctgtccatgaccgaggcccacggcaacgaagacgacattcctcattcgtcccataccgccggaaatcgattgtcaaccagatcatggacggggaggaggctttattactgagggttgatctgtttctgtcggagcttgagcgccgattagaatcgctggagagctatggcgacctcatgcagctcgacggcagcatagccaagacattttcgactctccaggcagtccgggaaagatgctcacacgtctcggaagaagtcattggagccggccgccgccgactgcaggtcatggtcgaaaccttggacgcaagatatcatgaggctctggcagctgctgagtcaatgaacgagaaagcgcgggtgggcattgaactactggactccatgttggacgacttcgagactcgagctctcaagatgcgtgacgcaggcttcgcgaatgccgccgaagccgccgaaagtatcatgggcgaaggcaggcgcgttatggacgaaagtctggagcgtgcccgcggcgtcatggatgggagtatcgaacgagcaaggcgggccgcggggacggtcgaagagcatgtgcaatatgccatcacgcgggcccgcgaacagggcctacttagatacgatgagttacccataccatggaggatcaatccccacatcatcaaaggctaccggttttccgactccaaaatcgagtgcgttcgttccgttttcggtgtctcgaacgagacagtgaacatttggtctcatgcgctcggcctcattgtcgttttatctgttgccttctacttttacccgacatcggcagatttctctttgtataccaagaccgacgtcttcatcgccgcagtcttctttttcgcggcctgcaagtgcctcgtctgcagtacgatctggcatacaatgaactgcgtcgcagatcagacattgatggagcgattcgcgtgcattgattatactgggatctcgttgcttattgcagcgacgattatgacgaccgagtatacagtgttctattgcgaaccggtctctcggtggatttacatgactgccaccgccgtcctcggcatcgcaggtactattttgccgtggcatcctacattcaacggtcaggagatggcctggttacgagtaggctttttcatcggcttgggcacgacaggcttcatgcccatcttccagatcattctaactcgtggcccgtcatgggcatatgaattttacaccgactctaacttagtgaagtcgctcctggtctacgtgttaggagcttgtgtttacgcgagcaaagtccccgagagatggttccccggagcattcgatttctttggcaatgcgcacaatttgtggcatatggctgtattagggggaatcatttaccactacgtcgccatgctccaattcttctccggcgcctttgaacgggcacaacatggctgccctacttattga

SEQ ID NO: 11612 - protein, 509 aa, Muscodor strobelii
  misc_feature: SGI Peptide ID NO. 563736
  misc_feature (264)..(488): Pfam Id: PF03006 Pfam Desc: Haemolysin-III related
  misc_feature (1)..(509): NCBI GI: 156058149 Blast Desc: SS1G_04806 [Sclerotinia sclerotiorum 1980] gi|154702591|gb|EDO02330.1| SS1G_04806 [Sclerotinia sclerotiorum 1980]
  misc_feature (14)..(509): NCBI GI: 261357475 Blast Desc: hemolysin-III family protein [Verticillium albo-atrum VaMs.102]
  misc_feature (1)..(509): NCBI GI: 154299083 Blast Desc: BC1G_11854 [Botryotinia fuckeliana B05.10] gi|150857557|gb|EDN32749.1| BC1G_11854 [Botryotinia fuckeliana B05.10]
  misc_feature (1)..(509): NCBI GI: 85117833 Blast Desc: NCU03238 [Neurospora crassa OR74A] gi|28927145|gb|EAA36102.1| NCU03238 [Neurospora crassa OR74A]
  misc_feature (5)..(509): NCBI GI: 39945394 Blast Desc: MGG_04679 [Magnaporthe grisea 70-15] gi|145011296|gb|EDJ95952.1| MGG_04679 [Magnaporthe grisea 70-15]
  misc_feature (14)..(509): NCBI GI: 256735148 Blast Desc: [Nectria haematococca mpVI 77-13-4]
  misc_feature (1)..(509): NCBI GI: 169117900 Blast Desc: SSGPRC1 [Sporothrix schenckii]
  misc_feature (2)..(509): NCBI GI: 46108364 Blast Desc: FG01064.1 [Gibberella zeae PH-1]
  misc_feature (1)..(509): NCBI GI: 116182504 Blast Desc: CHGG_01880 [Chaetomium globosum CBS 148.51] gi|88186177|gb|EAQ93645.1| CHGG_01880 [Chaetomium globosum CBS 148.51]
  misc_feature (1)..(509): NCBI GI: 171695138 Blast Desc: protein product [Podospora anserina] gi|170947811|emb|CAP59974.1| protein product [Podospora anserina]
MSCTSSYTLGSSHDDPVAASSSSGAAVHDRGPRQRRRHSSFVPYRRKSIVNQIMDGEEALLLRVDLFLSELERRLESLESYGDLMQLDGSIAKTFSTLQAVRERCSHVSEEVIGAGRRRLQVMVETLDARYHEALAAAESMNEKARVGIELLDSMLDDFETRALKMRDAGFANAAEAAESIMGEGRRVMDESLERARGVMDGSIERARRAAGTVEEHVQYAITRAREQGLLRYDELPIPWRINPHIIKGYRFSDSKIECVRSVFGVSNETVNIWSHALGLIVVLSVAFYFYPTSADFSLYTKTDVFIAAVFFFAACKCLVCSTIWHTMNCVADQTLMERFACIDYTGISLLIAATIMTTEYTVFYCEPVSRWIYMTATAVLGIAGTILPWHPTFNGQEMAWLRVGFFIGLGTTGFMPIFQIILTRGPSWAYEFYTDSNLVKSLLVYVLGACVYASKVPERWFPGAFDFFGNAHNLWHMAVLGGIIYHYVAMLQFFSGAFERAQHGCPTY

SEQ ID NO: 11613 - DNA, 3682 bp, Muscodor strobelii
  misc_feature: SGI EST ID NO. CUFF.27717.1
  misc_feature: Variant of the nucleotide sequence at SEQ ID NO 11611
aaaggaagccgaggggcggcaacccggaatgagggctgaagggtcctgccaatcacccggaatctcaaatctttcgagatgggcaatctaacaggtcccttgtccaagcctcgtcactcgaacaacttaaggttctggcgtacgtcaggtgcttctataccaagtactaaggtatgaaaagatatggtctctcttggatggcaacattggagacggcaatggaacccgctcatctgttgaggtgtaattgaagtctcactagtcctaaacccgatttgatttgctggcattaatcaggtgcatcgaacccattagatgccgtcaagatccgacactattaggtgcatgcgtttgaatcttcagctcactctggaactctacctccacgagtattgtccgggagtccagacttgccgcggtgccacttctcgactctgaggagtcagggcttatctctcaacatcaccatgacgatgctaccaatcagtatcagtcgactgagcacaagcatggacaagtcgcgcctgtttgggttaatcatcgctgttcatacgccccattgtaagttaagttttacatgatacttggagatctgcgtttgtctctctactgctgagtcgagccccaccgtgaggatcctcccaccgcgagccaatctccgccgattccaccagcacatgcggattccttatatcctcattcctcttctgttgcctctacttcaacgtcgtgtagcttctttttgaatagtctgaagtatatctgcatacccaataagcgggggcacggatactcggagtgtcaacctctacttgctccacgtctccttaccacccgagtctcgtatgcgattcaattaccctctgtgctgtgtacctgctcagccattggtggccgacccctttcctaaccactgacacctgagctatgaacgttccgaatatgtcttgcacttcgtcttataccctgggctcctctcacgatgaccctgttgccgcgagctcgagttctggcgccgctgtccatgaccgaggcccacggcaacgaagacgacattcctcattcgtcccataccgccggaaatcgattgtcaaccagatcatggacggggaggaggctttattactgagggttgatctgtttctgtcggagcttgagcgccgattagaatcgctggagagctatggcgacctcatgcagctcgacggcagcatagccaagacattttcgactctccaggcagtccgggaaagatgctcacacgtctcggaagaagtcattggagccggccgccgccgactgcaggtcatggtcgaaaccttggacgcaagatatcatgaggctctggcagctgctgagtcaatgaacgagaaagcgcgggtgggcattgaactactggactccatgttggacgacttcgagactcgagctctcaagatgcgtgacgcaggcttcgcgaatgccgccgaagccgccgaaagtatcatgggcgaaggcaggcgcgttatggacgaaagtctggagcgtgcccgcggcgtcatggatgggagtatcgaacgagcaaggcgggccgcggggacggtcgaagagcatgtgcaatatgccatcacgcgggcccgcgaacagggcctacttagatacgatgagttacccataccatggaggatcaatccccacatcatcaaaggctaccggttttccgactccaaaatcgagtgcgttcgttccgttttcggtgtctcgaacgagacagtgaacatttggtctcatgcgctcggcctcattgtcgttttatctgttgccttctacttttacccgacatcggcagatttctctttgtataccaagaccgacgtcttcatcgccgcagtcttctttttcgcggcctgcaagtgcctcgtctgcagtacgatctggcatacaatgaactgcgtcgcagatcagacattgatggagcgattcgcgtgcattgattatactgggatctcgttgcttattgcagcgacgattatgacgaccgagtatacagtgttctattgcgaaccggtctctcggtggatttacatgactgccaccgccgtcctcggcatcgcaggtactattttgccgtggcatcctacattcaacggtcaggagatggcctggttacgagtaggctttttcatcggcttgggcacgacaggcttcatgcccatcttccagatcattctaactcgtggcccgtcatgggcatatgaattttacaccgactctaacttagtgaagtcgctcctggtctacgtgttaggagcttgtgtttacgcgagcaaagtccccgagagatggttccccggagcattcgatttctttggcaatgcgcacaatttgtggcatatggctgtattagggggaatcatttaccactacgtcgccatgctccaattcttctccggcgcctttgaacgggcacaacatggctgccctacttattgaacatcatacttgttcctactaaagtataaaaaattatggtccctcgatcgaagaatcagcccagcctacaatgtcgcgtcataatcgacgggtccaggaccatgttgtctgagtaaaatcaaaaccttacaccgctatcaatacagcaactgccataataacaatgaaacaacttgacgatacttgatgttggtctcggggggcgaaggcaacctgaacgacttgtggaaagtctgtagccgccgagacttcggcacttgacgactgggtttcgacgactggtgctgtcaccacaggcgccggcacttctgctggtatgtcagtagcaacttgagcagctgctggtaccgctgtttcgtccgggctttcgttacaactgctcgtgacaacgtcaacggcgcctaccaatacgggctctgacgcgaccgggaggaacggtgtcacagtaaaggttcgacttgttccacccggtaatccactcgtcagaagatcgatcccgctcaaggtagtcgccgcattcggaagtgcgaaccccctatttctcgcgcacgcttctaaatcctcgctctattagggcaggttagtcagtggcaaaatgtgtgcgtttaaataccaacctcagcgcagcaatatcccggaaccggcgcgcaatatgtgcccttgccgcagaagccattctctaacggacagcacgtctgttttaatatcagcatatgaagcgtaattctgaaagaccgagctactcacctgtccaaggcttgggttgaaacacaagccgctgtcagctgcgccgcaggggagggagccattgccgtatgtttgtgcacagctcaatgtggcttgccgctgagagagtcgagcagacaagactggtaagtcgtctgttgtctgtgcacagtatgcgaaaagggagagaacacaaaaagtagtggtgaacatgattttgatggctttgagaaatgtcgagaggcgtcctagcgatatctgatgtagagcgagcaatacgcggctcgatgtatctgtacctctggggcggaattatcaaggagcagaacgatacttaatacggcgagatgaaagtgtaaaagactagatattagagatagatgcaagacgccatagattttggacatagatgagctacctaatcgtacttataataatactcattctgatttcttttttatctatgaagcgacgtttctcttcg

SEQ ID NO: 11614 - DNA, 636 bp, Muscodor strobelii
  misc_feature: SGI cDNA ID NO. 563737
  misc_feature: Encodes the peptide sequence at SEQ ID NO 11615
atggccgtcaacgagatcgtaacggacccagagctcgccaacgtgctcgccgcctcgagggacacgcgggtccaggctctgaacctcgtccagcagatcgccgcttcaggccctgccgactctgcatccaccgatgcccagctcgagacttccaagcagcagaagctcctgatcacgaacctcgcccagcttcgcggcctgcaccgcgctgccaacttctctgcccgccagaccaaagcccaaacctccgaagcccgccaggaggtcgaccgcctacacctccaactccagaacctatactaccaacagcgtcatctccaaggcgagattgccgcctgcgagtcctatgatcactcataccaacagctcccgctcatacctgtggaggaatttctagccctcaagcccgagcatgccgacgatgacgagaatgcgctcatggtggctcgcatcgaacacgagcgtgccgagcgtgaagccctcgaacagaagcgaatggagctcctaaagcgcaaacaaaagcttattgccgacaacaagcgccggaaggatgatctgtccaacttggataaggagcttgagaaatttatagattctgcgaagccaatcaccaagctttttgacaagaatgtttga

SEQ ID NO: 11615 - protein, 211 aa, Muscodor strobelii
  misc_feature: SGI Peptide ID NO. 563737
  misc_feature (1)..(209): NCBI GI: 46108360 Blast Desc: FG01062.1 [Gibberella zeae PH-1]
  misc_feature (1)..(211): NCBI GI: 85117838 Blast Desc: NCU03239 [Neurospora crassa OR74A] gi|28927146|gb|EAA36103.1| conserved [Neurospora crassa OR74A]
  misc_feature (1)..(211): NCBI GI: 156057901 Blast Desc: SS1G_04682 [Sclerotinia sclerotiorum 1980] gi|154702467|gb|EDO02206.1| SS1G_04682 [Sclerotinia sclerotiorum 1980]
  misc_feature (1)..(211): NCBI GI: 116182506 Blast Desc: CHGG_01881 [Chaetomium globosum CBS 148.51] gi|88186178|gb|EAQ93646.1| CHGG_01881 [Chaetomium globosum CBS 148.51]
  misc_feature (1)..(209): NCBI GI: 154323372 Blast Desc: BC1G_00085 [Botryotinia fuckeliana B05.10] gi|150842314|gb|EDN17507.1| BC1G_00085 [Botryotinia fuckeliana B05.10]
  misc_feature (1)..(209): NCBI GI: 240279106 Blast Desc: conserved [Ajellomyces capsulatus H143]
  misc_feature (1)..(209): NCBI GI: 154273308 Blast Desc: conserved [Ajellomyces capsulatus NAm1] gi|150416018|gb|EDN11362.1| conserved [Ajellomyces capsulatus NAm1]
  misc_feature (7)..(211): NCBI GI: 261357476 Blast Desc: conserved [Verticillium albo-atrum VaMs.102]
  misc_feature (1)..(209): NCBI GI: 261192027 Blast Desc: conserved [Ajellomyces dermatitidis SLH14081] gi|239589737|gb|EEQ72380.1| conserved [Ajellomyces dermatitidis SLH14081] gi|239608527|gb|EEQ85514.1| conserved [Ajellomyces
  misc_feature (3)..(208): NCBI GI: 39945392 Blast Desc: MGG_04678 [Magnaporthe grisea 70-15] gi|145011297|gb|EDJ95953.1| MGG_04678 [Magnaporthe grisea 70-15]
MAVNEIVTDPELANVLAASRDTRVQALNLVQQIAASGPADSASTDAQLETSKQQKLLITNLAQLRGLHRAANFSARQTKAQTSEARQEVDRLHLQLQNLYYQQRHLQGEIAACESYDHSYQQLPLIPVEEFLALKPEHADDDENALMVARIEHERAEREALEQKRMELLKRKQKLIADNKRRKDDLSNLDKELEKFIDSAKPITKLFDKNV

SEQ ID NO: 11616 - DNA, 1534 bp, Muscodor strobelii
  misc_feature: SGI EST ID NO. CUFF.27729.0
  misc_feature: Variant of the nucleotide sequence at SEQ ID NO 11614
gtccaggcgagccaggttcattgttcattgtccgcccaacggccccagcgcaattccgcatctctggagaaaaccagccccacattaaacgccagaaagcacctggctcgcctggtagtctcgcttcagctaaggtaatccctaaggtacgaggtcaagctcgctgcctcgcccgccagcctcaagcaagtagtcaaagtagtctgcttgcgatttcagtctgacgggagccactgttgccgcttccacccagcaccgtcgccgcggcacgctgcagcccgcgggcttctccttgcgaccaagcccgagtcgaaacgatggccgtcaacgagatcgtaacggacccagagctcgccaacgtgctcgccgcctcgagggacacgcgggtccaggctctgaacctcgtccagcagatcgccgcttcaggccctgccgactctgcatccaccgatgcccagctcgagacttccaagcagcagaagctcctgatcacgaacctcgcccagcttcgcggcctgcaccgcgctgccaacttctctgcccgccagaccaaagcccaaacctccgaagcccgccaggaggtcgaccgcctacacctccaactccagaacctatactaccaacagcgtcatctccaaggcgagattgccgcctgcgagtcctatgatcactcataccaacagctcccgctcatacctgtggaggaatttctagccctcaagcccgagcatgccgacgatgacgagaatgcgctcatggtggctcgcatcgaacacgagcgtgccgagcgtgaagccctcgaacagaagcgaatggagctcctaaagcgcaaacaaaagcttattgccgacaacaagcgccggaaggatgatctgtccaacttggataaggagcttgagaaatttatagattctgcgaagccaatcaccaagctttttgacaagaatgtttgaaaggctgcaacggtaattttgcggaatcacctcgtagagctaccttataaaatctatatcatgatcatggactctctgaggtggcagtccgcactgagattatattcgcgcggaagttggcgtgggtattacgggctaaagatctctcacacggtcatcttcccaatagggcattatatgccctctaattgagtgcagttatagccccgttttcctacccccaattatctcgaggcagcaggcgcctcaaacgttcgaggatcgatgggtgttggggaggacatataacgagtggtcatgacactctatagtggacgacgctttatgtatgaaggtctaccatttggacgagacttggggtgaccgagagatgaagacggctgagaccgtctgcgataaatagatccgcggatatgtccgttcagtacgaagtacagagaggcgtaattcgtagcaatcgaccccggtcgaggaaatttcgagctagcagatgccagtatcaaactcagcatcatgctggataacgaacagcagccttgattatcaagttatagtaatattgagttgcgttcatctcgtaa

SEQ ID NO: 11617 - DNA, 1965 bp, Muscodor strobelii
  misc_feature: SGI cDNA ID NO. 563738
  misc_feature: Encodes the peptide sequence at SEQ ID NO 11618
atgtcgctctttttcacctgggtgtccaggcgggctcccggcctggccatggtcttcgtcgtggttctcgcctacttcgttatcaccagagaggcagcggcttcggggtttagcttcaggcatggccaggcggactcgctgagtcgacctgctcgagtccctctcacggagccgaccacgtatgtcggtggtggcacctggactcgcatattcgcctactactgcctcataattcatatctgcgtctcttccttcccattgcgctccatgtggtccatcttcgatatttcccgatgtctcgaaagaacagcacgcagcaagtcactgaaagactacaagctatcagctcaccgtcgcgggtccttcacttcgttctcgagctccgaaacattgacatcgtccaaggagtgcccgagtggttcatcaacggcgagtgaggcgggcgaccaggaaaccgattttctttcagacaccgaaggcggaatcgaccgagtgatccatgctattgttatacccaactacaaggaggaaatcgacacccttcgcgaaactctcgacgtcatggcatctcacccccaggctcgcgaaacctacgatgtctatcttgcaatggaaactcgcgagcagaatgcggaagtgaaagcaatgaacctgatccaggagttctgcaagaaattccgttcaattgatttcacgctccacccatccgatatccctggcgaggcgcccggtaaaggtagcaatatggcttgggctgggcggaagcttagtgaaaagtattctcttggtgtcagaaaggacgtcattatcactggtatcgacgctgacagccatctctcgtcgaactacttcgctctacttaccagcatgcatacgtctaaccctgatactgctacaacgaccctctacgctgctcctatcatcttcgatcgcaatgcccacgaaattccgtctatagtacgagttgcagacatcctgtggggagctgcgggtatgtcaggtctctaccgcgggtcatcaatcgcaccgcccacgtcggtctactctttgcccctccagctcgtcgaccgcgttggaggctgggactgcgattccgaagccattggcgaagatctgcacatgtacctgaagtgcttttttgctctgaacggaaacctgactgtccgcactattcatagtcctgtcagtcagagtaacgtcaaaggcgacgggggcgagggagttcgtcagatctacaatgacatgaacgcgcgctacaaacaagccttgcgacacatgtggggtgctctcgatgtcggttttgctctgaggaaattggccgaactctggcgagagcggaaacacactacccgagcctaccgacctctgcacatcgcgctgacgcttcccgacgactcgtatgtcaagggccagattgatattgaccccgaacaacctcttgagagtgggatatatgccgatgtcattacagaaacgatcaagggacccgattggcagcgaacattcattttggctcaccgcttattcgaggcacattttctccctcttcaaatgactatttttgtcctgacatcaactctgtatggattggtcaccgaaggcggccctgatccccacaatgtcgactggatcttccaaatctgcaaagtccttcgaacagttggcctcgctgaggttgccttcttgcttttcctgtacgaacgctaccacaagatttgcgctactacccgtgagaaggaaatgcaggaagctggcctagcaaaggggatgtgcttctcgcaccgcagcttcaaagccaatttcattgattacatcacggcacccctggttgcaccactctatggcgccatcccctcggcacatgctcagctgatgcatttctttacccatgacctggtatataccgtgagcaagaaggtcacgcggcaaagggcgaaatcattcatcgcagaagtcctttcgtag

SEQ ID NO: 11618 - protein, 654 aa, Muscodor strobelii
  misc_feature: SGI Peptide ID NO. 563738
  misc_feature (4)..(653): NCBI GI: 116182510 Blast Desc: CHGG_01883 [Chaetomium globosum CBS 148.51] gi|88186180|gb|EAQ93648.1| CHGG_01883 [Chaetomium globosum CBS 148.51]
  misc_feature (1)..(647): NCBI GI: 261357477 Blast Desc: conserved [Verticillium albo-atrum VaMs.102]
  misc_feature (4)..(648): NCBI GI: 39945390 Blast Desc: MGG_04677 [Magnaporthe grisea 70-15] gi|145011298|gb|EDJ95954.1| MGG_04677 [Magnaporthe grisea 70-15]
  misc_feature (5)..(647): NCBI GI: 171695142 Blast Desc: protein product [Podospora anserina] gi|170947813|emb|CAP59976.1| protein product [Podospora anserina]
  misc_feature (1)..(644): NCBI GI: 256734432 Blast Desc: NECHADRAFT_74692 [Nectria haematococca mpVI 77-13-4]
  misc_feature (110)..(647): NCBI GI: 164427201 Blast Desc: NCU03240 [Neurospora crassa OR74A] gi|157071649|gb|EAA36104.2| conserved [Neurospora crassa OR74A]
  misc_feature (3)..(641): NCBI GI: 119499077 Blast Desc: NFIA_039750 [Neosartorya fischeri NRRL 181] gi|119414460|gb|EAW24399.1| conserved [Neosartorya fischeri NRRL 181]
  misc_feature (3)..(641): NCBI GI: 159125969 Blast Desc: AFUB_050870 [Aspergillus fumigatus A1163]
  misc_feature (3)..(641): NCBI GI: 70985204 Blast Desc: AFUA_5G02340 [Aspergillus fumigatus Af293] gi|66845736|gb|EAL86070.1| AFUA_5G02340 [Aspergillus fumigatus Af293]
  misc_feature (69)..(639): NCBI GI: 212546977 Blast Desc: conserved [Penicillium marneffei ATCC 18224] gi|210065162|gb|EEA19257.1| conserved [Penicillium marneffei ATCC 18224]
MSLFFTWVSRRAPGLAMVFVVVLAYFVITREAAASGFSFRHGQADSLSRPARVPLTEPTTYVGGGTWTRIFAYYCLIIHICVSSFPLRSMWSIFDISRCLERTARSKSLKDYKLSAHRRGSFTSFSSSETLTSSKECPSGSSTASEAGDQETDFLSDTEGGIDRVIHAIVIPNYKEEIDTLRETLDVMASHPQARETYDVYLAMETREQNAEVKAMNLIQEFCKKFRSIDFTLHPSDIPGEAPGKGSNMAWAGRKLSEKYSLGVRKDVIITGIDADSHLSSNYFALLTSMHTSNPDTATTTLYAAPIIFDRNAHEIPSIVRVADILWGAAGMSGLYRGSSIAPPTSVYSLPLQLVDRVGGWDCDSEAIGEDLHMYLKCFFALNGNLTVRTIHSPVSQSNVKGDGGEGVRQIYNDMNARYKQALRHMWGALDVGFALRKLAELWRERKHTTRAYRPLHIALTLPDDSYVKGQIDIDPEQPLESGIYADVITETIKGPDWQRTFILAHRLFEAHFLPLQMTIFVLTSTLYGLVTEGGPDPHNVDWIFQICKVLRTVGLAEVAFLLFLYERYHKICATTREKEMQEAGLAKGMCFSHRSFKANFIDYITAPLVAPLYGAIPSAHAQLMHFFTHDLVYTVSKKVTRQRAKSFIAEVLS

SEQ ID NO: 11619 - DNA, 3082 bp, Muscodor strobelii
  misc_feature: SGI EST ID NO. CUFF.27665.0
  misc_feature: Variant of the nucleotide sequence at SEQ ID NO 11617
ccgagctccccttttttttctgcggtatcactagctcgtccgcggtctcgtcctcgccctcgctcccaggccgccgtcacattctactacgtgcatacctcccataccggcacgtttgcagcaatcttggtggccccccagcctgcttcactcactttcccctaacaagtactaggaattttctctctgccgctcttctcgtcccttttcccatctcaataatcataatccaaccctgctgcatgttcatcgtctatgggagtcttcactagcttcgagcgcgcaccgtcttctctcgcgctctgcacctcctagcatcccacccccgtcacctttcccctaaacctccttttattcctaacctcctcccatcgcttgtcggcagcaataccgtctgctagcttgtggtgttcttctcttttctcccttctctccgacacctccgcccgatctgcccgggtctgtttgctctggttcgacttggataacaacgcctcgctgtcgcaatgtcgctctttttcacctgggtgtccaggcgggctcccggcctggccatggtcttcgtcgtggttctcgcctacttcgttatcaccagagaggcagcggcttcggggtttagcttcaggcatggccaggcggactcgctgagtcgacctgctcgagtccctctcacggagccgaccacgtatgtcggtggtggcacctggactcgcatattcgcctactactgcctcataattcatatctgcgtctcttccttcccattgcgctccatgtggtccatcttcgatatttcccgatgtctcgaaagaacagcacgcagcaagtcactgaaagactacaagctatcagctcaccgtcgcgggtccttcacttcgttctcgagctccgaaacattgacatcgtccaaggagtgcccgagtggttcatcaacggcgagtgaggcgggcgaccaggaaaccgattttctttcagacaccgaaggcggaatcgaccgagtgatccatgctattgttatacccaactacaaggaggaaatcgacacccttcgcgaaactctcgacgtcatggcatctcacccccaggctcgcgaaacctacgatgtctatcttgcaatggaaactcgcgagcagaatgcggaagtgaaagcaatgaacctgatccaggagttctgcaagaaattccgttcaattgatttcacgctccacccatccgatatccctggcgaggcgcccggtaaaggtagcaatatggcttgggctgggcggaagcttagtgaaaagtattctcttggtgtcagaaaggacgtcattatcactggtatcgacgctgacagccatctctcgtcgaactacttcgctctacttaccagcatgcatacgtctaaccctgatactgctacaacgaccctctacgctgctcctatcatcttcgatcgcaatgcccacgaaattccgtctatagtacgagttgcagacatcctgtggggagctgcgggtatgtcaggtctctaccgcgggtcatcaatcgcaccgcccacgtcggtctactctttgcccctccagctcgtcgaccgcgttggaggctgggactgcgattccgaagccattggcgaagatctgcacatgtacctgaagtgcttttttgctctgaacggaaacctgactgtccgcactattcatagtcctgtcagtcagagtaacgtcaaaggcgacgggggcgagggagttcgtcagatctacaatgacatgaacgcgcgctacaaacaagccttgcgacacatgtggggtgctctcgatgtcggttttgctctgaggaaattggccgaactctggcgagagcggaaacacactacccgagcctaccgacctctgcacatcgcgctgacgcttcccgacgactcgtatgtcaagggccagattgatattgaccccgaacaacctcttgagagtgggatatatgccgatgtcattacagaaacgatcaagggacccgattggcagcgaacattcattttggctcaccgcttattcgaggcacattttctccctcttcaaatgactatttttgtcctgacatcaactctgtatggattggtcaccgaaggcggccctgatccccacaatgtcgactggatcttccaaatctgcaaagtccttcgaacagttggcctcgctgaggttgccttcttgcttttcctgtacgaacgctaccacaagatttgcgctactacccgtgagaaggaaatgcaggaagctggcctagcaaaggggatgtgcttctcgcaccgcagcttcaaagccaatttcattgattacatcacggcacccctggttgcaccactctatggcgccatcccctcggcacatgctcagctgatgcatttctttacccatgacctggtatataccgtgagcaagaaggtcacgcggcaaagggcgaaatcattcatcgcagaagtcctttcgtagcgtcccgtctgttcttggatttcaagctttcgcattaaccggtttcgatcggtacgagcccggactcagcggcgtttcttcgattctttaattcctcctttaaatacacaggcgataagcactcgacattttgaacagcaactttcagaagcgcatgtaaatagaacatgatgtgatatgcatggcaccggcattggcattctagattggggattatttttctggtcccatggagttttcggagcacggtgcaggaaaagggtatcttcctgccggcattcgtttatatggcaagacagacgaacttgaggtgcgggtgtaggtcgaagacacgattcgatatggacgttgcatgacatgcaactggtctaatccggggccgggcagcccagctcggatcaaaaggctctccgttgtcttgtgagcctgctaatgagcaaatttgcgcccgataatacttaatacgatgtatatacaacggagcttgcttcagacgttggggatggagggaacgtcgaatgcacacagtagttttgtattgctcatagggcctacaaatacacatgactgatatcttcgtagctcttcatcgtagctctttgacttcttcg

SEQ ID NO: 11620 - DNA, 1977 bp, Muscodor strobelii
  misc_feature: SGI cDNA ID NO. 563739
  misc_feature: Encodes the peptide sequence at SEQ ID NO 11621
atgtcgctctttttcacctgggtgtccaggcgggctcccggcctggccatggtcttcgtcgtggttctcgcctacttcgttatcaccagagaggcagcggcttcggggtttagcttcaggcatggccaggcggactcgctgagtcgacctgctcgagtccctctcacggagccgaccacgtatgtcggtggtggcacctggactcgcatattcgcctactactgcctcataattcatatctgcgtctcttccttcccattgcgctccatgtggtccatcttcgatatttcccgatgtctcgaaagaacagcacgcagcaagtcactgaaagactacaagctatcagctcaccgtcgcgggtccttcacttcgttctcgagctccgaaacattgacatcgtccaaggagtgcccgagtggttcatcaacggcgagtgaggcgggcgaccaggaaaccgattttctttcagacaccgaaggcggaatcgaccgagtgatccatgctattgttatacccaactacaaggaggaaatcgacacccttcgcgaaactctcgacgtcatggcatctcacccccaggctcgcgaaacctacgatgtctatcttgcaatggaaactcgcgagcagaatgcggaagtgaaagcaatgaacctgatccaggagttctgcaagaaattccgttcaattgatttcacgctccacccatccgatatccctggcgaggcgcccggtaaaggtagcaatatggcttgggctgggcggaagcttagtgaaaagtattctcttggtgtcagaaaggacgtcattatcactggtatcgacgttcaccatctagctgacagccatctctcgtcgaactacttcgctctacttaccagcatgcatacgtctaaccctgatactgctacaacgaccctctacgctgctcctatcatcttcgatcgcaatgcccacgaaattccgtctatagtacgagttgcagacatcctgtggggagctgcgggtatgtcaggtctctaccgcgggtcatcaatcgcaccgcccacgtcggtctactctttgcccctccagctcgtcgaccgcgttggaggctgggactgcgattccgaagccattggcgaagatctgcacatgtacctgaagtgcttttttgctctgaacggaaacctgactgtccgcactattcatagtcctgtcagtcagagtaacgtcaaaggcgacgggggcgagggagttcgtcagatctacaatgacatgaacgcgcgctacaaacaagccttgcgacacatgtggggtgctctcgatgtcggttttgctctgaggaaattggccgaactctggcgagagcggaaacacactacccgagcctaccgacctctgcacatcgcgctgacgcttcccgacgactcgtatgtcaagggccagattgatattgaccccgaacaacctcttgagagtgggatatatgccgatgtcattacagaaacgatcaagggacccgattggcagcgaacattcattttggctcaccgcttattcgaggcacattttctccctcttcaaatgactatttttgtcctgacatcaactctgtatggattggtcaccgaaggcggccctgatccccacaatgtcgactggatcttccaaatctgcaaagtccttcgaacagttggcctcgctgaggttgccttcttgcttttcctgtacgaacgctaccacaagatttgcgctactacccgtgagaaggaaatgcaggaagctggcctagcaaaggggatgtgcttctcgcaccgcagcttcaaagccaatttcattgattacatcacggcacccctggttgcaccactctatggcgccatcccctcggcacatgctcagctgatgcatttctttacccatgacctggtatataccgtgagcaagaaggtcacgcggcaaagggcgaaatcattcatcgcagaagtcctttcgtag

SEQ ID NO: 11621 - protein, 658 aa, Muscodor strobelii
  misc_feature: SGI Peptide ID NO. 563739
  misc_feature (4)..(657): NCBI GI: 116182510 Blast Desc: CHGG_01883 [Chaetomium globosum CBS 148.51] gi|88186180|gb|EAQ93648.1| CHGG_01883 [Chaetomium globosum CBS 148.51]
  misc_feature (1)..(651): NCBI GI: 261357477 Blast Desc: conserved [Verticillium albo-atrum VaMs.102]
  misc_feature (4)..(652): NCBI GI: 39945390 Blast Desc: MGG_04677 [Magnaporthe grisea 70-15] gi|145011298|gb|EDJ95954.1| MGG_04677 [Magnaporthe grisea 70-15]
  misc_feature (5)..(651): NCBI GI: 171695142 Blast Desc: protein product [Podospora anserina] gi|170947813|emb|CAP59976.1| protein product [Podospora anserina]
  misc_feature (1)..(648): NCBI GI: 256734432 Blast Desc: NECHADRAFT_74692 [Nectria haematococca mpVI 77-13-4]
  misc_feature (110)..(651): NCBI GI: 164427201 Blast Desc: NCU03240 [Neurospora crassa OR74A] gi|157071649|gb|EAA36104.2| conserved [Neurospora crassa OR74A]
  misc_feature (3)..(645): NCBI GI: 119499077 Blast Desc: NFIA_039750 [Neosartorya fischeri NRRL 181] gi|119414460|gb|EAW24399.1| conserved [Neosartorya fischeri NRRL 181]
  misc_feature (3)..(645): NCBI GI: 159125969 Blast Desc: AFUB_050870 [Aspergillus fumigatus A1163]
  misc_feature (3)..(645): NCBI GI: 70985204 Blast Desc: AFUA_5G02340 [Aspergillus fumigatus Af293] gi|66845736|gb|EAL86070.1| AFUA_5G02340 [Aspergillus fumigatus Af293]
  misc_feature (69)..(643): NCBI GI: 212546977 Blast Desc: conserved [Penicillium marneffei ATCC 18224] gi|210065162|gb|EEA19257.1| conserved [Penicillium marneffei ATCC 18224]
MSLFFTWVSRRAPGLAMVFVVVLAYFVITREAAASGFSFRHGQADSLSRPARVPLTEPTTYVGGGTWTRIFAYYCLIIHICVSSFPLRSMWSIFDISRCLERTARSKSLKDYKLSAHRRGSFTSFSSSETLTSSKECPSGSSTASEAGDQETDFLSDTEGGIDRVIHAIVIPNYKEEIDTLRETLDVMASHPQARETYDVYLAMETREQNAEVKAMNLIQEFCKKFRSIDFTLHPSDIPGEAPGKGSNMAWAGRKLSEKYSLGVRKDVIITGIDVHHLADSHLSSNYFALLTSMHTSNPDTATTTLYAAPIIFDRNAHEIPSIVRVADILWGAAGMSGLYRGSSIAPPTSVYSLPLQLVDRVGGWDCDSEAIGEDLHMYLKCFFALNGNLTVRTIHSPVSQSNVKGDGGEGVRQIYNDMNARYKQALRHMWGALDVGFALRKLAELWRERKHTTRAYRPLHIALTLPDDSYVKGQIDIDPEQPLESGIYADVITETIKGPDWQRTFILAHRLFEAHFLPLQMTIFVLTSTLYGLVTEGGPDPHNVDWIFQICKVLRTVGLAEVAFLLFLYERYHKICATTREKEMQEAGLAKGMCFSHRSFKANFIDYITAPLVAPLYGAIPSAHAQLMHFFTHDLVYTVSKKVTRQRAKSFIAEVLS

SEQ ID NO: 11622 - DNA, 3082 bp, Muscodor strobelii; identical to SEQ ID NO: 11619
  misc_feature: SGI EST ID NO. CUFF.27665.0
  misc_feature: Variant of the nucleotide sequence at SEQ ID NO 11620

SEQ ID NO: 11623 - DNA, 792 bp, Muscodor strobelii
  misc_feature: SGI cDNA ID NO. 563740
  misc_feature: Encodes the peptide sequence at SEQ ID NO 11624
atgccgtccatcttcgacgcaagcaacagacccacgactgggcaggaagaccgacgcaaggtccgcatcggcgtattcatccccgctgactgtcaaatgctcgacgccgcaggtgtcgatatctttgggtcgttgagctacgagtatcttgccgtgctcgacaagctcgtacccaagcaagtcgttgatgtagcgccctcggtggccatccactacattggctccgtgaagaaaggcgagcctattcagatgacatcgaatcaaacagttatagctacgaatcatttcagcgaccctgaagttgcacccggtaaactggatattgtgtatatccccggccctgacccattcgcgcctttcgacgaggaaggccttgaatggttgaggcaacaggatgcaaacgagggaactgatatcttgagcgtctgcactgggatatttgtctgtggcaaagctgggcttttgaaaggccgcgaagtctgtggacctcgtggggtgcagcccatgattgagcagatgggctgggagcctaaggcactgagaggccatgagttgcgttgggttcaggatggtaacttttggtccagtggtggtgtgacaaatggcaacgacctcgtatcagcctattgccgtgcgaaaacggatgtctggcctaggcctctcgttgagatggtactcgagatgcttgatgttggagaccggcctcagaagtatcctaacgacatgaacacggaaaaatatgtcacagaaatcatcgcagccagcggtgtgaatgtgaacgcagctgcatga

SEQ ID NO: 11624 - protein, 263 aa, Muscodor strobelii
  misc_feature: SGI Peptide ID NO. 563740
  misc_feature (19)..(238): NCBI GI: 256734433 Blast Desc: NECHADRAFT_74693 [Nectria haematococca mpVI 77-13-4]
  misc_feature (19)..(247): NCBI GI: 46108356 Blast Desc: FG01060.1 [Gibberella zeae PH-1]
  misc_feature (13)..(196): NCBI GI: 116182512 Blast Desc: CHGG_01884 [Chaetomium globosum CBS 148.51] gi|88186181|gb|EAQ93649.1| CHGG_01884 [Chaetomium globosum CBS 148.51]
  misc_feature (19)..(243): NCBI GI: 212544622 Blast Desc: ThiJ/PfpI family protein [Penicillium marneffei ATCC 18224] gi|210065434|gb|EEA19528.1| ThiJ/PfpI family protein [Penicillium marneffei ATCC 18224]
  misc_feature (21)..(247): NCBI GI: 240109940 Blast Desc: DJ-1/PfpI family protein [Coccidioides posadasii C735 delta SOWgp]
  misc_feature (21)..(247): NCBI GI: 121704858 Blast Desc: ThiJ/PfpI family protein [Aspergillus clavatus NRRL 1] gi|119398838|gb|EAW09266.1| ThiJ/PfpI family protein [Aspergillus clavatus NRRL 1]
  misc_feature (21)..(224): NCBI GI: 119184665 Blast Desc: CIMG_07108 [Coccidioides immitis RS]
  misc_feature (18)..(245): NCBI GI: 119493047 Blast Desc: ThiJ/PfpI family protein [Neosartorya fischeri NRRL 181] gi|119411939|gb|EAW21882.1| ThiJ/PfpI family protein [Neosartorya fischeri NRRL 181]
  misc_feature (18)..(238): NCBI GI: 71000501 Blast Desc: ThiJ/PfpI family protein [Aspergillus fumigatus Af293] gi|66852571|gb|EAL92896.1| ThiJ/PfpI family protein [Aspergillus fumigatus Af293] gi|159127947|gb|EDP53062.1| ThiJ/PfpI family
  misc_feature (21)..(254): NCBI GI: 255944175 Blast Desc: Pc20g03020 [Penicillium chrysogenum Wisconsin 54-1255] gi|211587590|emb|CAP85631.1| Pc20g03020 [Penicillium chrysogenum Wisconsin 54-1255]
MPSIFDASNRPTTGQEDRRKVRIGVFIPADCQMLDAAGVDIFGSLSYEYLAVLDKLVPKQVVDVAPSVAIHYIGSVKKGEPIQMTSNQTVIATNHFSDPEVAPGKLDIVYIPGPDPFAPFDEEGLEWLRQQDANEGTDILSVCTGIFVCGKAGLLKGREVCGPRGVQPMIEQMGWEPKALRGHELRWVQDGNFWSSGGVTNGNDLVSAYCRAKTDVWPRPLVEMVLEMLDVGDRPQKYPNDMNTEKYVTEIIAASGVNVNAAA

SEQ ID NO: 11625 - DNA, 1226 bp, Muscodor strobelii
  misc_feature: SGI EST ID NO. CUFF.27653.0
  misc_feature: Variant of the nucleotide sequence at SEQ ID NO 11623
tttggattctgtataaaacgtgagggctgtcgtcttactgatggtcaattgcaacatgttcatctcgcttcacctttagcctttgcaacacaatactatcatcagtgagttccgtcgggacgttctatatccactccgcctgacttcaatcttccccgttgagccacgccaaatcatgccgtccatcttcgacgcaagcaacagacccacgactgggcaggaagaccgacgcaaggtccgcatcggcgtattcatccccgctgactgtcaaatgctcgacgccgcaggtgtcgatatctttgggtcgttgagctacgagtatcttgccgtgctcgacaagctcgtacccaagcaagtcgttgatgtagcgccctcggtggccatccactacattggctccgtgaagaaaggcgagcctattcagatgacatcgaatcaaacagttatagctacgaatcatttcagcgaccctgaagttgcacccggtaaactggatattgtgtatatccccggccctgacccattcgcgcctttcgacgaggaaggccttgaatggttgaggcaacaggatgcaaacgagggaactgatatcttgagcgtctgcactgggatatttgtctgtggcaaagctgggcttttgaaaggccgcgaagtctgtggacctcgtggggtgcagcccatgattgagcagatgggctgggagcctaaggcactgagaggccatgagttgcgttgggttcaggatggtaacttttggtccagtggtggtgtgacaaatggcaacgacctcgtatcagcctattgccgtgcgaaaacggatgtctggcctaggcctctcgttgagatggtactcgagatgcttgatgttggagaccggcctcagaagtatcctaacgacatgaacacggaaaaatatgtcacagaaatcatcgcagccagcggtgtgaatgtgaacgcagctgcatgaatggtactattcctataagaatatctatataggtcagcggtatgcaagactataagagtatacgattgagaaggaatgaattttggaacggttggcacctgtatctttgtggcaggtttgtgctttgaagatttcaactgaacttgtgtgcgaggtgacatcttggtcttgtaacttggatcagttgaagcgacatgatagatatcttatattcattcatttttgctgtaattagctatcaatttatgattaaaggtgc

SEQ ID NO: 11626 - DNA, 1431 bp, Muscodor strobelii
  misc_feature: SGI cDNA ID NO. 563741
  misc_feature: Reduced expression when VOC is produced
  misc_feature: Encodes the peptide sequence at SEQ ID NO 11627
atgtccatgacgcctgttgccctctatgggctcgaggttcctcccctgggcctcatggtcccggccatgcaagaggacagcgtgcccggtgcctcctatcgcatcactatggctgctctcgaccctactgagcctcctgaggccgacgaggacggcaacatcccaagcgttcctcgctccaccctgaagctcatccgcaagcgaccttcacttgatgacgacatggacgacgactatctcgatgagctgatggccggcaacctcgacgatgacgaggaggactccgacgactccgacgacgagcccaatggcggaccgagcgacaaggccaagtccaagaaagccaagcaggaggccctcttgaagctcatcgccgccgcccaggaggaagagtccgacgaggagatggacgatgctgaaactaacggcacaaagaaggccagcaagaagggcaaggagcctgccacctccagcgatgatgacgatgatgagagcgtatctagtgacgacgaagtcgaggagttggtcatttgcaccctggacacggagcgcaactaccaacaacctctcgacattgtcattggccctgaggagcaggtgttcttcgtagtcaagggcacccacgctattcacctcacgggcaactacgtcgtcgacactgaggatgtctctgactcagaggacgacgaagacgactacgatctggccggcatgaatggcattgacgactacgactctgatgactccgaggcagatgaacttgatgatatggaggatccccgtgtcaccgaggttgattccgaggaggaggaagaggctcccaagatcatcaagggcaagaacaagcgcctcgctgaggagaccgagagcctcgacgatctgattgccaaatcaggtgctgtcgaggagaccaagctcagcaagaaacagcagaagaagctcaagaacaataagggtgagcccgttgccaaagaagagaccaaggtcgaggtcaccaaagaagtacccgccaagggtgacaagaaggttcagtttgccaagaatctcgagcaaggccctactggatctactgcggctgagaagggagcagctacggtgggtgtcaaggttgttcagggagtcacagttgatgaccgcaagattggcactggtcgtgttgtcaagaagggcaacaaagtcgaggtccgctatatcggaaagctgactaatggcaaggttttcgactcaaacaagaagggcaagcctttcagcttcagcgccggctcaggagaggtaatcaagggatgggacatcggtgttcagggcatgtctgttggcggtgagcgccgtctaactatccctgcccaccttgcctatggcagcaaaggtgtccccggcattcctggtaatagcaccttggtgttcgatattaagttgctcggcatcaaatga

SEQ ID NO: 11627 - protein, 476 aa, Muscodor strobelii
  misc_feature: SGI Peptide ID NO. 563741
  misc_feature (382)..(473): Pfam Id: PF00254 Pfam Desc: FKBP-type peptidyl-prolyl cis-trans isomerase
  misc_feature (1)..(476): NCBI GI: 46108354 Blast Desc: FG01059.1 [Gibberella zeae PH-1] gi|93204532|sp|Q4INZ9.1|FKBP4_GIBZE RecName: Full=FK506-binding protein 4; AltName: Full=Peptidyl-prolyl cis-trans isomerase;
  misc_feature (3)..(476): NCBI GI: 116182514 Blast Desc: CHGG_01885 [Chaetomium globosum CBS 148.51] gi|88186182|gb|EAQ93650.1| CHGG_01885 [Chaetomium globosum CBS 148.51]
  misc_feature (1)..(476): NCBI GI: 256734434 Blast Desc: NECHADRAFT_74694 [Nectria haematococca mpVI 77-13-4]
  misc_feature (1)..(476): NCBI GI: 156045593 Blast Desc: SS1G_09987 [Sclerotinia sclerotiorum 1980] gi|154694380|gb|EDN94118.1| SS1G_09987 [Sclerotinia sclerotiorum 1980]
  misc_feature (1)..(476): NCBI GI: 261357478 Blast Desc: FK506-binding protein [Verticillium albo-atrum VaMs.102]
  misc_feature (3)..(476): NCBI GI: 85111012 Blast Desc: NCU03241 [Neurospora crassa OR74A] gi|74617726|sp|Q7SCN0.1|FKBP4_NEUCR RecName: Full=FK506-binding protein 4; AltName: Full=Peptidyl-prolyl cis-trans isomerase;
  misc_feature (1)..(476): NCBI GI: 39944988 Blast Desc: MGG_04476 [Magnaporthe grisea 70-15] gi|145011418|gb|EDJ96074.1| MGG_04476 [Magnaporthe grisea 70-15]
  misc_feature (1)..(476): NCBI GI: 171695144 Blast Desc: protein product [Podospora anserina] gi|170947814|emb|CAP59977.1| protein product [Podospora anserina]
  misc_feature (2)..(476): NCBI GI: 226292211 Blast Desc: FK506-binding protein [Paracoccidioides brasiliensis Pb18]
  misc_feature (3)..(476): NCBI GI: 242764658 Blast Desc: FKBP-type peptidyl-prolyl isomerase, [Talaromyces stipitatus ATCC 10500] gi|218724015|gb|EED23432.1| FKBP-type peptidyl-prolyl isomerase, [Talaromyces stipitatus ATCC 10500]
  misc_feature (1)..(476): SWISSPROT Homolog: EC 5.2.1.8 Peptidylprolyl isomerase
  misc_feature: Useful for introducing or modulating the production of volatile compounds
MSMTPVALYGLEVPPLGLMVPAMQEDSVPGASYRITMAALDPTEPPEADEDGNIPSVPRSTLKLIRKRPSLDDDMDDDYLDELMAGNLDDDEEDSDDSDDEPNGGPSDKAKSKKAKQEALLKLIAAAQEEESDEEMDDAETNGTKKASKKGKEPATSSDDDDDESVSSDDEVEELVICTLDTERNYQQPLDIVIGPEEQVFFVVKGTHAIHLTGNYVVDTEDVSDSEDDEDDYDLAGMNGIDDYDSDDSEADELDDMEDPRVTEVDSEEEEEAPKIIKGKNKRLAEETESLDDLIAKSGAVEETKLSKKQQKKLKNNKGEPVAKEETKVEVTKEVPAKGDKKVQFAKNLEQGPTGSTAAEKGAATVGVKVVQGVTVDDRKIGTGRVVKKGNKVEVRYIGKLTNGKVFDSNKKGKPFSFSAGSGEVIKGWDIGVQGMSVGGERRLTIPAHLAYGSKGVPGIPGNSTLVFDIKLLGIK

SEQ ID NO: 11628 - DNA, 2106 bp, Muscodor strobelii
  misc_feature: SGI EST ID NO. CUFF.27860.0
  misc_feature: Variant of the nucleotide sequence at SEQ ID NO 11626
ctcgagttcccgccagaacattgagctgtgttccatcgcaagtccgagtcttcgcccgctcttgttctctcaatcctctgcgcagcttcaattgtgtctcccatcccaagcaaacaggcgacgtccaggtccctctccaattcagatcatcaatcttcacaaacaccaccttcaacatgtccatgacgcctgttgccctctatgggctcgaggttcctcccctgggcctcatggtcccggccatgcaagaggacagcgtgcccggtgcctcctatcgcatcactatggctgctctcgaccctactgagcctcctgaggccgacgaggacggcaacatcccaagcgttcctcgctccaccctgaagctcatccgcaagcgaccttcacttgatgacgacatggacgacgactatctcgatgagctgatggccggcaacctcgacgatgacgaggaggactccgacgactccgacgacgagcccaatggcggaccgagcgacaaggccaagtccaagaaagccaagcaggaggccctcttgaagctcatcgccgccgcccaggaggaagagtccgacgaggagatggacgatgctgaaactaacggcacaaagaaggccagcaagaagggcaaggagcctgccacctccagcgatgatgacgatgatgagagcgtatctagtgacgacgaagtcgaggagttggtcatttgcaccctggacacggagcgcaactaccaacaacctctcgacattgtcattggccctgaggagcaggtgttcttcgtagtcaagggcacccacgctattcacctcacgggcaactacgtcgtcgacactgaggatgtctctgactcagaggacgacgaagacgactacgatctggccggcatgaatggcattgacgactacgactctgatgactccgaggcagatgaacttgatgatatggaggatccccgtgtcaccgaggttgattccgaggaggaggaagaggctcccaagatcatcaagggcaagaacaagcgcctcgctgaggagaccgagagcctcgacgatctgattgccaaatcaggtgctgtcgaggagaccaagctcagcaagaaacagcagaagaagctcaagaacaataagggtgagcccgttgccaaagaagagaccaaggtcgaggtcaccaaagaagtacccgccaagggtgacaagaaggttcagtttgccaagaatctcgagcaaggccctactggatctactgcggctgagaagggagcagctacggtgggtgtcaaggttgttcagggagtcacagttgatgaccgcaagattggcactggtcgtgttgtcaagaagggcaacaaagtcgaggtccgctatatcggaaagctgactaatggcaaggttttcgactcaaacaagaagggcaagcctttcagcttcagcgccggctcaggagaggtaatcaagggatgggacatcggtgttcagggcatgtctgttggcggtgagcgccgtctaactatccctgcccaccttgcctatggcagcaaaggtgtccccggcattcctggtaatagcaccttggtgttcgatattaagttgctcggcatcaaatgagcgcatgatctctaaccttgagtatctatcatcacgccacatggactcggattgcgtgacccagatgctggtcacaatcttcctgccgcgctctaactggcttcagaatactgtcgattccggtgtggattggatcagttgagtggaatccgcgcggattcctttgtacacttacgctaggagacatcctgacttcgccaaccgcgatgaatactgtacttcaccccaatcgcatgaagctatgctgtggttaaaagagatgacgagaaggcatcgcgggcgtatataaaaagttatgttccggagcttcagctgctcttctgtcgctggatgttgcgatgtggttttaatgactttaagatagttctcaatcaacagtttttcctcgttaccgaatttcaatctttaaggttttgtgtcaccgaaaaagagacaagcttggggctgcttttcgcaaatagtcagactatcaaaatccgaatgagccttccctttcaag

SEQ ID NO: 11629 - DNA, 1446 bp, Muscodor strobelii
  misc_feature: SGI cDNA ID NO. 563742
  misc_feature: Encodes the peptide sequence at SEQ ID NO 11630
atgtctctcccgtttctgaaggcgaatttccgaggagctgccactgtcatccatcgcagcagcagtaagcctaaaccatcagtgggctcattccaaaaagctgcaaacgggtcgttcccagccagtgctccggatatcctgtcatcttccttatccaatagcacgtcaaataacaccaacggcaacagcaatggagcttccagtggtacaaatactacggcgaaaacttccttcgaatcaaaactatccagtaaagacagcaacaacagtccgacggacaagagggcacccagcataatccaccataatgaaacagagactgtttcgataaccacagaccctaacttgtcggcaatcccagaagcagccattgtcccaccaccacctactgtgctgaccgtcgagagagctgcagccgccaagatatacctcgaaacgtatttcaacgaaaagctcagaccatcgccacgatcccttcgccagagatatctggagagtgaactatacaactgtttcgggatgagccctctcgagaagaacatacgacgcgttgcattctaccagcaggagacgaagtttcttcgtcagacccgagttctgatgaccaaaagcatcggtgccatgaaagggcatcacaatgatctcaccgatagctatgaagtcctcaagattcttggcaagggtagctttggtgtggttcggcttgttcgcgagaaacagcccagtagccacggacatcctggacgagtgtacgcgatgaaagttattcggaagtcagcaatgctgaggacaagtcaagagggacacttgcgagcggagagagattttcttgtggcttctgaaggctcgagatggattgtgccactgatttccagcttccaggatgccgccaatctgtatcttgtaatggaatatatgccgggcggtgattttcttggcctactcatccgagagaatactctcaacgagcctgtcgccaagttctatattgctgagatgattctttgcatcgaagaagcccatgcattgcgctgtatccatcgagacatcaaaccagacaatttcttagtttcgtcctcaggtcatttgaagatctccgattttgggttagcttttgatggccactggtcacatgacaccagctactaccacacccatcgctacagcctgctgcaaaaacttggtctgtctgtcgaaggagacgcaatggatcgagcggaggggccgcaaggcacaatgaaatggaccaatggtgtcagtcaagccatgcaaaagcatgaacgtgagatgccccaagccaatagcgaagtcacccatgacgagccgctattgaactggcgcaaccgttgtggcaatcgcagtgctgcaaggtcttgcgtgggaacaagtcaatatatggcaccagaggtcattcgtgaaggcgactacgatgcaagatgcgactag

SEQ ID NO: 11630 - protein, 481 aa, Muscodor strobelii
  misc_feature: SGI Peptide ID NO. 563742
  misc_feature (219)..(371): Pfam Id: PF00069 Pfam Desc: Protein kinase domain
  misc_feature (341)..(386): Pfam Id: PF07714 Pfam Desc: Protein tyrosine kinase
  misc_feature (15)..(481): NCBI GI: 156045595 Blast Desc: SS1G_09988 [Sclerotinia sclerotiorum 1980] gi|154694381|gb|EDN94119.1| SS1G_09988 [Sclerotinia sclerotiorum 1980]
  misc_feature (55)..(479): NCBI GI: 256734435 Blast Desc: NECHADRAFT_90031 [Nectria haematococca mpVI 77-13-4]
  misc_feature (55)..(472): NCBI GI: 46108352 Blast Desc: FG01058.1 [Gibberella zeae PH-1]
  misc_feature (1)..(469): NCBI GI: 154309579 Blast Desc: BC1G_07260 [Botryotinia fuckeliana B05.10] gi|150852283|gb|EDN27475.1| BC1G_07260 [Botryotinia fuckeliana B05.10]
  misc_feature (15)..(481): NCBI GI: 145603101 Blast Desc: MGG_04475 [Magnaporthe grisea 70-15] gi|145011419|gb|EDJ96075.1| MGG_04475 [Magnaporthe grisea 70-15]
  misc_feature (12)..(481): NCBI GI: 261195214 Blast Desc: serine/threonine-protein kinase cbk1 [Ajellomyces dermatitidis SLH14081] gi|239587883|gb|EEQ70526.1| serine/threonine-protein kinase cbk1 [Ajellomyces dermatitidis
  misc_feature (12)..(481): NCBI GI: 239610628 Blast Desc: protein kinase [Ajellomyces dermatitidis ER-3]
  misc_feature (12)..(481): NCBI GI: 226282628 Blast Desc: serine/threonine-protein kinase cbk1 [Paracoccidioides brasiliensis Pb01]
  misc_feature (101)..(481): NCBI GI: 171695146 Blast Desc: protein product [Podospora anserina] gi|170947815|emb|CAP59978.1| protein product [Podospora anserina]
  misc_feature (102)..(481): NCBI GI: 255932977 Blast Desc: Pc12g11410 [Penicillium chrysogenum Wisconsin 54-1255] gi|211582578|emb|CAP80768.1| Pc12g11410 [Penicillium chrysogenum Wisconsin 54-1255]
  misc_feature (130)..(481): SWISSPROT Homolog: EC 2.7.11.1 Non-specific serine/threonine protein kinase
MSLPFLKANFRGAATVIHRSSSKPKPSVGSFQKAANGSFPASAPDILSSSLSNSTSNNTNGNSNGASSGTNTTAKTSFESKLSSKDSNNSPTDKRAPSIIHHNETETVSITTDPNLSAIPEAAIVPPPPTVLTVERAAAAKIYLETYFNEKLRPSPRSLRQRYLESELYNCFGMSPLEKNIRRVAFYQQETKFLRQTRVLMTKSIGAMKGHHNDLTDSYEVLKILGKGSFGVVRLVREKQPSSHGHPGRVYAMKVIRKSAMLRTSQEGHLRAERDFLVASEGSRWIVPLISSFQDAANLYLVMEYMPGGDFLGLLIRENTLNEPVAKFYIAEMILCIEEAHALRCIHRDIKPDNFLVSSSGHLKISDFGLAFDGHWSHDTSYYHTHRYSLLQKLGLSVEGDAMDRAEGPQGTMKWTNGVSQAMQKHEREMPQANSEVTHDEPLLNWRNRCGNRSAARSCVGTSQYMAPEVIREGDYDARCD

SEQ ID NO: 11631 - DNA, 1812 bp, Muscodor strobelii
  misc_feature: SGI cDNA ID NO. 563743
  misc_feature: Encodes the peptide sequence at SEQ ID NO 11632
atggatgagcagcccgtcgaagtgaatgtcattacgttgaattgctggggcacgaaatccaacgcgtaccgggaagggcgtctagcggcaataggtacatatctcgcaacgactgagcctacacctcatatagtcgccttgcaagaatgcttctctcaagatgactacctgggcatacggcgggagacgcggttcgccttgccttttggcaagctttattccagtggcgccttcggcaatgggctggccattctatccagatggcctatagaagaaagcagcatggttcccttttcgctctacaggcggccaagcaacctgttaagaggtaacaagggaatagcctatgctcgaatacggtacagcgagggagagaaggatataattgaagtgttcaacacctatacacatcgtaaccatgacgatctatccgaggatcctagcgacactgttcatcggttatcgcaagtctgggagatcgcaaagcttgtacgaggcgctactgagcgtgggcatctggccgttgtgctcgcgagcttaaatgcgatccccttctctctgccataccgactgcttacatcccacgcgccggtcagagatgcctggcgagtgctgaatcctgatagctctttaggtccagctacgcacgaactcgagcgtactcgaggacgtccaacgcccacggcccagtctaacgtgatagaaaacggtgtgacaagcaacagtgcctacaacacattcgcgtggtcgagttcagagcagcgtgctctacgtcgtggcaagcggcctatgcttatattgccggagacgccggatgaaaacggacagcgaatcgactacgtcttcttctctcgaggcggtgacccccatgcttcgcctacggatctaagcgagattttaagtgctcataacgcctttacagacgatggcttcggtactttggcggcgccaccgggttgggtggtcaaagatgcgcgagttggtttgatagcacgacatgaacagcttgggtgcagtttgagcgaccgattttccgtagagacgacactggtcctgcacacaccaacaccacctcagagtcgccgtcgacgacatagatcaccttccaggtcctcattaccatcgccaacacggggcactggccccatttcacccgcgtcaccgaccggcaaatcaagaagcgcgggccacagcagagatcgtagctctatcgctgctgctatcactgacatcagcataagccactttaaaacaaacggagagaaagaccgaggaagggctgccacaccccgaagcttcacctcgacggatgctggtctacaaacacttggtgcccgcgcagcagccgtggaaaagggtgtatacttacaatcaccggctgcttcgtcctatcgccgaacgtcaagggatcgtgcgctttgggaccaacagctagatgcatctgcgcctccacgtttccccttaccagcttacgacgagatcctagagctgatcgaagacgaaatatataccgcgcaccgccatcgtcagtatcgtatcgcacacttcttgagctggctcgcagttgtcataggaagttacataggtgtatggtttctaccgaatgggaaaggcgcatttgcccttcttgtcgcaagtagtctcggctttgccgtgggtgtcctcgatctggccatagctttgttattccacccctccgagatagcaaagttgaccgagttcgagttcgaggttcgcaatgcaaaagccgtggcctctggcatgggcgtcgattcgctactccatcaaggaaccggggacgagtggggatga

SEQ ID NO: 11632 - protein, 603 aa, Muscodor strobelii
  misc_feature: SGI Peptide ID NO. 563743
  misc_feature (8)..(350): Pfam Id: PF03372 Pfam Desc: Endonuclease/Exonuclease/phosphatase family
  misc_feature (1)..(603): NCBI GI: 171695106 Blast Desc: protein product [Podospora anserina] gi|170947795|emb|CAP59958.1| protein product [Podospora anserina]
  misc_feature (1)..(585): NCBI GI: 116182486 Blast Desc: CHGG_01871 [Chaetomium globosum CBS 148.51] gi|88186168|gb|EAQ93636.1| CHGG_01871 [Chaetomium globosum CBS 148.51]
  misc_feature (5)..(399): NCBI GI: 256735149 Blast Desc: NECHADRAFT_74696 [Nectria haematococca mpVI 77-13-4]
  misc_feature (2)..(591): NCBI GI: 261199552 Blast Desc: sphingomyelinase [Ajellomyces dermatitidis SLH14081] gi|239594385|gb|EEQ76966.1| sphingomyelinase [Ajellomyces dermatitidis SLH14081] gi|239615550|gb|EEQ92537.1| [Ajellomyces
  misc_feature (1)..(372): NCBI GI: 85111016 Blast Desc: NCU03243 [Neurospora crassa OR74A] gi|28925458|gb|EAA34499.1| NCU03243 [Neurospora crassa OR74A]
  misc_feature (4)..(592): NCBI GI: 145603103 Blast Desc: MGG_04474 [Magnaporthe grisea 70-15] gi|145011420|gb|EDJ96076.1| MGG_04474 [Magnaporthe grisea 70-15]
  misc_feature (7)..(354): NCBI GI: 154311124 Blast Desc: BC1G_06680 [Botryotinia fuckeliana B05.10] gi|150851084|gb|EDN26277.1| BC1G_06680 [Botryotinia fuckeliana B05.10]
  misc_feature (7)..(367): NCBI GI: 156034663 Blast Desc: SS1G_13266 [Sclerotinia sclerotiorum 1980] gi|154698670|gb|EDN98408.1| SS1G_13266 [Sclerotinia sclerotiorum 1980]
  misc_feature (2)..(363): NCBI GI: 238846110 Blast Desc: inositol phosphosphingolipids phospholipase C [Microsporum canis CBS 113480]
  misc_feature (2)..(354): NCBI GI: 225681096 Blast Desc: inositol phosphosphingolipids phospholipase C [Paracoccidioides brasiliensis Pb03]
  misc_feature (3)..(350): SWISSPROT Homolog: EC 3.1.4.12 Sphingomyelin phosphodiesterase
MDEQPVEVNVITLNCWGTKSNAYREGRLAAIGTYLATTEPTPHIVALQECFSQDDYLGIRRETRFALPFGKLYSSGAFGNGLAILSRWPIEESSMVPFSLYRRPSNLLRGNKGIAYARIRYSEGEKDIIEVFNTYTHRNHDDLSEDPSDTVHRLSQVWEIAKLVRGATERGHLAVVLASLNAIPFSLPYRLLTSHAPVRDAWRVLNPDSSLGPATHELERTRGRPTPTAQSNVIENGVTSNSAYNTFAWSSSEQRALRRGKRPMLILPETPDENGQRIDYVFFSRGGDPHASPTDLSEILSAHNAFTDDGFGTLAAPPGWVVKDARVGLIARHEQLGCSLSDRFSVETTLVLHTPTPPQSRRRRHRSPSRSSLPSPTRGTGPISPASPTGKSRSAGHSRDRSSIAAAITDISISHFKTNGEKDRGRAATPRSFTSTDAGLQTLGARAAAVEKGVYLQSPAASSYRRTSRDRALWDQQLDASAPPRFPLPAYDEILELIEDEIYTAHRHRQYRIAHFLSWLAVVIGSYIGVWFLPNGKGAFALLVASSLGFAVGVLDLAIALLFHPSEIAKLTEFEFEVRNAKAVASGMGVDSLLHQGTGDEWG

SEQ ID NO: 11633 - DNA, 2865 bp, Muscodor strobelii
  misc_feature: SGI EST ID NO. CUFF.27633.0
  misc_feature: Variant of the nucleotide sequence at SEQ ID NO 11631
gtcgtattttgcgaagctcatcttaaagaaggtcacattgcagatccactctcgtcacgtccgtgtgttaagggtgagaaggcctcgctcaccgttcctcagccatgcgcatctgcatcctttcgttgcaacacacctatgccgcttggcattccttctaagttggatttacagtcgcatccagtccgtcccagaaggcagtgtactgtgatgtaaggggagcaatgataagatgatcataccggcaacggttccagtttattaattgacaaataatttcatttgcgacctcgagatatatcacttttttccaaatcgatccatttcttattgtcattttctccaacttcctacatatcatttcaacacgacgtggaggccgggttcgcactaattttcctttcccgtcaaggattagaagaggagcatgaaaataaaccatcacccacaatctgaaatatccaagagcatgtcctcagtagaatagcgggcagtagttccgcactcgccatcttcatcatggatgagcagcccgtcgaagtgaatgtcattacgttgaattgctggggcacgaaatccaacgcgtaccgggaagggcgtctagcggcaataggtacatatctcgcaacgactgagcctacacctcatatagtcgccttgcaagaatgcttctctcaagatgactacctgggcatacggcgggagacgcggttcgccttgccttttggcaagctttattccagtggcgccttcggcaatgggctggccattctatccagatggcctatagaagaaagcagcatggttcccttttcgctctacaggcggccaagcaacctgttaagaggtaacaagggaatagcctatgctcgaatacggtacagcgagggagagaaggatataattgaagtgttcaacacctatacacatcgtaaccatgacgatctatccgaggatcctagcgacactgttcatcggttatcgcaagtctgggagatcgcaaagcttgtacgaggcgctactgagcgtgggcatctggccgttgtgctcgcgagcttaaatgcgatccccttctctctgccataccgactgcttacatcccacgcgccggtcagagatgcctggcgagtgctgaatcctgatagctctttaggtccagctacgcacgaactcgagcgtactcgaggacgtccaacgcccacggcccagtctaacgtgatagaaaacggtgtgacaagcaacagtgcctacaacacattcgcgtggtcgagttcagagcagcgtgctctacgtcgtggcaagcggcctatgcttatattgccggagacgccggatgaaaacggacagcgaatcgactacgtcttcttctctcgaggcggtgacccccatgcttcgcctacggatctaagcgagattttaagtgctcataacgcctttacagacgatggcttcggtactttggcggcgccaccgggttgggtggtcaaagatgcgcgagttggtttgatagcacgacatgaacagcttgggtgcagtttgagcgaccgattttccgtagagacgacactggtcctgcacacaccaacaccacctcagagtcgccgtcgacgacatagatcaccttccaggtcctcattaccatcgccaacacggggcactggccccatttcacccgcgtcaccgaccggcaaatcaagaagcgcgggccacagcagagatcgtagctctatcgctgctgctatcactgacatcagcataagccactttaaaacaaacggagagaaagaccgaggaagggctgccacaccccgaagcttcacctcgacggatgctggtctacaaacacttggtgcccgcgcagcagccgtggaaaagggtgtatacttacaatcaccggctgcttcgtcctatcgccgaacgtcaagggatcgtgcgctttgggaccaacagctagatgcatctgcgcctccacgtttccccttaccagcttacgacgagatcctagagctgatcgaagacgaaatatataccgcgcaccgccatcgtcagtatcgtatcgcacacttcttgagctggctcgcagttgtcataggaagttacataggtgtatggtttctaccgaatgggaaaggcgcatttgcccttcttgtcgcaagtagtctcggctttgccgtgggtgtcctcgatctggccatagctttgttattccacccctccgagatagcaaagttgaccgagttcgagttcgaggttcgcaatgcaaaagccgtggcctctggcatgggcgtcgattcgctactccatcaaggaaccggggacgagtggggatgacaatctcgacatcacgctcgccgtgctgttgcaaaagcttttataaccctattctccaccgcccatggccgatccctactaatatttacgcaccacgccacgatgccttttcctctcacatgtattactccacttcccacataccttgagctcttctatcaggcatggaagcagttatccatactatcttcgccgttcgacatgttggccacatctataccagtttaatcatgatccgatatcataaagttgacttcatgccacgacacatttagaacatcatgagggaggagaggatgaggaaaagaatgtgtggacgtatccttaacgacatgatgcattaccattcacacatgggaccattttaattttccttatatcatgattttagtcttcgatgggaattctcacttcacatcgatgcgaacctctttgacaccagcgttggcataatatgtctgtattgggcattactcattaggaattaacgatacccaattaatgatacttgcatacgacgcgtctcaacataat

SEQ ID NO: 11634 - DNA, 900 bp, Muscodor strobelii
  misc_feature: SGI cDNA ID NO. 563744
  misc_feature: Encodes the peptide sequence at SEQ ID NO 11635
atgaaacgcataaccgaggaggccaaggaggttaccctacttaaagcccggcagagcgtaaagtcaaaggaaccacagacacccgatgcctctcaggaatggactctccttgctggcggatatactcatcgtttattgacatacgaaatagataggctcccagctatttccgcgctagcgcgaagattctcattgatagatagagtcgatgttccacgtacgtatttggcgggactatggctcgaagatcttccgtggctgctgtgctggcgggcctattcgcgtcgcttcgaaaaaggcaccgcatcctattgcggaccatcgtggtcgtggacgtcaataaatacacccgtcatctgggatacgaacatatacaagacaacatcttgtgtcgacatcatagacgctaaggcaactccggttgtgccagagaacatattcggtcgagtaaaggcagcacacgttattgtgaaaggctcgatacaacaagcaaaaattgacttaaacgtgaaacatagcgcagtggttggacttcggaacaggcgggaggagagaatgttcttcgttccggatttaaatccacctgatcagcctgatgacagcattcagcgagagtcgccgcgccaaatgatatccacgcttctgaatggtaaggaggttgtctgcttatggctattacacggtcctaccgacaatgatatctatgcccttgttctcgtgcctgcttctgaagccgcagtcgcgaggtctcctgcgtttctttcgaagagtctgcaagatgtacaaatttacgaacgagttgggctcgtcactgctatgtctagtgtgtaccagaagaatgacgttcttgcccttgactggtttactagggcagaaaagaaaacgatcattatcgtctga

SEQ ID NO: 11635 - protein, 299 aa, Muscodor strobelii
  misc_feature: SGI Peptide ID NO. 563744
  misc_feature (34)..(184): NCBI GI: 171677157 Blast Desc: protein product [Podospora anserina] gi|170936646|emb|CAP61305.1| protein product [Podospora anserina]
  misc_feature (27)..(284): NCBI GI: 171694732 Blast Desc: protein product [Podospora anserina] gi|170947608|emb|CAP59769.1| protein product [Podospora anserina]
  misc_feature (33)..(158): NCBI GI: 145604236 Blast Desc: MGG_08449 [Magnaporthe grisea 70-15] gi|145012271|gb|EDJ96927.1| MGG_08449 [Magnaporthe grisea 70-15]
  misc_feature (41)..(159): NCBI GI: 256720830 Blast Desc: NECHADRAFT_85535 [Nectria haematococca mpVI 77-13-4]
  misc_feature (34)..(275): NCBI GI: 171693065 Blast Desc: protein product [Podospora anserina] gi|170946481|emb|CAP73282.1| protein product [Podospora anserina]
  misc_feature (20)..(163): NCBI GI: 171677566 Blast Desc: protein product [Podospora anserina] gi|170936851|emb|CAP61509.1| protein product [Podospora anserina]
  misc_feature (19)..(283): NCBI GI: 169598530 Blast Desc: SNOG_02069 [Phaeosphaeria nodorum SN15] gi|111069161|gb|EAT90281.1| SNOG_02069 [Phaeosphaeria nodorum SN15]
  misc_feature (34)..(162): NCBI GI: 171678559 Blast Desc: protein product [Podospora anserina] gi|170937349|emb|CAP62007.1| protein product [Podospora anserina]
  misc_feature (29)..(280): NCBI GI: 171684301 Blast Desc: protein product [Podospora anserina] gi|170942111|emb|CAP67763.1| protein product [Podospora anserina]
  misc_feature (21)..(223): NCBI GI: 169598007 Blast Desc: SNOG_01801 [Phaeosphaeria nodorum SN15] gi|160707639|gb|EAT91450.2| SNOG_01801 [Phaeosphaeria nodorum SN15]
MKRITEEAKEVTLLKARQSVKSKEPQTPDASQEWTLLAGGYTHRLLTYEIDRLPAISALARRFSLIDRVDVPRTYLAGLWLEDLPWLLCWRAYSRRFEKGTASYCGPSWSWTSINTPVIWDTNIYKTTSCVDIIDAKATPVVPENIFGRVKAAHVIVKGSIQQAKIDLNVKHSAVVGLRNRREERMFFVPDLNPPDQPDDSIQRESPRQMISTLLNGKEVVCLWLLHGPTDNDIYALVLVPASEAAVARSPAFLSKSLQDVQIYERVGLVTAMSSVYQKNDVLALDWFTRAEKKTIIIV

SEQ ID NO: 11636 - DNA, 358 bp, Muscodor strobelii
  misc_feature: SGI EST ID NO. CUFF.27644.0
  misc_feature: Variant of the nucleotide sequence at SEQ ID NO 11634
ggcctattcgcgtcgcttcgaaaaaggcaccgcatcctattgcggaccatcgtggtcgtggacgtcaataaatacacccgtcatctgggatacgaacatatacaagacaacatcttgtgtcgacatcatagacgctaaggcaactccggttgtgccagagaacatattcggtcgagtaaaggcagcacacgttattgtgaaaggctcgatacaacaagcaaaaattgacttaaacgtgaaacatagcgcagtggttggacttcggaacaggcgggaggagagaatgttcttcgttccggatttaaatccacctgatcagcctgatgacagcattcagcgagagtcgccgcgccaaatg

SEQ ID NO: 11637 - DNA, 1314 bp, Muscodor strobelii
  misc_feature: SGI cDNA ID NO. 563745
  misc_feature: Encodes the peptide sequence at SEQ ID NO 11638
atggccgacgtcgaaggccctatcagcgctcaccctccaccgaagcgacggcgagtccacgacgatagcgcacgctccatctccccctacgaacctttagatacgaaagagaatgtgcctattgaaaaacagaccttgcgcctctctgtccgcgactcgtccccaccaagtcgatctgcgagccgtagcccgagtcaccatgcatccatcacaccctcccccgaagacacaccactacctcgccttgatgatggcgaggactcaacgccgcctgtgcgccaacccgctcgaccgcactacgtaccccagcttcaactgagtggccaccaaaaaccaatatcacaagttcgtatctcgcccgacggccggtggattgcctctgcctcggccgatgcaacgattcgaatatgggagagcagcacggggcgtcacatggacacgctagtcggccacatggctggcgtttctgccgttgcctgggcccctgacagcaggactctcgccaccggttccgacgacaaggcaatccgcctgtgggaccgagtcactggacggcctactaaggctagaccgttactcggccaccacagctatgtctactgtctcgccttctcgcccaagggcaacatacttgctagtgggagctacgatgaggccgtcttcctttgggacgtacgcgccgggcggcagatgcgaagcttaccggcgcatagcgaccctgtaagtgggatcgacttctgctgcgatgggaccctcgtggtgagctgcagcacagatggtctgacgcgtatatgggatacatcgactggccagtgcctgcgtacactagtccacgaagacaacccgcccgtgacatccgtctgtttcgcgcctaacggacgctatgtcttggcatttagcaatgattcatgtttgcgcttatgggactatgtttctggcacagtcaaaaagacatactcgggtcataaaaaccaaggatttagtatagggggctgcttcggctcggccgatggagcggccttcatcgcatcccctagcgaagacggcgcaatcgttctgtgggatgtaaagagcaaggaagtggttcagcgcctccatggccacgatggagtctgcttttgggtggacgcccgggaagacatcatggtgagcgctggccaggatggcaaaatcaaaatctatagacaccgtggatcggaatcaggagagcaagccaatggccttgctccccgcgaagagggtagtgggacctcgaccaagcaggaagaagcattgtcaccgagtcaaaacgaggatgtcaagatggaggattga

SEQ ID NO: 11638 - protein, 437 aa, Muscodor strobelii
  misc_feature: SGI Peptide ID NO. 563745
  misc_feature (142)..(180): Pfam Id: PF00400 Pfam Desc: WD domain, G-beta repeat
  misc_feature (100)..(138): Pfam Id: PF00400 Pfam Desc: WD domain, G-beta repeat
  misc_feature (228)..(266): Pfam Id: PF00400 Pfam Desc: WD domain, G-beta repeat
  misc_feature (186)..(224): Pfam Id: PF00400 Pfam Desc: WD domain, G-beta repeat
  misc_feature (270)..(309): Pfam Id: PF00400 Pfam Desc: WD domain, G-beta repeat
  misc_feature (359)..(395): Pfam Id: PF00400 Pfam Desc: WD domain, G-beta repeat
  misc_feature (12)..(436): NCBI GI: 171695104 Blast Desc: protein product [Podospora anserina] gi|170947794|emb|CAP59957.1| protein product [Podospora anserina]
  misc_feature (87)..(407): NCBI GI: 145603105 Blast Desc: MGG_04473 [Magnaporthe grisea 70-15] gi|145011421|gb|EDJ96077.1| MGG_04473 [Magnaporthe grisea 70-15]
  misc_feature (94)..(396): NCBI GI: 164427194 Blast Desc: NCU03244 [Neurospora crassa OR74A] gi|157071646|gb|EAA34500.2| conserved [Neurospora crassa OR74A]
  misc_feature (99)..(395): NCBI GI: 169625214 Blast Desc: SNOG_15874 [Phaeosphaeria nodorum SN15] gi|111055592|gb|EAT76712.1| SNOG_15874 [Phaeosphaeria nodorum SN15]
  misc_feature (94)..(413): NCBI GI: 261199550 Blast Desc: WD repeat-containing protein [Ajellomyces dermatitidis SLH14081] gi|239594384|gb|EEQ76965.1| WD repeat-containing protein [Ajellomyces dermatitidis SLH14081] WD repeat-containing
  misc_feature (88)..(394): NCBI GI: 225681097 Blast Desc: WD repeat domain 5B [Paracoccidioides brasiliensis Pb03]
  misc_feature (88)..(394): NCBI GI: 226282640 Blast Desc: WD repeat domain 5B [Paracoccidioides brasiliensis Pb01]
  misc_feature (88)..(394): NCBI GI: 226292202 Blast Desc: WD repeat-containing protein 5B [Paracoccidioides brasiliensis Pb18]
  misc_feature (86)..(415): NCBI GI: 238846109 Blast Desc: will die slowly [Microsporum canis CBS 113480]
  misc_feature (94)..(394): NCBI GI: 119193472 Blast Desc: CIMG_01113 [Coccidioides immitis RS]
  misc_feature (79)..(394): SWISSPROT Homolog: EC 2.7.11.1 Non-specific serine/threonine protein kinase
MADVEGPISAHPPPKRRRVHDDSARSISPYEPLDTKENVPIEKQTLRLSVRDSSPPSRSASRSPSHHASITPSPEDTPLPRLDDGEDSTPPVRQPARPHYVPQLQLSGHQKPISQVRISPDGRWIASASADATIRIWESSTGRHMDTLVGHMAGVSAVAWAPDSRTLATGSDDKAIRLWDRVTGRPTKARPLLGHHSYVYCLAFSPKGNILASGSYDEAVFLWDVRAGRQMRSLPAHSDPVSGIDFCCDGTLVVSCSTDGLTRIWDTSTGQCLRTLVHEDNPPVTSVCFAPNGRYVLAFSNDSCLRLWDYVSGTVKKTYSGHKNQGFSIGGCFGSADGAAFIASPSEDGAIVLWDVKSKEVVQRLHGHDGVCFWVDAREDIMVSAGQDGKIKIYRHRGSESGEQANGLAPREEGSGTSTKQEEALSPSQNEDVKMED

SEQ ID NO: 11639 - DNA, 3122 bp, Muscodor strobelii
  misc_feature: SGI EST ID NO. CUFF.27656.0
  misc_feature: Variant of the nucleotide sequence at SEQ ID NO 11637
gctgagtctaggaacaactgccttaaaacattggaagatcatctgagaaacacatggcattcacggatgcattccagatacacacatgcccaacaacccgatccgtaattgattgagctttgtcgatttattcttcaatcttacctatacccatttctcgcggcagaacagagctcattcgacacgcttatagcttaggcgtccggtcaacgcacgttgcgcatgatgcattcctggttctaggtagtgtcgtcgattgtttgtgcctacctacgttcctagaagaacacaagacacctactagcctcgcgctggttgttatcagccagcatctgtacactgacgagcgcgatccgtctctccatgggccaccatggccgacgtcgaaggccctatcagcgctcaccctccaccgaagcgacggcgagtccacgacgatagcgcacgctccatctccccctacgaacctttagatacgaaagagaatgtgcctattgaaaaacagaccttgcgcctctctgtccgcgactcgtccccaccaagtcgatctgcgagccgtagcccgagtcgtgagtccaaacgccgccaccgcaaatactcttccagcccacaatccacgtccagtccgagatccagatccgcctcaaggtcccgatcaccatcccagtcaagaacgaggtcgcattcgcgctcaaggtctcgctcccgttcccgctctgacagcgcctcgaccagctcgcggtctcggacaaggcggccatctcatgcccgctcccactcagaccatgcatccatcacaccctcccccgaagacacaccactacctcgccttgatgatggcgaggactcaacgccgcctgtgcgccaacccgctcgaccgcactacgtaccccagcttcaactgagtggccaccaaaaaccaatatcacaagttcgtatctcgcccgacggccggtggattgcctctgcctcggccgatgcaacgattcgaatatgggagagcagcacggggcgtcacatggacacgctagtcggccacatggctggcgtttctgccgttgcctgggcccctgacagcaggactctcgccaccggttccgacgacaaggcaatccgcctgtgggaccgagtcactggacggcctactaaggctagaccgttactcggccaccacagctatgtctactgtctcgccttctcgcccaagggcaacatacttgctagtgggagctacgatgaggccgtcttcctttgggacgtacgcgccgggcggcagatgcgaagcttaccggcgcatagcgaccctgtaagtgggatcgacttctgctgcgatgggaccctcgtggtgagctgcagcacagatggtctgacgcgtatatgggatacatcgactggccagtgcctgcgtacactagtccacgaagacaacccgcccgtgacatccgtctgtttcgcgcctaacggacgctatgtcttggcatttagcaatgattcatgtttgcgcttatgggactatgtttctggcacagtcaaaaagacatactcgggtcataaaaaccaaggatttagtatagggggctgcttcggctcggccgatggagcggccttcatcgcatcccctagcgaagacggcgcaatcgttctgtgggatgtaaagagcaaggaagtggttcagcgcctccatggccacgatggagtctgcttttgggtggacgcccgggaagacatcatggtgagcgctggccaggatggcaaaatcaaaatctatagacaccgtggatcggaatcaggagagcaagccaatggccttgctccccgcgaagagggtagtgggacctcgaccaagcaggaagaagcattgtcaccgagtcaaaacgaggatgtcaagatggaggattgagtgatagcctgcatatgaatacggaatataccctagtgcctacgtgtcccatggtttaaatgaatgctgcattgactagatgcggactcgttattccttagattagagatgttcatatcggaaaatttgagttgatttggtatgaagtgggagggagtcacgacattttgtctcgacatggtgcagtaggtattgcgaattggagagaacacatggccaagtgcacatcggtgttcattccgagagctgcgttcaactgcaaatcactttccaatgtcgataattacatcttctaggtcattagctaatgcctctctacccatgccattgttgactctctagttccaagtccagatttccagtttaaggttatacccataccatacctaacctgcagcttcactatcacctcaatacttcttcgatcagctacactcctaagtttacctcacaacgcccctttccaatgtcacctaccgttattctgatacggcatgcgcaagcactgcacaatgttgatgataagcaaatctacgagtcacaatatttggcccaacgtactaacatttattgcacacaattgggagctattcgaccccgcattaacggaacagggcatatcgcagtgcaagactctaagcgcacagctagaagccaacttcccttattctagggaagattgccgaattattgtaagcccgctgacgcgcacgcttcaaactgtgcagcactcgctggggtggctgctcgattcgggcgttcccgttgaagtacgagcagagtggcaggaaaccactgctaatccctgtgatatcggtgctcctcgagctgagatagaagcagcctggccgcatttcgatttctcatctctcgatcctgtctacccagaaaagacgggcttctacgatccttcagagacggcactcctaggtcgcgcggcggcgggaagaaaatggctcgctcaacaaaaggagaaatgcatcgtaatcgtaacgcattccggattccttgtgagggtgatagatggacctaagtttaagaacaccgagtacagaacgtacgaggttgtagacgacgagtcgggaggggatgtaaaactggtgcagctgatgccaaatggctcagaggtgaatggacagaccgtatgaaatcggtaacgatatgataagatattgttagatgcaggcaaatagaaccattggcagtcacttctatgaatcta

SEQ ID NO: 11640 - DNA, 2028 bp, Muscodor strobelii
  misc_feature: SGI cDNA ID NO. 563746
  misc_feature: Encodes the peptide sequence at SEQ ID NO 11641
atgaaagctctgagagctctccaaccggcattatggctggtagcgagcctattctccaaatccgcccttagtgcacctacggcagaaagtcaaattgttctgcaggcaggcaatcctggttcgctgcgcctgaaccaaaaagaccccgcggccagctcaggtacctcgtcgcaacgcagcctgcgcggccggttcctacatatcacagatctacatcccgacgaatactacaaaccgcacacctcgacagctgaaaacatcgcatgccaccgaggccatggccctgccggcacgtatggcgctgagacgtcggattgcgactctcccatgtcgcttgtcaatgcgactatggactgggtcagagagcacttgagggacgagattgatttcgtggtctggaccggcgactcggctcgccacgacagcgacgaagaattaccccgccacgacaaggacatcatcgccatgaaccgtcgaatcgcagacgcattcgtcgacactttctccgacgaccacggcctcgtcgtgcctgtcgttcccacattcggcaacaacgacatctaccctcacaacattctgcagcccggtcccaacgatattctgcgcacttaccgcaagatatggcagcccttcatccccgaagcccagcgccactctttcgagttcggaggatggttcttcgtcgaggtcattccgagcaaattggccgtcttcagtctcaataccatgtacttcttcgaccgcaacgccggcgtcgacgattgcgcccatccctcagaacctggatacaagcatttcgaatggctgcgtgtccagctcgatattatgcgcaacagaggcatgaaagctatactcatgggccacgttccgccagctcggacctccggcaaacagctatgggacgaaacctgctggcagaaatatactctgtggttgcagcagtaccgcgacgtcgtagttggatccctgtatgggcacatgaacatcgaccattttctcttgcaggacaccaaggacattgaccttacatggattaccggtgcaaacgacgaacgagtctcaacccgccaagctctggaagacgatttgaccattgagtctagcgccgattatctgcgagatcttcgagacgagtgggccaagctcccgaatcctatcgcccttagtaaagactctgaagactccaagaggaaaaagaagagcaaagataaatttggcggcccatatgctgagcgatatcagctctcactcatcggtcccagtatcgtgcccaactacttccccagtcttcgagtgttcgaatacaacattactggtttggaagacgcagcaacctgggtagattcgactagcgccctgaatagtggctacgttgaaaatcaagaagaaatttccgagatacgcgagttgaagagacgttgggacccggagttcgacatcgagaagaaaaagaaaaagaaagggggcaagggcaagaaacctaagaatcccgaccttcacgtccctgatcctccagcaaagggcactccacctggaccggcatactatgcccaaaccctgaccctgaccggcttcacgcagtactacgcaaatttgacttatatcaacgacgacatgaccggtgaacccaaggatgtatcatctagtggttggaaccctgggaagcacaagggcaaaactccgcagcacgagaaaccccagccaaaagagttcagcttcgaggtcgaatacaccacctttgatgataagctatacaagctcaaagacttgaccgtcagaagtttcgtagaccttgctcatcgtattggtcaagcctctgcaaagggcaacagcgtcctggaagacgagatcctcgccgaggagactgatgacgacgaggaagtcgcagaaagtgacttgcagacggacaagaaatccaagaagggaaagaagaagaagcataagaaggctatggagacgtggttgcatttcctcgagcatgccttcgtaagtactcgaagcaagaaagagctcaaagacatgaagtag

SEQ ID NO: 11641 - protein, 675 aa, Muscodor strobelii
  misc_feature: SGI Peptide ID NO. 563746
  misc_feature (63)..(330): Pfam Id: PF00149 Pfam Desc: Calcineurin-like phosphoesterase
  misc_feature (11)..(672): NCBI GI: 256734394 Blast Desc: NECHADRAFT_31772 [Nectria haematococca mpVI 77-13-4]
  misc_feature (4)..(672): NCBI GI: 171684777 Blast Desc: protein product [Podospora anserina] gi|170942349|emb|CAP68001.1| protein product [Podospora anserina]
  misc_feature (55)..(611): NCBI GI: 67471037 Blast Desc: PPN1_NEUCR RecName: Full=Endopolyphosphatase gi|16945372|emb|CAB97279.2| conserved [Neurospora crassa]
  misc_feature (71)..(611): NCBI GI: 164427564 Blast Desc: NCU02996 [Neurospora crassa OR74A] gi|157071796|gb|EAA36146.2| conserved [Neurospora crassa OR74A]
  misc_feature (56)..(674): NCBI GI: 116192411 Blast Desc: CHGG_05923 [Chaetomium globosum CBS 148.51] gi|88181836|gb|EAQ89304.1| CHGG_05923 [Chaetomium globosum CBS 148.51]
  misc_feature (10)..(672): NCBI GI: 154318423 Blast Desc: BC1G_03379 [Botryotinia fuckeliana B05.10] gi|150842902|gb|EDN18095.1| BC1G_03379 [Botryotinia fuckeliana B05.10]
  misc_feature (71)..(603): NCBI GI: 46108536 Blast Desc: FG01150.1 [Gibberella zeae PH-1]
  misc_feature (8)..(674): NCBI GI: 145614392 Blast Desc: MGG_04825 [Magnaporthe grisea 70-15] gi|145021325|gb|EDK05454.1| MGG_04825 [Magnaporthe grisea 70-15]
  misc_feature (13)..(671): NCBI GI: 121701725 Blast Desc: vacuolar endopolyphosphatase, [Aspergillus clavatus NRRL 1] gi|119397270|gb|EAW07701.1| vacuolar endopolyphosphatase, [Aspergillus clavatus NRRL 1]
  misc_feature (40)..(674): NCBI GI: 169607595 Blast Desc: SNOG_06856 [Phaeosphaeria nodorum SN15] gi|160701446|gb|EAT85507.2| SNOG_06856 [Phaeosphaeria nodorum SN15]
  misc_feature (55)..(611): SWISSPROT Homolog: EC 3.6.1.10 Endopolyphosphatase
MKALRALQPALWLVASLFSKSALSAPTAESQIVLQAGNPGSLRLNQKDPAASSGTSSQRSLRGRFLHITDLHPDEYYKPHTSTAENIACHRGHGPAGTYGAETSDCDSPMSLVNATMDWVREHLRDEIDFVVWTGDSARHDSDEELPRHDKDIIAMNRRIADAFVDTFSDDHGLVVPVVPTFGNNDIYPHNILQPGPNDILRTYRKIWQPFIPEAQRHSFEFGGWFFVEVIPSKLAVFSLNTMYFFDRNAGVDDCAHPSEPGYKHFEWLRVQLDIMRNRGMKAILMGHVPPARTSGKQLWDETCWQKYTLWLQQYRDVVVGSLYGHMNIDHFLLQDTKDIDLTWITGANDERVSTRQALEDDLTIESSADYLRDLRDEWAKLPNPIALSKDSEDSKRKKKSKDKFGGPYAERYQLSLIGPSIVPNYFPSLRVFEYNITGLEDAATWVDSTSALNSGYVENQEEISEIRELKRRWDPEFDIEKKKKKKGGKGKKPKNPDLHVPDPPAKGTPPGPAYYAQTLTLTGFTQYYANLTYINDDMTGEPKDVSSSGWNPGKHKGKTPQHEKPQPKEFSFEVEYTTFDDKLYKLKDLTVRSFVDLAHRIGQASAKGNSVLEDEILAEETDDDEEVAESDLQTDKKSKKGKKKKHKKAMETWLHFLEHAFVSTRSKKELKDMK

SEQ ID NO: 11642 - DNA, 5062 bp, Muscodor strobelii
  misc_feature: SGI EST ID NO. CUFF.27814.0
  misc_feature: Variant of the nucleotide sequence at SEQ ID NO 11640
ggaaaatgcattgctgctcgtttccattcgagactcgtctgggctcgtttgcgaataagccagttggacgagctgagggcgatcgcctcactttctttttccgaaaaccaatgctgaaacccccacggtcaaatcatacttacagcgtgcagtcgatacctcaagagaatagacaccacctgatacctcgtccgcctgttcaagtcagtgaccataagacgatacacaccgattaaaaagcgaagtcatcactgtgtgcgctgcctctggcgattcccatacacgaaccgccacatctaagggtctactgatgcgacttggaaaatattttatggaattgaggaccttggtggccacatcccgctagccatatgatcgagtctcccgtcttttctaggcaccctcatacttgaccagtagcagcggtccagtccaggtgccgttggaaaggttgaaaagcaaccgtccaacgcaacatcggagaagaaaaacttaagtcagcccggcagccaacaggctgcaacaaagtgtcaggccctcgatgatcaccaacgtatactaaaatagtctctgcagagctaaggtatatagggtcttgacgtacctatcagccaactgcctaagattctgaaattctctctcgattcatttattcccataacgtcattcttgaacccctgccctacctcttttacttcgccaatctactccctctctcactatcagaccactatcgcatgcttcgacctacccttccaccgctccgagctcatagagcatctcttagccctcgaaatatctccttccaatccctacacacacaaaatgaaagctctgagagctctccaaccggcattatggctggtagcgagcctattctccaaatccgcccttagtgcacctacggcagaaagtcaaattgttctgcaggcaggcaatcctggttcgctgcgcctgaaccaaaaagaccccgcggccagctcaggtacctcgtcgcaacgcagcctgcgcggccggttcctacatatcacagatctacatcccgacgaatactacaaaccgcacacctcgacagctgaaaacatcgcatgccaccgaggccatggccctgccggcacgtatggcgctgagacgtcggattgcgactctcccatgtcgcttgtcaatgcgactatggactgggtcagagagcacttgagggacgagattgatttcgtggtctggaccggcgactcggctcgccacgacagcgacgaagaattaccccgccacgacaaggacatcatcgccatgaaccgtcgaatcgcagacgcattcgtcgacactttctccgacgaccacggcctcgtcgtgcctgtcgttcccacattcggcaacaacgacatctaccctcacaacattctgcagcccggtcccaacgatattctgcgcacttaccgcaagatatggcagcccttcatccccgaagcccagcgccactctttcgagttcggaggatggttcttcgtcgaggtcattccgagcaaattggccgtcttcagtctcaataccatgtacttcttcgaccgcaacgccggcgtcgacgattgcgcccatccctcagaacctggatacaagcatttcgaatggctgcgtgtccagctcgatattatgcgcaacagaggcatgaaagctatactcatgggccacgttccgccagctcggacctccggcaaacagctatgggacgaaacctgctggcagaaatatactctgtggttgcagcagtaccgcgacgtcgtagttggatccctgtatgggcacatgaacatcgaccattttctcttgcaggacaccaaggacattgaccttacatggattaccggtgcaaacgacgaacgagtctcaacccgccaagctctggaagacgatttgaccattgagtctagcgccgattatctgcgagatcttcgagacgagtgggccaagctcccgaatcctatcgcccttagtaaagactctgaagactccaagaggaaaaagaagagcaaagataaatttggcggcccatatgctgagcgatatcagctctcactcatcggtcccagtatcgtgcccaactacttccccagtcttcgagtgttcgaatacaacattactggtttggaagacgcagcaacctgggtagattcgactagcgccctgaatagtggctacgttgaaaatcaagaagaaatttccgagatacgcgagttgaagagacgttgggacccggagttcgacatcgagaagaaaaagaaaaagaaagggggcaagggcaagaaacctaagaatcccgaccttcacgtccctgatcctccagcaaagggcactccacctggaccggcatactatgcccaaaccctgaccctgaccggcttcacgcagtactacgcaaatttgacttatatcaacgacgacatgaccggtgaacccaaggatgtatcatctagtggttggaaccctgggaagcacaagggcaaaactccgcagcacgagaaaccccagccaaaagagttcagcttcgaggtcgaatacaccacctttgatgataagctatacaagctcaaagacttgaccgtcagaagtttcgtagaccttgctcatcgtattggtcaagcctctgcaaagggcaacagcgtcctggaagacgagatcctcgccgaggagactgatgacgacgaggaagtcgcagaaagtgacttgcagacggacaagaaatccaagaagggaaagaagaagaagcataagaaggctatggagacgtggttgcatttcctcgagcatgccttcgtaagtactcgaagcaagaaagagctcaaagacatgaagtagaagcatgtgccccctagtatcgtggggggttggggtcattttggtttattggattgaaattttttggcaagccaggcgttccggaggatggagacaactggtctggcgcataggtagcatctgcatatccggattcagtggtgggttagccacagcagcattggggatagatgtgatattacagtcgttcacctagaaagggaggcttattattgaatagatcacattttacgtttaatcactgttcgtgctttgaaaattcgtgactagtaataaacaacgagtatggtgatcagataggagcggcataacgccggcgccgatgctctttgaacgcctttgagtaatgtaggcaacgaggtattgaaaatggtgtcttgccgcttaatcagactcgctgtcctctgaaggactaaacccatgccattcttcctccgtatcatcagccaatggatcgatctcgtttgattcttgttgttctccttcctcgtcatcctcctcctcttcaacttcaaaagtgccggatatatcccagcgatcacccttagcacgacgactaacgtacttcacgaatcgcagcgcgccactatcgcgaaggactagagacagcctgttccacgccgcagcctggaagaacaggatgttgtctccgtcgtcggcgttggtggttttgtatatagcagcgtcttcgttcccttcgtcttcgtcgcccgccatgtagacttcgtgcccgcctacctcgccatcgacttcttcttcttctccctttcgtttcttgccccttttcttatttttactgcttttctcgctcgcctgctcgtccgcaccgtcgtcttgctcctcttcgtcgccccatccctttgtgggcgtaatgccgaggttgagttcaagtctaggtttgccttcgtgtcctgttgcaagtgtgtagtccattccgcgacggaagcgcctcgccatgaagtcgtggctttctatcgtacagcctgtcgccatttgtagccagcgacggaattgtgggctaggcaggaaatcgtcgatgagttcttggatgggtgatttttcggacttgtcctctgtcttggattttgccttggtgtctttagatatctcggctttagattgaagatacagataccggtgcttgtgcggtggttctgcgacctgccatccgctgtctttgcttcctgtcttctcctgtgcttctatatacgcgcgcagccgggcggagaacttcttgcctagtagattcggaagcgtgatagttgagaattccccaaagtgatccatggcctgctccagtgtatcgggcgtcaaatacgtaggagccatatattgaagcaggaattcgagatccgcctcgtcgaattcctcctctttatccgctttgattactactggctgcggtcgcggcatatcgtactgatctggattgccttggagctgcatgagactactgttctttgcgttctgctcctcggcgccttcgacatagccgtcctcgccgagctgtggtatgtgaaaccagccgctgatagccatgcgtatgcggcctccctggcgctcgagttcggctttggattcggtgtggtagacttcctcgacgtcgtggaagctctcaccgggctgcacggcaaagaaactgagctggttccaggcggggggaatcactttggtgacatctgcggctggtgtgcgagctatctgtccgtcgtcgcccttgagctctcgtactgggaatagacggagtgcaccaccccattcgggtttccagggagtatctgggtctgtcaagtagagaatatagctaactctacgactccctatgacgtcgtcgtgacatagcagatagcatccaggggtgtacacatttatagccatatcggtcttgcgaccactaagagggccactgccagttatatgagcgacatagtcgcggaatgtctgcgagtacatagcatcgcggagagccagaacggatggcagcttcgcgagagcatcgtcgtcgagaccgtcgaggtttgctaggtcaccggactggtggatcttgtagatgtctgtttccttcggtgttaattcgacgttgtctttgatttcattacgtacggaccgcagcagcttgtcgtcgatcaattcatggattacggtgtgcttgtatggtgttgactcggcgtattctctcgtgtagtcttctaagattttcttgccgaat

SEQ ID NO: 11643 - DNA, 1941 bp, Muscodor strobelii
  misc_feature: SGI cDNA ID NO. 563747
  misc_feature: Reduced expression when VOC is produced
  misc_feature: Encodes the peptide sequence at SEQ ID NO 11644
atgcccaaaaccaagcgcaaagccgatgcgcttggaggagactctcagccatccaagaaaaaatctaagctctcacttagtgccgaagacgcccagaagagattcagaaaaggtctattcggcaagaaaatcttagaagactacacgagagaatacgccgagtcaacaccatacaagcacaccgtaatccatgaattgatcgacgacaagctgctgcggtccgtacgtaatgaaatcaaagacaacgtcgaattaacaccgaaggaaacagacatctacaagatccaccagtccggtgacctagcaaacctcgacggtctcgacgacgatgctctcgcgaagctgccatccgttctggctctccgcgatgctatgtactcgcagacattccgcgactatgtcgctcatataactggcagtggccctcttagtggtcgcaagaccgatatggctataaatgtgtacacccctggatgctatctgctatgtcacgacgacgtcatagggagtcgtagagttagctatattctctacttgacagacccagatactccctggaaacccgaatggggtggtgcactccgtctattcccagtacgagagctcaagggcgacgacggacagatagctcgcacaccagccgcagatgtcaccaaagtgattccccccgcctggaaccagctcagtttctttgccgtgcagcccggtgagagcttccacgacgtcgaggaagtctaccacaccgaatccaaagccgaactcgagcgccagggaggccgcatacgcatggctatcagcggctggtttcacataccacagctcggcgaggacggctatgtcgaaggcgccgaggagcagaacgcaaagaacagtagtctcatgcagctccaaggcaatccagatcagtacgatatgccgcgaccgcagccagtagtaatcaaagcggataaagaggaggaattcgacgaggcggatctcgaattcctgcttcaatatatggctcctacgtatttgacgcccgatacactggagcaggccatggatcactttggggaattctcaactatcacgcttccgaatctactaggcaagaagttctccgcccggctgcgcgcgtatatagaagcacaggagaagacaggaagcaaagacagcggatggcaggtcgcagaaccaccgcacaagcaccggtatctgtatcttcaatctaaagccgagatatctaaagacaccaaggcaaaatccaagacagaggacaagtccgaaaaatcacccatccaagaactcatcgacgatttcctgcctagcccacaattccgtcgctggctacaaatggcgacaggctgtacgatagaaagccacgacttcatggcgaggcgcttccgtcgcggaatggactacacacttgcaacaggacacgaaggcaaacctagacttgaactcaacctcggcattacgcccacaaagggatggggcgacgaagaggagcaagacgacggtgcggacgagcaggcgagcgagaaaagcagtaaaaataagaaaaggggcaagaaacgaaagggagaagaagaagaagtcgatggcgaggtaggcgggcacgaagtctacatggcgggcgacgaagacgaagggaacgaagacgctgctatatacaaaaccaccaacgccgacgacggagacaacatcctgttcttccaggctgcggcgtggaacaggctgtctctagtccttcgcgatagtggcgcgctgcgattcgtgaagtacgttagtcgtcgtgctaagggtgatcgctgggatatatccggcacttttgaagttgaagaggaggaggatgacgaggaaggagaacaacaagaatcaaacgagatcgatccattggctgatgatacggaggaagaatggcatgggtttagtccttcagaggacagcgagtctgattaa

SEQ ID NO: 11644 - protein, 646 aa, Muscodor strobelii
  misc_feature: SGI Peptide ID NO. 563747
  misc_feature (3)..(646): NCBI GI: 171684769 Blast Desc: protein product [Podospora anserina] gi|170942345|emb|CAP67997.1| protein product [Podospora anserina]
  misc_feature (5)..(637): NCBI GI: 116192421 Blast Desc: CHGG_05928 [Chaetomium globosum CBS 148.51] gi|88181841|gb|EAQ89309.1| CHGG_05928 [Chaetomium globosum CBS 148.51]
  misc_feature (25)..(642): NCBI GI: 85110987 Blast Desc: NCU00520 [Neurospora crassa OR74A] gi|28925442|gb|EAA34486.1| conserved [Neurospora crassa OR74A]
  misc_feature (5)..(646): NCBI GI: 256735208 Blast Desc: [Nectria haematococca mpVI 77-13-4]
  misc_feature (5)..(637): NCBI GI: 39945522 Blast Desc: MGG_04743 [Magnaporthe grisea 70-15] gi|145021371|gb|EDK05500.1| MGG_04743 [Magnaporthe grisea 70-15]
  misc_feature (26)..(604): NCBI GI: 46107414 Blast Desc: FG00590.1 [Gibberella zeae PH-1]
  misc_feature (5)..(607): NCBI GI: 156063458 Blast Desc: SS1G_01847 [Sclerotinia sclerotiorum 1980] gi|154697181|gb|EDN96919.1| SS1G_01847 [Sclerotinia sclerotiorum 1980]
  misc_feature (5)..(494): NCBI GI: 154319147 Blast Desc: BC1G_02525 [Botryotinia fuckeliana B05.10] gi|150856956|gb|EDN32148.1| BC1G_02525 [Botryotinia fuckeliana B05.10]
  misc_feature (1)..(607): NCBI GI: 169775463 Blast Desc: [Aspergillus oryzae RIB40] gi|238495891|ref|XP_002379181.1| oxidoreductase, [Aspergillus flavus NRRL3357] gi|83770062|dbj|BAE60197.1| protein product
  misc_feature (1)..(607): NCBI GI: 115401712 Blast Desc: conserved [Aspergillus terreus NIH2624] gi|114190385|gb|EAU32085.1| conserved [Aspergillus terreus NIH2624]
  misc_feature: Useful for introducing or modulating the production of volatile compounds
MPKTKRKADALGGDSQPSKKKSKLSLSAEDAQKRFRKGLFGKKILEDYTREYAESTPYKHTVIHELIDDKLLRSVRNEIKDNVELTPKETDIYKIHQSGDLANLDGLDDDALAKLPSVLALRDAMYSQTFRDYVAHITGSGPLSGRKTDMAINVYTPGCYLLCHDDVIGSRRVSYILYLTDPDTPWKPEWGGALRLFPVRELKGDDGQIARTPAADVTKVIPPAWNQLSFFAVQPGESFHDVEEVYHTESKAELERQGGRIRMAISGWFHIPQLGEDGYVEGAEEQNAKNSSLMQLQGNPDQYDMPRPQPVVIKADKEEEFDEADLEFLLQYMAPTYLTPDTLEQAMDHFGEFSTITLPNLLGKKFSARLRAYIEAQEKTGSKDSGWQVAEPPHKHRYLYLQSKAEISKDTKAKSKTEDKSEKSPIQELIDDFLPSPQFRRWLQMATGCTIESHDFMARRFRRGMDYTLATGHEGKPRLELNLGITPTKGWGDEEEQDDGADEQASEKSSKNKKRGKKRKGEEEEVDGEVGGHEVYMAGDEDEGNEDAAIYKTTNADDGDNILFFQAAAWNRLSLVLRDSGALRFVKYVSRRAKGDRWDISGTFEVEEEEDDEEGEQQESNEIDPLADDTEEEWHGFSPSEDSESD

SEQ ID NO: 11645 - DNA, 5806 bp, Muscodor strobelii
  misc_feature: SGI EST ID NO. CUFF.27815.1
  misc_feature: Variant of the nucleotide sequence at SEQ ID NO 11643
gctggatccatcctacaccatcagcgaagtctcgcaacaacttgtacgtcctcaacatgccatagccgtactactcataagcgccatatgctaggaatgggctagaaaactgcgttaggactgcatagcgcataagagatataactgcgtctcagcgtctcctatgcagtagcggtcgtcttttgggggaatctttatgcacccgtacagcaatagatgccggccaggcgcttgatccatcatgcatcaaacagccatacaaactgtgctcatggaatggaaggccaccagtgatggggcgatgatccgatgcgcattccacttggttaaaggtgggggatcccagggcctcttgtggatggcggtcaattcccctcgctcccccagaagcttttaaaggtggatagggacccgtaaccgcaagctccatcgtccgatgtcaaagaaagatatttgacgaaagtcgaacctttacatacaaaaaaataaatcgccattgaggagcacacactgaagaaattagtctcggctatatctctagagttttctgagcttgtgacttactcacagacttgatttcacgatccagtatgcccaaaaccaagcgcaaagccgatgcgcttggaggagactctcagccatccaagaaaaaatctaagctctcacttagtgccgaagacgcccagaagagattcagaaaaggtctattcggcaagaaaatcttagaagactacacgagagaatacgccgagtcaacaccatacaagcacaccgtaatccatgaattgatcgacgacaagctgctgcgacatctacaagatccaccagtccggtgacctagcaaacctcgacggtctcgacgacgatgctctcgcgaagctgccatccgttctggctctccgcgatgctatgtactcgcagacattccgcgactatgtcgctcatataactggcagtggccctcttagtggtcgcaagaccgatatggctataaatgtgtacacccctggatgctatctgctatgtcacgacgacgtcatagggagtcgtagagttagctatattctctacttgacagacccagatactccctggaaacccgaatggggtggtgcactccgtctattcccagtacgagagctcaagggcgacgacggacagatagctcgcacaccagccgcagatgtcaccaaagtgattccccccgcctggaaccagctcagtttctttgccgtgcagcccggtgagagcttccacgacgtcgaggaagtctaccacaccgaatccaaagccgaactcgagcgccagggaggccgcatacgcatggctatcagcggctggtttcacataccacagctcggcgaggacggctatgtcgaaggcgccgaggagcagaacgcaaagaacagtagtctcatgcagctccaaggcaatccagatcagtacgatatgccgcgaccgcagccagtagtaatcaaagcggataaagaggaggaattcgacgaggcggatctcgaattcctgcttcaatatatggctcctacgtatttgacgcccgatacactggagcaggccatggatcactttggggaattctcaactatcacgcttccgaatctactaggcaagaagttctccgcccggctgcgcgcgtatatagaagcacaggagaagacaggaagcaaagacagcggatggcaggtcgcagaaccaccgcacaagcaccggtatctgtatcttcaatctaaagccgagatatctaaagacaccaaggcaaaatccaagacagaggacaagtccgaaaaatcacccatccaagaactcatcgacgatttcctgcctagcccacaattccgtcgctggctacaaatggcgacaggctgtacgatagaaagccacgacttcatggcgaggcgcttccgtcgcggaatggactacacacttgcaacaggacacgaaggcaaacctagacttgaactcaacctcggcattacgcccacaaagggatggggcgacgaagaggagcaagacgacggtgcggacgagcaggcgagcgagaaaagcagtaaaaataagaaaaggggcaagaaacgaaagggagaagaagaagaagtcgatggcgaggtaggcgggcacgaagtctacatggcgggcgacgaagacgaagggaacgaagacgctgctatatacaaaaccaccaacgccgacgacggagacaacatcctgttcttccaggctgcggcgtggaacaggctgtctctagtccttcgcgatagtggcgcgctgcgattcgtgaagtacgttagtcgtcgtgctaagggtgatcgctgggatatatccggcacttttgaagttgaagaggaggaggatgacgaggaaggagaacaacaagaatcaaacgagatcgatccattggctgatgatacggaggaagaatggcatgggtttagtccttcagaggacagcgagtctgattaagcggcaagacaccattttcaatacctcgttgcctacattactcaaaggcgttcaaagagcatcggcgccggcgttatgccgctcctatctgatcaccatactcgttgtttattactagtcacgaattttcaaagcacgaacagtgattaaacgtaaaatgtgatctattcaataataagcctccctttctaggtgaacgactgtaatatcacatctatccccaatgctgctgtggctaacccaccactgaatccggatatgcagatgctacctatgcgccagaccagttgtctccatcctccggaacgcctggcttgccaaaaaatttcaatccaataaaccaaaatgaccccaaccccccacgatactagggggcacatgcttctacttcatgtctttgagctctttcttgcttcgagtacttacgaaggcatgctcgaggaaatgcaaccacgtctccatagccttcttatgcttcttcttctttcccttcttggatttcttgtccgtctgcaagtcactttctgcgacttcctcgtcgtcatcagtctcctcggcgaggatctcgtcttccaggacgctgttgccctttgcagaggcttgaccaatacgatgagcaaggtctacgaaacttctgacggtcaagtctttgagcttgtatagcttatcatcaaaggtggtgtattcgacctcgaagctgaactcttttggctggggtttctcgtgctgcggagttttgcccttgtgcttcccagggttccaaccactagatgatacatccttgggttcaccggtcatgtcgtcgttgatataagtcaaatttgcgtagtactgcgtgaagccggtcagggtcagggtttgggcatagtatgccggtccaggtggagtgccctttgctggaggatcagggacgtgaaggtcgggattcttaggtttcttgcccttgccccctttctttttctttttcttctcgatgtcgaactccgggtcccaacgtctcttcaactcgcgtatctcggaaatttcttcttgattttcaacgtagccactattcagggcgctagtcgaatctacccaggttgctgcgtcttccaaaccagtaatgttgtattcgaacactcgaagactggggaagtagttgggcacgatactgggaccgatgagtgagagctgatatcgctcagcatatgggccgccaaatttatctttgctcttctttttcctcttggagtcttcagagtctttactaagggcgataggattcgggagcttggcccactcgtctcgaagatctcgcagataatcggcgctagactcaatggtcaaatcgtcttccagagcttggcgggttgagactcgttcgtcgtttgcaccggtaatccatgtaaggtcaatgtccttggtgtcctgcaagagaaaatggtcgatgttcatgtgcccatacagggatccaactacgacgtcgcggtactgctgcaaccacagagtatatttctgccagcaggtttcgtcccatagctgtttgccggaggtccgagctggcggaacgtggcccatgagtatagctttcatgcctctgttgcgcataatatcgagctggacacgcagccattcgaaatgcttgtatccaggttctgagggatgggcgcaatcgtcgacgccggcgttgcggtcgaagaagtacatggtattgagactgaagacggccaatttgctcggaatgacctcgacgaagaaccatcctccgaactcgaaagagtggcgctgggcttcggggatgaagggctgccatatcttgcggtaagtgcgcagaatatcgttgggaccgggctgcagaatgttgtgagggtagatgtcgttgttgccgaatgtgggaacgacaggcacgacgaggccgtggtcgtcggagaaagtgtcgacgaatgcgtctgcgattcgacggttcatggcgatgatgtccttgtcgtggcggggtaattcttcgtcgctgtcgtggcgagccgagtcgccggtccagaccacgaaatcaatctcgtccctcaagtgctctctgacccagtccatagtcgcattgacaagcgacatgggagagtcgcaatccgacgtctcagcgccatacgtgccggcagggccatggcctcggtggcatgcgatgttttcagctgtcgaggtgtgcggtttgtagtattcgtcgggatgtagatctgcatgcgacgcgggccgggttagtgatcagaggcgtctgcatttggccttgcgcctgcgggaagcgagagggtggtgtggtgggcatacctgtgatatgtaggaaccggccgcgcaggctgcgttgcgacgaggtacctgagctggccgcggggtctttttggttcaggcgcagcgaaccaggattgcctgcctgcagaacaatttgactttctgccgtaggtgcactaagggcggatttggagaataggctcgctaccagccataatgccggttggagagctctcagagctttcattttgtgtgtgtagggattggaaggagatatttcgagggctaagagatgctctatgagctcggagcggtggaagggtaggtcgaagcatgcgatagtggtctgatagtgagagagggagtagattggcgaagtaaaagaggtagggcaggggttcaagaatgacgttatgggaataaatgaatcgagagagaatttcagaatcttaggcagttggctgataggtacgtcaagaccctatataccttagctctgcagagactattttagtatacgttggtgatcatcgagggcctgacactttgttgcagcctgttggctgccgggctgacttaagtttttcttctccgatgttgcgttggacggttgcttttcaacctttccaacggcacctggactggaccgctgctactggtcaagtatgagggtgcctagaaaagacgggagactcgatcatatggctagcgggatgtggccaccaaggtcctcaattccataaaatattttccaagtcgcatcagtagacccttagatgtggcggttcgtgtatgggaatcgccagaggcagcgcacacagtgatgacttcgctttttaatcggtgtgtatcgtcttatggtcactgacttgaacaggcggacgaggtatcaggtggtgtctattctcttgaggtatcgactgcacgctgtaagtatgatttgaccgtgggggtttcagcattggttttcggaaaaagaaagtgaggcgatcgccctcagctcgtccaactggcttattcgcaaacgagcccagacgagtctcgaatggaaacgagcagcaatgcattttcc

SEQ ID NO: 11646 - DNA, 1452 bp, Muscodor strobelii
  misc_feature: SGI cDNA ID NO. 563748
  misc_feature: Encodes the peptide sequence at SEQ ID NO 11647
atggcctctaagcgctcgcgagcccggaggctcactttcatgatattcacatctgtattcctatcactcgcatacttcttcatatacaaaccgcggatattatcaaagcgacaatcttcagttatcccttatcacgacgactcgattacttgtcccaaatcgccacttttagacgatgtcttcgtggttcttcgaacaggggctactgagactcaggagaagcttcccgttcacttcaagacgatactggcatgcgtaccagattttatcatttattcagatatggatgagattgtcgacgggcatcaagtttatgatgtgctcaatgatatgaacgcaacgatacaatcaatggctccagaattcgcgctgtatcatcatctcaaaaccagagggcgcgatgggctgaactatcagacttcgaatgggggcggtccgtcagggtcgttggataatcctggctggaaattggacaaatggaagttctttcctatggtggacaaggtggtacaacaacgaccaaaagcgtcttggtacatctttatcgaagcagacacatatatggtctggaccaatgtgcttgaatatctttcgaatcttgatcctaagaaagaccattacattggaagacatatgtaccacaaagaaattttgttcggtcatggaggatcaggtttcgtactatcaaggccagccgcccagaaggtgtcaaaatattggaaggatcatcaaaccgagctcgatctggagatgctgaaaggatgggctggagacttcatgctaggaaaagtgatgaggaaactgaagatccctatgctctggggttatcctcactttcagggcgacagtctaacctcaatcgattgggccatcgaaaagttggagaggcaaacttggtgctatgcggcaatgactttccaccacatgagtccatcggaattcgcgatgctttggcagtacgagcaactgtggcaccaaaggaatccttccaaatcttctctccgttttcgcgatatatttcacaacctaattcggcatcgactcagagacgagcgagacgaatgggataacatctccgttgggcacacctacagcaaagaagcactggacaagatgtccgaggacagaaaagatcaactgacacttatggaacaaaacgcccaccattcgctcgagatgtgtaaggcgacatgccatgcgaagccggactgtatacaattctcgttccagcccggaatatgcgcgctttccgaacaactgcgacttggacactcagcacagtcacaatgtctcgagtattccaacgctgccgggaaatgcattaaggcagttccagtagagaatcaaatgactgtaaaatcaggctggatgatggacagagttccacgatgggcagaaaagttggataagttatgcgacaaccctgaaggtaacgactggattcttgcctga

SEQ ID NO: 11647 - protein, 483 aa, Muscodor strobelii
  misc_feature: SGI Peptide ID NO. 563748
  misc_feature (11)..(482): NCBI GI: 169606410 Blast Desc: SNOG_06243 [Phaeosphaeria nodorum SN15] gi|111064954|gb|EAT86074.1| SNOG_06243 [Phaeosphaeria nodorum SN15]
  misc_feature (11)..(472): NCBI GI: 169616260 Blast Desc: SNOG_11300 [Phaeosphaeria nodorum SN15] gi|111059888|gb|EAT81008.1| SNOG_11300 [Phaeosphaeria nodorum SN15]
  misc_feature (14)..(472): NCBI GI: 189197651 Blast Desc: conserved [Pyrenophora tritici-repentis Pt-1C-BFP] gi|187981111|gb|EDU47737.1| conserved [Pyrenophora tritici-repentis Pt-1C-BFP]
  misc_feature (5)..(475): NCBI GI: 121704282 Blast Desc: conserved [Aspergillus clavatus NRRL 1] gi|119398549|gb|EAW08979.1| conserved [Aspergillus clavatus NRRL 1]
  misc_feature (57)..(468): NCBI GI: 240110133 Blast Desc: CPC735_061650 [Coccidioides posadasii C735 delta SOWgp]
  misc_feature (5)..(482): NCBI GI: 70981442 Blast Desc: conserved [Aspergillus fumigatus Af293] gi|66843872|gb|EAL84213.1| conserved [Aspergillus fumigatus Af293]
  misc_feature (7)..(423): NCBI GI: 115385138 Blast Desc: conserved [Aspergillus terreus NIH2624] gi|114196808|gb|EAU38508.1| conserved [Aspergillus terreus NIH2624]
  misc_feature (5)..(482): NCBI GI: 159122724 Blast Desc: conserved [Aspergillus fumigatus A1163]
  misc_feature (7)..(476): NCBI GI: 119492909 Blast Desc: NFIA_070030 [Neosartorya fischeri NRRL 181] gi|119411889|gb|EAW21832.1| conserved [Neosartorya fischeri NRRL 181]
  misc_feature (7)..(476): NCBI GI: 159127898 Blast Desc: conserved [Aspergillus fumigatus A1163]
MASKRSRARRLTFMIFTSVFLSLAYFFIYKPRILSKRQSSVIPYHDDSITCPKSPLLDDVFVVLRTGATETQEKLPVHFKTILACVPDFIIYSDMDEIVDGHQVYDVLNDMNATIQSMAPEFALYHHLKTRGRDGLNYQTSNGGGPSGSLDNPGWKLDKWKFFPMVDKVVQQRPKASWYIFIEADTYMVWTNVLEYLSNLDPKKDHYIGRHMYHKEILFGHGGSGFVLSRPAAQKVSKYWKDHQTELDLEMLKGWAGDFMLGKVMRKLKIPMLWGYPHFQGDSLTSIDWAIEKLERQTWCYAAMTFHHMSPSEFAMLWQYEQLWHQRNPSKSSLRFRDIFHNLIRHRLRDERDEWDNISVGHTYSKEALDKMSEDRKDQLTLMEQNAHHSLEMCKATCHAKPDCIQFSFQPGICALSEQLRLGHSAQSQCLEYSNAAGKCIKAVPVENQMTVKSGWMMDRVPRWAEKLDKLCDNPEGNDWILA

SEQ ID NO: 11648 - DNA, 2118 bp, Muscodor strobelii
  misc_feature: SGI EST ID NO. CUFF.27671.0
  misc_feature: Variant of the nucleotide sequence at SEQ ID NO 11646
gtcggaagtgatgaatctgctgcatcgtcgtcgttgtctggtcctcgatttttgacgaagtgacagagcaacctgcctcttcattcctacattgttacaaacgttgtttggggcgtaacctaaaatcagggtagcgtccaattggatccgagaatcgtcggccaccttaaatctgcaaccaacgttaaacctaacctcataactagctacctacttaattagcaaaggacaggcccaaccaaaattgtctggaccatgagtacgacgcactcatcgttgccgttggactgatgaacttcattgggctcacaactatgcggctcggcggaaatgcgctgaactgctcgagacatacgttttggactgatgtgaacgtggacaaggcttaagttcagctacaattaatcataagccttgacgatttgtcttcaacgttgtggcggcaatggcctctaagcgctcgcgagcccggaggctcactttcatgatattcacatctgtattcctatcactcgcatacttcttcatatacaaaccgcggatattatcaaagcgacaatcttcagttatcccttatcacgacgactcgattacttgtcccaaatcgccacttttagacgatgtcttcgtggttcttcgaacaggggctactgagactcaggagaagcttcccgttcacttcaagacgatactggcatgcgtaccagattttatcatttattcagatatggatgagattgtcgacgggcatcaagtttatgatgtgctcaatgatatgaacgcaacgatacaatcaatggctccagaattcgcgctgtatcatcatctcaaaaccagagggcgcgatgggctgaactatcagacttcgaatgggggcggtccgtcagggtcgttggataatcctggctggaaattggacaaatggaagttctttcctatggtggacaaggtggtacaacaacgaccaaaagcgtcttggtacatctttatcgaagcagacacatatatggtctggaccaatgtgcttgaatatctttcgaatcttgatcctaagaaagaccattacattggaagacatatgtaccacaaagaaattttgttcggtcatggaggatcaggtttcgtactatcaaggccagccgcccagaaggtgtcaaaatattggaaggatcatcaaaccgagctcgatctggagatgctgaaaggatgggctggagacttcatgctaggaaaagtgatgaggaaactgaagatccctatgctctggggttatcctcactttcagggcgacagtctaacctcaatcgattgggccatcgaaaagttggagaggcaaacttggtgctatgcggcaatgactttccaccacatgagtccatcggaattcgcgatgctttggcagtacgagcaactgtggcaccaaaggaatccttccaaatcttctctccgttttcgcgatatatttcacaacctaattcggcatcgactcagagacgagcgagacgaatgggataacatctccgttgggcacacctacagcaaagaagcactggacaagatgtccgaggacagaaaagatcaactgacacttatggaacaaaacgcccaccattcgctcgagatgtgtaaggcgacatgccatgcgaagccggactgtatacaattctcgttccagcccggaatatgcgcgctttccgaacaactgcgacttggacactcagcacagtcacaatgtctcgagtattccaacgctgccgggaaatgcattaaggcagttccagtagagaatcaaatgactgtaaaatcaggctggatgatggacagagttccacgatgggcagaaaagttggataagttatgcgacaaccctgaaggtaacgactggattcttgcctgagttgtcttttgctattgtggtcaaacatactaaaacataaatgacgatcgaacattcttgtattactatcatatacgagtattagagtttggaaccccttttcgtgtaaacggttcacgacacagcaagtatgtacataggtagcgcaatatatgaaaaagtaaagagcaactacactacgatttaaccgtcccactgaatttttcacgctcagatcttag

SEQ ID NO: 11649 - DNA, 1200 bp, Muscodor strobelii
  misc_feature: SGI cDNA ID NO. 563749
  misc_feature: Encodes the peptide sequence at SEQ ID NO 11650
atgaccgacttcgatatcgagagcgtgagatctaagttccctgcgctgagcgtagaggaccaagtcttctttgacaacgccggcggaagtcaggcactcggcagtgtgatcgatgatatccgtgactatctatctaaaacgaatgtgcagcttggcgcaagttacaagacaggcaagctttcgacagcgaggtatgatgaaggcaaagctgctggcgcaaaatatgtcaatgctgacgattctgaagttgtattcgggccctccacaacacagctatttcgcaacatatccttcacactctctttcgatgaaggcgacgagattatagtgtccaacatggaccacgaggccaatattgccccatgggtcgatctagctgaacgacaaaaactgaagctaatctggtggacaccaccattcgaatcagagtcggaaccagttaccccatctttatctcagcttctctcgccgcgaactcgtctggtcagttgcacacacgcaagcaacatcctcggtagcatcataccgattaaggacatagtcgcgaccgtgcgtgccgggccatcgcccgacgcacttgttgccgtcgacggagtatcatacgcaccgcaccgacctatcgacgttcgagcactcggcatcgatttctacgcgttttcatggtacaaggtctatggaccgcatatcgcgatggcgtacgcgagcccacgcggtcttgctgcaatgaggtcactgggacatttcttcaacaagcacagcacccttgagcaaaagattggcctcgcgggcgcttcctacgagctcatagctgcgattccaagcgtcgtggcgtatctgactgctacttcatggacctctatggttgctcatgaacaagttctacaaattacgctcttgaaatatctcacgtcacgtgccgatataacgatttatggtgacacaacaggagcgtcagatgcacgagtttccacaatcagcttcaaagtagcgggttgggcgtcgaatgaagtggtcgtggcattagatgaacatacgaatttcggtgtacgatggggcctgttttattcagatcgccttggtaaggatgttctgggtcttggcgatgatggtgtggtgagagttagtatggtacattacaataccttggacgaggtgaagagattcatcgacgagtttgagaaggtcatccctaagaggtag

SEQ ID NO: 11650 - protein, 399 aa, Muscodor strobelii
  misc_feature: SGI Peptide ID NO. 563749
  misc_feature (22)..(388): Pfam Id: PF00266 Pfam Desc: Aminotransferase class-V
  misc_feature (22)..(227): Pfam Id: PF00266 Pfam Desc: Aminotransferase class-V
  misc_feature (278)..(388): Pfam Id: PF00266 Pfam Desc: Aminotransferase class-V
  misc_feature (1)..(396): NCBI GI: 256730045 Blast Desc: NECHADRAFT_94964 [Nectria haematococca mpVI 77-13-4]
  misc_feature (4)..(399): NCBI GI: 39945524 Blast Desc: MGG_04744 [Magnaporthe grisea 70-15] gi|145021370|gb|EDK05499.1| MGG_04744 [Magnaporthe grisea 70-15]
  misc_feature (1)..(398): NCBI GI: 154319149 Blast Desc: BC1G_02526 [Botryotinia fuckeliana B05.10] gi|150856957|gb|EDN32149.1| BC1G_02526 [Botryotinia fuckeliana B05.10]
  misc_feature (1)..(398): NCBI GI: 156063456 Blast Desc: SS1G_01846 [Sclerotinia sclerotiorum 1980] gi|154697180|gb|EDN96918.1| SS1G_01846 [Sclerotinia sclerotiorum 1980]
  misc_feature (4)..(381): NCBI GI: 116192423 Blast Desc: CHGG_05929 [Chaetomium globosum CBS 148.51] gi|88181842|gb|EAQ89310.1| CHGG_05929 [Chaetomium globosum CBS 148.51]
  misc_feature (4)..(398): NCBI GI: 169613274 Blast Desc: SNOG_09767 [Phaeosphaeria nodorum SN15] gi|160702688|gb|EAT83032.2| SNOG_09767 [Phaeosphaeria nodorum SN15]
  misc_feature (5)..(399): NCBI GI: 46114352 Blast Desc: FG03018.1 [Gibberella zeae PH-1]
  misc_feature (2)..(396): NCBI GI: 46138957 Blast Desc: FG10993.1 [Gibberella zeae PH-1]
  misc_feature (4)..(396): NCBI GI: 115386790 Blast Desc: [Aspergillus terreus NIH2624] gi|114190934|gb|EAU32634.1| [Aspergillus terreus NIH2624]
  misc_feature (4)..(396): NCBI GI: 169778765 Blast Desc: [Aspergillus oryzae RIB40] gi|83772586|dbj|BAE62714.1| protein product [Aspergillus oryzae]
  misc_feature (3)..(395): SWISSPROT Homolog: EC 4.4.1.16 Selenocysteine lyase
  misc_feature (3)..(395): SWISSPROT Homolog: EC 2.8.1.7 Cysteine desulfurase
MTDFDIESVRSKFPALSVEDQVFFDNAGGSQALGSVIDDIRDYLSKTNVQLGASYKTGKLSTARYDEGKAAGAKYVNADDSEVVFGPSTTQLFRNISFTLSFDEGDEIIVSNMDHEANIAPWVDLAERQKLKLIWWTPPFESESEPVTPSLSQLLSPRTRLVSCTHASNILGSIIPIKDIVATVRAGPSPDALVAVDGVSYAPHRPIDVRALGIDFYAFSWYKVYGPHIAMAYASPRGLAAMRSLGHFFNKHSTLEQKIGLAGASYELIAAIPSVVAYLTATSWTSMVAHEQVLQITLLKYLTSRADITIYGDTTGASDARVSTISFKVAGWASNEVVVALDEHTNFGVRWGLFYSDRLGKDVLGLGDDGVVRVSMVHYNTLDEVKRFIDEFEKVIPKR

SEQ ID NO: 11651 - DNA, 1641 bp, Muscodor strobelii
  misc_feature: SGI EST ID NO. CUFF.27674.0
  misc_feature: Variant of the nucleotide sequence at SEQ ID NO 11649
acgacaaataccaccaaccccaaatcaacaggagcttaatacttcgcgtcacctttttttccctatagatcatctcacacaagaatacaagaggctgttcgcagttcaaatatccaagaattcgactctccaggccgaagccaataaagcttgtgtatcagcgagtgttcggagaattgcccgactcttacgtatctcgtctctcagctattttgtatcgtgccaaagtccaagagaatctcaaccgagagcaatttcccatcatgaccgacttcgatatcgagagcgtgagatctaagttccctgcgctgagcgtagaggaccaagtcttctttgacaacgccggcggaagtcaggcactcggcagtgtgatcgatgatatccgtgactatctatctaaaacgaatgtgcagcttggcgcaagttacaagacaggcaagctttcgacagcgaggtatgatgaaggcaaagctgctggcgcaaaatatgtcaatgctgacgattctgaagttgtattcgggccctccacaacacagctatttcgcaacatatccttcacactctctttcgatgaaggcgacgagattatagtgtccaacatggaccacgaggccaatattgccccatgggtcgatctagctgaacgacaaaaactgaagctaatctggtggacaccaccattcgaatcagagtcggaaccagttaccccatctttatctcagcttctctcgccgcgaactcgtctggtcagttgcacacacgcaagcaacatcctcggtagcatcataccgattaaggacatagtcgcgaccgtgcgtgccgggccatcgcccgacgcacttgttgccgtcgacggagtatcatacgcaccgcaccgacctatcgacgttcgagcactcggcatcgatttctacgcgttttcatggtacaaggtctatggaccgcatatcgcgatggcgtacgcgagcccacgcggtcttgctgcaatgaggtcactgggacatttcttcaacaagcacagcacccttgagcaaaagattggcctcgcgggcgcttcctacgagctcatagctgcgattccaagcgtcgtggcgtatctgactgctacttcatggacctctatggttgctcatgaacaagttctacaaattacgctcttgaaatatctcacgtcacgtgccgatataacgatttatggtgacacaacaggagcgtcagatgcacgagtttccacaatcagcttcaaagtagcgggttgggcgtcgaatgaagtggtcgtggcattagatgaacatacgaatttcggtgtacgatggggcctgttttattcagatcgccttggtaaggatgttctgggtcttggcgatgatggtgtggtgagagttagtatggtacattacaataccttggacgaggtgaagagattcatcgacgagtttgagaaggtcatccctaagaggtagatgtatgttgttcggactggactgattgctagcgatgattgctagtttagatccgaattaacattagataatggcctcagatttgtgctgagtatttctattctatagttctccgagatttagactaaagatgcgatgaattgatcagaggatgacctctatctacgacttcgagcaa

SEQ ID NO: 11652 - DNA, 1056 bp, Muscodor strobelii
  misc_feature: SGI cDNA ID NO. 563750
  misc_feature: Reduced expression when VOC is produced
  misc_feature: Encodes the peptide sequence at SEQ ID NO 11653
atgtctctcccatactcctttgcgactgtgcctatcacaagcgatatcaccatcaacgtttcacggttccatgaggattccatcaccgatgaaacgaagcaggtctctgctgctataatggatggaatgagcaaagatcctctctggtacgacattggagctcgacgatatgatgagctgtatgaacagggcaagctgagtgtgcttcccgcacctgtatatctgcctggagcaaaagatgaagtgatcccttcgagagagactggtcgcgatatacctgtcagagtctatgtcccggacaatggacagcctagcaggggtctagtccaacacatgcatggaggaggctacacgttgttctcacataggcataacgatgggactcttcaggcatatgccaacgcttgccaagttaccacgatatcggttgggtatcgactagctcctgagcatccatttcccgccggaaaagaagactgtatcgacgttgcagaatacttggttgatcacggcgaagagagatatggtgctaaactgctcttcatcactggagaatcagctggcgctcatatgacgataatgtcaactttcgccctcatccgatctcgccccaactttagtctaaggggtataatctgtccctatggccaatattccaccgcgatgagtctgccttccatggttggatatgagaagctattggtcatcaacgaagctgtcgtagatgcatttcaggaggcctatacccccggctggaccataaagcagcgtcaacgtcccgacttgtttcctctttacgatgacattccgggcttggcagcatcgacaccatcgagaaggctccctcccgctctttttatctgcggaactgaggatccgcttcttgatgatacgctactgatgggtgtgaagtggatggcaactggcagtgagggaattgttaaaattgctcccggtggtcctcatgcttgcaccgtgggggatacggcaatggcgaaagaactagtcgggtatcaactggaatttttcaagtacaagatgggagagatagagtag

SEQ ID NO: 11653 - protein, 351 aa, Muscodor strobelii
  misc_feature: SGI Peptide ID NO. 563750
  misc_feature (109)..(326): Pfam Id: PF07859 Pfam Desc: alpha/beta hydrolase fold
  misc_feature (10)..(350): NCBI GI: 171693167 Blast Desc: protein product [Podospora anserina] gi|170946532|emb|CAP73333.1| protein product [Podospora anserina]
  misc_feature (10)..(349): NCBI GI: 255956093 Blast Desc: Pc21g18040 [Penicillium chrysogenum Wisconsin 54-1255] gi|211590510|emb|CAP96701.1| Pc21g18040 [Penicillium chrysogenum Wisconsin 54-1255]
  misc_feature (10)..(349): NCBI GI: 115388271 Blast Desc: [Aspergillus terreus NIH2624] gi|114195725|gb|EAU37425.1| [Aspergillus terreus NIH2624]
  misc_feature (10)..(347): NCBI GI: 238844398 Blast Desc: alpha/beta hydrolase fold-3 domain-containing protein [Microsporum canis CBS 113480]
  misc_feature (12)..(323): NCBI GI: 169611885 Blast Desc: SNOG_09057 [Phaeosphaeria nodorum SN15] gi|111062129|gb|EAT83249.1| SNOG_09057 [Phaeosphaeria nodorum SN15]
  misc_feature (8)..(348): NCBI GI: 189190132 Blast Desc: esterase/lipase/thioesterase [Pyrenophora tritici-repentis Pt-1C-BFP] gi|187973011|gb|EDU40510.1| esterase/lipase/thioesterase [Pyrenophora tritici-repentis
  misc_feature (10)..(323): NCBI GI: 156052110 Blast Desc: SS1G_07463 [Sclerotinia sclerotiorum 1980] gi|154705240|gb|EDO04979.1| SS1G_07463 [Sclerotinia sclerotiorum 1980]
  misc_feature (14)..(347): NCBI GI: 240109080 Blast Desc: CPC735_025850 [Coccidioides posadasii C735 delta SOWgp]
  misc_feature (12)..(347): NCBI GI: 119181859 Blast Desc: [Coccidioides immitis RS]
  misc_feature (14)..(322): NCBI GI: 258572166 Blast Desc: [Uncinocarpus reesii 1704] gi|237905115|gb|EEP79516.1| [Uncinocarpus reesii 1704]
  misc_feature: Useful for introducing or modulating the production of volatile compounds
MSLPYSFATVPITSDITINVSRFHEDSITDETKQVSAAIMDGMSKDPLWYDIGARRYDELYEQGKLSVLPAPVYLPGAKDEVIPSRETGRDIPVRVYVPDNGQPSRGLVQHMHGGGYTLFSHRHNDGTLQAYANACQVTTISVGYRLAPEHPFPAGKEDCIDVAEYLVDHGEERYGAKLLFITGESAGAHMTIMSTFALIRSRPNFSLRGIICPYGQYSTAMSLPSMVGYEKLLVINEAVVDAFQEAYTPGWTIKQRQRPDLFPLYDDIPGLAASTPSRRLPPALFICGTEDPLLDDTLLMGVKWMATGSEGIVKIAPGGPHACTVGDTAMAKELVGYQLEFFKYKMGEIE

SEQ ID NO: 11654 - DNA, 2441 bp, Muscodor strobelii
  misc_feature: SGI EST ID NO. CUFF.27690.0
  misc_feature: Variant of the nucleotide sequence at SEQ ID NO 11652
tttggattttgtctaactgcagctatgttgagaatgaatcgtcgtcacaatagtgtctgtgactatcactttgattcttaagttccggagagggattttaaagatattgaaattatgcaaacactgtggtcttattgcaacggtagcaatgtatcatacagacaccgaaccctgccgggtagaacgtgaaatatttgctgaccatatcgtagctgcttcttgtatgaagtcagacgcaattaaatgggataggtagttgtgtgtcaagatggctaggtagataattagaaggattcgatggaggctgaactccgccgattatgcgaggctcggcgtgagtcactcggattcggcgacgagcaaatcttattttcccaacaggcaaagtgcaatgaaagacacgcaatgatgcgcctagatataccacggatgtccacggcgaagatcaaagcacgtgatcacgcgaatacactgttaaactcgtgttgaactcaacgcgcattaaggcgcgctgtgcctcatcccctgggtccccactagcccaggttggaatatctgcgagactccgagaggatcaagagacatcatcaccaagtttgttgtcatgtcggtcaacagtacgctaattatcgttcgacatccgtagtactatgataacaacatgacagatcaagacgatcctctgggagatcggagttttgattttgtccgcgtgtcgcagtcatccatcttagtataggcaagttggtggacaggagttctataagatggctacaacatccatagagctcgttcaaaaactcctcatccatcgcagataccgataataagcctcaaatcaaaaatatcttcttacaatgtctctcccatactcctttgcgactgtgcctatcacaagcgatatcaccatcaacgtttcacggttccatgaggattccatcaccgatgaaacgaagcaggtctctgctgctataatggatggaatgagcaaagatcctctctggtacgacattggagctcgacgatatgatgagctgtatgaacagggcaagctgagtgtgcttcccgcacctggtaataatgtttgaaactctgttgttgtttatataagtctcacacatcgtattctagtatatctgcctggagcaaaagatgaagtgatcccttcgagagagactggtcgcgatatacctgtcagagtctatgtcccggacaatggacagcctagcaggggtctagtccaacacatgcatggaggaggctacacgttgttctcacataggcataacgatgggactcttcaggcatatgccaacgcttgccaagttaccacgatatcggttgggtatcgactagctcctgagcatccatttcccgccggaaaagaagactgtatcgacgttgcagaatacttggttgatcacggcgaagagagatatggtgctaaactgctcttcatcactggagaatcagctggcgctcatatgacgataatgtcaactttcgccctcatccgatctcgccccaactttagtctaaggggtataatctgtccctatggccaatattccaccgcgatgagtctgccttccatggttggatatgagaagctattggtcatcaacgaagctgtcgtagatgcatttcaggaggcctatacccccggctggaccataaagcagcgtcaacgtcccgacttgtttcctctttacgatgacattccgggcttggcagcatcgacaccatcgagaaggctccctcccgctctttttatctgcggaactgaggatccgcttcttgatgatacgctactgatgggtgtgaagtggatggcaactggcagtgagggaattgttaaaattgctcccggtggtcctcatgcttgcaccgtgggggatacggcaatggcgaaagaactagtcgggtatcaactggaatttttcaagtacaagatgggagagatagagtagaaggatccaatagctcagattttatattgttatcgtcacactgagcggaacgattcaagattgtcaatagatatagcggcagtattattaataaaaaagcaattggcttgaaaattactgggatccgagaagtctgcagccaagccacattcgtaaaacgaagcgtgtgttaatagtcctatgcttcagtagcatgatacatcaagactctaggtcgagcagggttaaggtcagagttagggatacaaaccaaagcaccctcatctatttgtttgaagaaatggggtcgaagagaatgactatacgaacattgatcctgtatcagtagaaatgcaggccaacaggatctctcttatcaatccgtacgttcacgcgcgtatctatacgccaccggcaggaagggtatattacatggattccaaagactaatgactcaaaatgcagtctgtcagcgcattatgtagacataaa

SEQ ID NO: 11655 - DNA, 591 bp, Muscodor strobelii
  misc_feature: SGI cDNA ID NO. 563751
  misc_feature: Encodes the peptide sequence at SEQ ID NO 11656
atgttatttcgcaagtccctagttccggcctcagctgtagcgttggcgagctcctttgctgctgctgccagtccacccccttccggtttggcgaagcaaccgcagactccgatactaggcaaccaagcacctaatggtacattgatctacttgcgctgcaattatgatagttccgacagctggtttgagtacggggctggttatgtctcaatgagctacacgaacggaaacccgaataacatcccttacgcaacatgttcttatgcgagtcaaaagagttactttgccaacaaattccaggtcctcactggagagggaggtttatttcaactacttgtggtcgagggtggatcccaaactacacaagtaaagggccgaaagcttcattttggtggagacttcgtagactaccaagtagccaaagatgagagcgagtacaacatgtgggtgaaaccaaacgggagactcgtgtttgccaatgggaatagggaggtctacttcgacgatcgtacaggcaatgacgagttcatcagactgaacttcaagaacaatgggaagatcatcaacgtctcggctgaaccagcaaattaa

SEQ ID NO: 11656 - protein, 196 aa, Muscodor strobelii
  misc_feature: SGI Peptide ID NO. 563751
MLFRKSLVPASAVALASSFAAAASPPPSGLAKQPQTPILGNQAPNGTLIYLRCNYDSSDSWFEYGAGYVSMSYTNGNPNNIPYATCSYASQKSYFANKFQVLTGEGGLFQLLVVEGGSQTTQVKGRKLHFGGDFVDYQVAKDESEYNMWVKPNGRLVFANGNREVYFDDRTGNDEFIRLNFKNNGKIINVSAEPAN

SEQ ID NO: 11657 - DNA, 1713 bp, Muscodor strobelii
  misc_feature: SGI cDNA ID NO. 563752
  misc_feature: Reduced expression when VOC is produced
  misc_feature: Encodes the peptide sequence at SEQ ID NO 11658
atggccagctcgcttgtagacctcatcgcggctctgcccgacggcgatggatggggccctcagaccacggccgagacgaccctgcacggcgttccctatgcgcccttctccaaaggcgacaagctcggccgcatggctgactggaccgccgacagcaaagatggcagagacggacgcggcggaagacagcaatacaaccgcaactacagagaccagcagatttacggcgccggtagtgccgcgctcttcactgcccccgtagccgaggacgagaacaccttctccgttgtcagccgagaacccaccaagacgagatacggacgtggtgccgtcttcacccgtggccgtggccaacgaggcgcagcccagggcggccgcggtcgcgctacgttacagcgctctacccgtggtggtcaacagggctacggttacgacagccgcggagggcgttctaatgccccgcgaggtcgtcgctttggctggaaggactacgacaagcctgcgcgaaaccgcgatgcttccatcaacgtcaagcccgagtggcagctgctcgaggagatcgacttcaaccgcctgggcaagctcaacctcgacgctgatgagggcgaggatatcgacagctacggtttcctctatcactacgacagatctttcgacaagccccctgtcaagtcggccgagagaagactccaggcattggaccgtgccacctacaatgtcaccactacatctgaccccgtcattcaggagcttgctgagcgggacgaggccaccatcttcgctacagacagtatcctgtcgatgcttatgtgttcgacgaggtcggtctatccctgggacatggtcatcgtcaggcaaggcagcaagatcttccttgacaagcgcgacaatgctactttggacatggtgacagtaaatgaaaatgctgccgatgctccgttagaagcttccgatggtgccaaggatggcatcaaccagcccgctgctcttgctgaggaagccacttatattaatcacaacttctctaaccaggtagtcttggagaataactcctccaaggtggacatggccaatgagaacccgttctacaaccccagcgaggagaccgagcctcctgccagcaaagcttacaagtaccgcaagtttgacttgtccacaacggaggaggagccgatgtacctcgttgttcgaacggagatcgatgccgtccagaagaacgccatcaacggcgaagaccagcatatcaccgtcaaagcactcaacgagttcgatagcaaggctcaaggtagcggtggcgcgctggactggagatccaagctggtgagccagcgtggtgccgtcgtggctacagagatgaagaacaacagcgtcaaacttgcccgctggacggtacagagtatccttgccaaggctgatgttatgaaacttggattcgtctcccgtgcaaacccgaagaacaacgacaagcatgtcatattgggcgtcataggctggaagcctagggacttcgctaatcaaatgaatctgtccctgtccaacggctggggcattgttcgcactatcgtcgatatgtgtctgaagcgagaggagggcaagtttgtccttgtcaaagaccccaacaaggcgatcctccgcttgtacgaggtacctgctggaagcttcgatgacgacgatgatgaatctgtcggggagctggaggccgtggaagagtga

SEQ ID NO: 11658 - protein, 570 aa, Muscodor strobelii
  misc_feature: SGI Peptide ID NO. 563752
  misc_feature (7)..(570): Pfam Id: PF05091 Pfam Desc: Eukaryotic translation initiation factor 3 subunit 7 (eIF-3)
  misc_feature (16)..(570): Pfam Id: PF05091 Pfam Desc: Eukaryotic translation initiation factor 3 subunit 7 (eIF-3)
  misc_feature (4)..(570): NCBI GI: 156032481 Blast Desc: SS1G_13938 [Sclerotinia sclerotiorum 1980] gi|238686688|sp|A7F8K7.1|EIF3D_SCLS1 RecName: Full=Eukaryotic translation initiation factor 3 subunit D; Short=eIF3d SS1G_13938
  misc_feature (1)..(570): NCBI GI: 39975025 Blast Desc: MGG_00341 [Magnaporthe grisea 70-15] gi|223635157|sp|A4RFH6.1|EIF3D_MAGGR RecName: Full=Eukaryotic translation initiation factor 3 subunit D; Short=eIF3d MGG_00341
  misc_feature (4)..(570): NCBI GI: 229488262 Blast Desc: MGG_00341 [Magnaporthe grisea 70-15] gi|223635157|sp|A4RFH6.1|EIF3D_MAGGR RecName: Full=Eukaryotic translation initiation factor 3 subunit D; Short=eIF3d MGG_00341
  misc_feature (3)..(560): NCBI GI: 85091379 Blast Desc: eukaryotic translation initiation factor 3 [Neurospora crassa OR74A] gi|74615107|sp|Q7S2I2.1|EIF3D_NEUCR RecName: Full=Eukaryotic translation initiation factor 3 subunit D; factor
  misc_feature (3)..(570): NCBI GI: 116192519 Blast Desc: CHGG_05977 [Chaetomium globosum CBS 148.51] gi|121786079|sp|Q2H5T8.1|EIF3D_CHAGB RecName: Full=Eukaryotic translation initiation factor 3 subunit D; Short=eIF3d CHGG_05977
  misc_feature (3)..(570): NCBI GI: 171684603 Blast Desc: protein product [Podospora anserina] gi|170942262|emb|CAP67914.1| protein product [Podospora anserina]
  misc_feature (6)..(558): NCBI GI: 261357516 Blast Desc: eukaryotic translation initiation factor 3 subunit D [Verticillium albo-atrum VaMs.102]
  misc_feature (4)..(570): NCBI GI: 154296135 Blast Desc: translation initiation factor eIF3 [Botryotinia fuckeliana B05.10] gi|150843758|gb|EDN18951.1| translation initiation factor eIF3 [Botryotinia fuckeliana B05.10]
  misc_feature (1)..(554): NCBI GI: 46108864 Blast Desc: FG01314.1 [Gibberella zeae PH-1]
  misc_feature (1)..(554): NCBI GI: 256735027 Blast Desc: [Nectria haematococca mpVI 77-13-4]
  misc_feature: Useful for introducing or modulating the production of volatile compounds
MASSLVDLIAALPDGDGWGPQTTAETTLHGVPYAPFSKGDKLGRMADWTADSKDGRDGRGGRQQYNRNYRDQQIYGAGSAALFTAPVAEDENTFSVVSREPTKTRYGRGAVFTRGRGQRGAAQGGRGRATLQRSTRGGQQGYGYDSRGGRSNAPRGRRFGWKDYDKPARNRDASINVKPEWQLLEEIDFNRLGKLNLDADEGEDIDSYGFLYHYDRSFDKPPVKSAERRLQALDRATYNVTTTSDPVIQELAERDEATIFATDSILSMLMCSTRSVYPWDMVIVRQGSKIFLDKRDNATLDMVTVNENAADAPLEASDGAKDGINQPAALAEEATYINHNFSNQVVLENNSSKVDMANENPFYNPSEETEPPASKAYKYRKFDLSTTEEEPMYLVVRTEIDAVQKNAINGEDQHITVKALNEFDSKAQGSGGALDWRSKLVSQRGAVVATEMKNNSVKLARWTVQSILAKADVMKLGFVSRANPKNNDKHVILGVIGWKPRDFANQMNLSLSNGWGIVRTIVDMCLKREEGKFVLVKDPNKAILRLYEVPAGSFDDDDDESVGELEAVEE

SEQ ID NO: 11659 - DNA, 2034 bp, Muscodor strobelii
  misc_feature: SGI EST ID NO. CUFF.27695.0
  misc_feature: Variant of the nucleotide sequence at SEQ ID NO 11657
ctggcgatacgcaaatttcgcttctacggccttttcgagactacaatcgtcagcgacagcgcgcaatctacccgacagtacgtgttcaacatggccagctcgcttgtagacctcatcgcggctctgcccgacggcgatggatggggccctcagaccacggccgagacgaccctgcacggcgttccctatgcgcccttctccaaaggcgacaagctcggccgcatggctgactggaccgccgacagcaaagatggcagagacggacgcggcggaagacagcaatacaaccgcaactacagagaccagcagatttacggcgccggtagtgccgcgctcttcactgcccccgtagccgaggacgagaacaccttctccgttgtcagccgagaacccaccaagacgagatacggacgtggtgccgtcttcacccgtggccgtggccaacgaggcgcagcccagggcggccgcggtcgcgctacgttacagcgctctacccgtggtggtcaacagggctacggttacgacagccgcggagggcgttctaatgccccgcgaggtcgtcgctttggctggaaggactacgacaagcctgcgcgaaaccgcgatgcttccatcaacgtcaagcccgagtggcagctgctcgaggagatcgacttcaaccgcctgggcaagctcaacctcgacgctgatgagggcgaggatatcgacagctacggtttcctctatcactacgacagatctttcgacaagccccctgtcaagtcggccgagagaagactccaggcattggaccgtgccacctacaatgtcaccactacatctgaccccgtcattcaggagcttgctgagcgggacgaggccaccatcttcgctacagacagtatcctgtcgatgcttatgtgttcgacgaggtcggtctatccctgggacatggtcatcgtcaggcaaggcagcaagatcttccttgacaagcgcgacaatgctactttggacatggtgacagtaaatgaaaatgctgccgatgctccgttagaagcttccgatggtgccaaggatggcatcaaccagcccgctgctcttgctgaggaagccacttatattaatcacaacttctctaaccaggtagtcttggagaataactcctccaaggtggacatggccaatgagaacccgttctacaaccccagcgaggagaccgagcctcctgccagcaaagcttacaagtaccgcaagtttgacttgtccacaacggaggaggagccgatgtacctcgttgttcgaacggagatcgatgccgtccagaagaacgccatcaacggcgaagaccagcatatcaccgtcaaagcactcaacgagttcgatagcaaggctcaaggtagcggtggcgcgctggactggagatccaagctggtgagccagcgtggtgccgtcgtggctacagagatgaagaacaacagcgtcaaacttgcccgctggacggtacagagtatccttgccaaggctgatgttatgaaacttggattcgtctcccgtgcaaacccgaagaacaacgacaagcatgtcatattgggcgtcataggctggaagcctagggacttcgctaatcaaatgaatctgtccctgtccaacggctggggcattgttcgcactatcgtcgatatgtgtctgaagcgagaggagggcaagtttgtccttgtcaaagaccccaacaaggcgatcctccgcttgtacgaggtacctgctggaagcttcgatgacgacgatgatgaatctgtcggggagctggaggccgtggaagagtgaagcggaccagccatcatgatactatgagaaacaatgaaacttacgacggtgatacggaatcatcagttgagccgaaggcaaataggtagctgcaaaagtttgcaaatagccaaagctcttttgcatggatacattacataagatgaatcaatcttcattgcgtagtcagtctccatggtaaaatcaatcacgtataccatttatcatgtttgactattaatgggaaagctt

SEQ ID NO: 11660 - DNA, 756 bp, Muscodor strobelii
  misc_feature: SGI cDNA ID NO. 563753
  misc_feature: Encodes the peptide sequence at SEQ ID NO 11661
atggcgccaaaagcgatcatagccccgtctatcttgtcggctgacttcgcccagctcggcgcagattgcgcgaggacaatggaccaaggcgcggattggctccatgttgatatcatggacggtcactttgtgcctaatctcacgtttgggcctccagttgtagcaaaaatccggaaacatgtcgacgcgccgagcgagaaacacggccgtgggaccttcgactgccatatgatgattgctgagccaaagaaatgggtcaaagagttccagaaagcgggttgcgatttatactgcttccactacgaagcggcattctcaagcgatgccgagtcccctgaagggaaatcagataagaccacaactccgaaggaactgatacggtatattcatgactgtggtctgttggcgggaattgccctcaagcctatgacaggcgttgaggtattaacagaacttctcgagagttcagatgagaaggagaggcctgatatggtcctgatcatgacggtcgaacctggtttcggtggacagaagtttatggcctcggaactgcctaaggttcaggcattgcgacaaaagtatccggatctgaatatcgaggtagatggtggtcttgggcccggtactattgatcaagctgccgatgcgggtgccaatgttattgtagctggtagtgctgtctttggtgcccaagatccatctgaagtgatcacattgctgagaaattctgttaacaaggctagcgagaagctatga

SEQ ID NO: 11661 - protein, 251 aa, Muscodor strobelii
  misc_feature: SGI Peptide ID NO. 563753
  misc_feature (6)..(231): Pfam Id: PF00834 Pfam Desc: Ribulose-phosphate 3 epimerase family
  misc_feature (203)..(240): Pfam Id: PF00215 Pfam Desc: Orotidine 5'-phosphate decarboxylase / HUMPS family
  misc_feature (1)..(250): NCBI GI: 256735209 Blast Desc: NECHADRAFT_74815 [Nectria haematococca mpVI 77-13-4]
  misc_feature (1)..(251): NCBI GI: 164428399 Blast Desc: ribulose-phosphate 3-epimerase [Neurospora crassa OR74A] gi|157072132|gb|EAA34485.2| ribulose-phosphate 3-epimerase [Neurospora crassa OR74A]
  misc_feature (1)..(251): NCBI GI: 39974639 Blast Desc: MGG_00534 [Magnaporthe grisea 70-15] gi|145018567|gb|EDK02846.1| MGG_00534 [Magnaporthe grisea 70-15]
  misc_feature (1)..(251): NCBI GI: 171684765 Blast Desc: protein product [Podospora anserina] gi|170942343|emb|CAP67995.1| protein product [Podospora anserina]
  misc_feature (1)..(251): NCBI GI: 116192425 Blast Desc: conserved [Chaetomium globosum CBS 148.51] gi|88181843|gb|EAQ89311.1| conserved [Chaetomium globosum CBS 148.51]
  misc_feature (1)..(251): NCBI GI: 156063452 Blast Desc: SS1G_01844 [Sclerotinia sclerotiorum 1980] gi|154697178|gb|EDN96916.1| SS1G_01844 [Sclerotinia sclerotiorum 1980]
  misc_feature (1)..(246): NCBI GI: 238488705 Blast Desc: ribulose-phosphate 3-epimerase [Aspergillus flavus NRRL3357] gi|220697978|gb|EED54318.1| ribulose-phosphate 3-epimerase [Aspergillus flavus NRRL3357]
  misc_feature (1)..(249): NCBI GI: 71002346 Blast Desc: ribulose-phosphate 3-epimerase [Aspergillus fumigatus Af293] gi|66853492|gb|EAL93816.1| ribulose-phosphate 3-epimerase [Aspergillus fumigatus Af293] gi|159129911|gb|EDP55025.1| A1163]
  misc_feature (1)..(249): NCBI GI: 119481909 Blast Desc: ribulose-phosphate 3-epimerase [Neosartorya fischeri NRRL 181] gi|119409137|gb|EAW19086.1| ribulose-phosphate 3-epimerase [Neosartorya fischeri NRRL 181]
  misc_feature (1)..(246): NCBI GI: 242812021 Blast Desc: ribulose-phosphate 3-epimerase [Talaromyces stipitatus ATCC 10500] gi|218714211|gb|EED13634.1| ribulose-phosphate 3-epimerase [Talaromyces stipitatus ATCC 10500]
  misc_feature (4)..(246): SWISSPROT Homolog: EC 5.1.3.1 Ribulose-phosphate 3-epimerase
MAPKAIIAPSILSADFAQLGADCARTMDQGADWLHVDIMDGHFVPNLTFGPPVVAKIRKHVDAPSEKHGRGTFDCHMMIAEPKKWVKEFQKAGCDLYCFHYEAAFSSDAESPEGKSDKTTTPKELIRYIHDCGLLAGIALKPMTGVEVLTELLESSDEKERPDMVLIMTVEPGFGGQKFMASELPKVQALRQKYPDLNIEVDGGLGPGTIDQAADAGANVIVAGSAVFGAQDPSEVITLLRNSVNKASEKL

SEQ ID NO: 11662 - DNA, 1091 bp, Muscodor strobelii
  misc_feature: SGI EST ID NO. CUFF.27698.0
  misc_feature: Variant of the nucleotide sequence at SEQ ID NO 11660
ccatcattctgtaaataaatctccaaccattaagtagaaagctctctgaattgcccacgcttcgcgcaacaaactcacacatttgctagtcacaacagcaacatggcgccaaaagcgatcatagccccgtctatcttgtcggctgacttcgcccagctcggcgcagattgcgcgaggacaatggaccaaggcgcggattggctccatgttgatatcatggacggtcactttgtgcctaatctcacgtttgggcctccagttgtagcaaaaatccggaaacatgtcgacgcgccgagcgagaaacacggccgtgggaccttcgactgccatatgatgattgctgagccaaagaaatgggtcaaagagttccagaaagcgggttgcgatttatactgcttccactacgaagcggcattctcaagcgatgccgagtcccctgaagggaaatcagataagaccacaactccgaaggaactgatacggtatattcatgactgtggtctgttggcgggaattgccctcaagcctatgacaggcgttgaggtattaacagaacttctcgagagttcagatgagaaggagaggcctgatatggtcctgatcatgacggtcgaacctggtttcggtggacagaagtttatggcctcggaactgcctaaggttcaggcattgcgacaaaagtatccggatctgaatatcgaggtagatggtggtcttgggcccggtactattgatcaagctgccgatgcgggtgccaatgttattgtagctggtagtgctgtctttggtgcccaagatccatctgaagtgatcacattgctgagaaattctgttaacaaggctagcgagaagctatgataacctcatctctagtctggcgtggtgggagtaactgggctgcaagtcgctcagatcaatggggtgttagtcagaactgacgggacgagcgctgctacttgacaagatgtcgaaactaattagaaaggggttgatatcttgataagacataattctagtcatctccccaaatcatacttagagccatacaaattagctacagaatcgcaagtctgcagtacagcaaggatcag

SEQ ID NO: 11663 - DNA, 732 bp, Muscodor strobelii
  misc_feature: SGI cDNA ID NO. 563754
  misc_feature: Encodes the peptide sequence at SEQ ID NO 11664
atggtccatatcatactcaccggcgcgacgggccttgtcggctccggcgtactccagcagatgctcgcaaatgatggcatctcccgaatctcaattctcagcaggcgaccagttaagatggcagaaggacacgaggacaaagccaaagttattatccacaaggacttcaagagctacgatgaaacactgctggatcagctcaaagatgctgcaggttgtgtctgggcattaggagtgtcgcaaaacgacgtgaaccaggagcagtactttgagataacccacgactatcccctcgaggcatcaaaagccttttccaagttgcaccctgaatccccattcaccttcgtctatgtctccggcgaaggagcgacgcagagtcccgggatgtttacaccagtctacggtcgtgtcaaaggtcaaatcgagcaagcactttttgacttctccaagactttgcctaatttcaacatttacaacgtccggccggcgggcgttgactggcgacagcatccggagatacacccattcatcccaaatcaagcatattataagaaagtacttattggaccaatcaatatggtttacaagaacatggtgacgcctacgaagccccttggtaagatattgacggagctggcgatgagcaaagggcagccattgcagggcaaggatattgaaatggagggccgcctggtatcgaatgttgcgatacggagaatggccggcatatga

SEQ ID NO: 11664 - protein, 243 aa, Muscodor strobelii
  misc_feature: SGI Peptide ID NO. 563754
  misc_feature (2)..(243): NCBI GI: 189193513 Blast Desc: conserved [Pyrenophora tritici-repentis Pt-1C-BFP] gi|187978659|gb|EDU45285.1| conserved [Pyrenophora tritici-repentis Pt-1C-BFP]
  misc_feature (2)..(243): NCBI GI: 169601150 Blast Desc: SNOG_03432 [Phaeosphaeria nodorum SN15] gi|111067517|gb|EAT88637.1| SNOG_03432 [Phaeosphaeria nodorum SN15]
  misc_feature (2)..(242): NCBI GI: 154302792 Blast Desc: BC1G_09511 [Botryotinia fuckeliana B05.10] gi|150855258|gb|EDN30450.1| BC1G_09511 [Botryotinia fuckeliana B05.10]
  misc_feature (2)..(242): NCBI GI: 156056314 Blast Desc: SS1G_05510 [Sclerotinia sclerotiorum 1980] gi|154703293|gb|EDO03032.1| SS1G_05510 [Sclerotinia sclerotiorum 1980]
  misc_feature (2)..(243): NCBI GI: 119501643 Blast Desc: nucleoside-diphosphate-sugar epimerases, [Neosartorya fischeri NRRL 181] gi|119415744|gb|EAW25681.1| nucleoside-diphosphate-sugar epimerases, [Neosartorya fischeri
  misc_feature (2)..(243): NCBI GI: 70981720 Blast Desc: nucleoside-diphosphate-sugar epimerases [Aspergillus fumigatus Af293] gi|66844011|gb|EAL84351.1| nucleoside-diphosphate-sugar epimerases, [Aspergillus fumigatus
  misc_feature (2)..(216): NCBI GI: 255938522 Blast Desc: Pc14g00360 [Penicillium chrysogenum Wisconsin 54-1255] gi|211584652|emb|CAP74177.1| Pc14g00360 [Penicillium chrysogenum Wisconsin 54-1255]
  misc_feature (2)..(243): NCBI GI: 261359978 Blast Desc: conserved [Verticillium albo-atrum VaMs.102]
  misc_feature (2)..(243): NCBI GI: 256725975 Blast Desc: NECHADRAFT_43817 [Nectria haematococca mpVI 77-13-4]
  misc_feature (2)..(243): NCBI GI: 169785751 Blast Desc: [Aspergillus oryzae RIB40] gi|83776084|dbj|BAE66203.1| protein product [Aspergillus oryzae]
MVHIILTGATGLVGSGVLQQMLANDGISRISILSRRPVKMAEGHEDKAKVIIHKDFKSYDETLLDQLKDAAGCVWALGVSQNDVNQEQYFEITHDYPLEASKAFSKLHPESPFTFVYVSGEGATQSPGMFTPVYGRVKGQIEQALFDFSKTLPNFNIYNVRPAGVDWRQHPEIHPFIPNQAYYKKVLIGPINMVYKNMVTPTKPLGKILTELAMSKGQPLQGKDIEMEGRLVSNVAIRRMAGI

SEQ ID NO: 11665 - DNA, 3194 bp, Muscodor strobelii
  misc_feature: SGI EST ID NO. CUFF.28078.0
  misc_feature: Variant of the nucleotide sequence at SEQ ID NO 11663
cggggcggagttagtggacattgaaagaggctggactaacaagggaacgttcgaatcccatggatttgggcgcagagtcgtttttataagaaggctcatgaacgtcgtggaaaaacaagcaacgagaaactccaaatcattcagaatatacaaggcacaagatggtccatatcatactcaccggcgcgacgggccttgtcggctccggcgtactccagcagatgctcgcaaatgatggcatctcccgaatctcaattctcagcaggcgaccagttaagatggcagaaggacacgaggacaaagccaaagttattatccacaaggacttcaagagctacgatgaaacactgctggatcagctcaaagatgctgcaggttgtgtctgggcattaggagtgtcgcaaaacgacgtgaaccaggagcagtactttgagataacccacgactatcccctcgaggcatcaaaagccttttccaagttgcaccctgaatccccattcaccttcgtctatgtctccggcgaaggagcgacgcagagtcccgggatgtttacaccagtctacggtcgtgtcaaaggtcaaatcgagcaagcactttttgacttctccaagactttgcctaatttcaacatttacaacgtccggccggcgggcgttgactggcgacagcatccggagatacacccattcatcccaaatcaagcatattataagaaagtacttattggaccaatcaatatggtttacaagaacatggtgacgcctacgaagccccttggtaagatattgacggagctggcgatgagcaaagggcagccattgcagggcaaggatattgaaatggagggccgcctggtatcgaatgttgcgatacggagaatggccggcatatgatcgggagcttcgttggatggcactaaacttcgttcgctgcaatgtattctgaattgtcatgtgtattatcttcaaattgtttcgtaaatctttctagaagaggattacatgcacaagcacacacactcaagacacgcgcgacttcttccaatgaacccactccaatcctgttcaggcccataacaccagtagagatctctccgtcattacatcgtcaagttacacgttgcatgtagccagattcgctggacaactcctcaaaagttgccgatgctagcctctggcttggcggagagaactgacgtgagtgcgtcgcggacttcgaactcttccatgacggccccaaaactatgataattgttagaacgcggagttacttgagtattgttatgcatagtaagacttacccgtagcagcggactttggtcttcagatcatctgtgatcttcacaaagtcttgacggttgagttcagtgaggcgtgggtgtgacagaatgtagccccaggccatgaccggagtgatttctccatccagatctagcctcttgctgagatcgaggagtgtcgtaaggtcacccttggagagctcccaagttggaagagtcttctgttgtccagtgggggcttcagacttcaccccgtcggctgctggtgcggcagcagagctatggctatggccgaacgggatctcatcattaagttccctgaacggctctggggggcaagacgccataagagcatgaccacacggctcgttagggttttcactgcccttctcaaggagccaggggagatgatccatgcaaggtttctcgagactaccccgagcgcaattagcgatagattctaatgcgacgatggagacgaaataaccggaaagctctctccttgttcatcaagcgagaaagaaccagcccttcctctgcccgaagcggggacttggttaccttttcactgatggggaggtgacatatatgccttcgaggggtcaacaacgtgggggagctcgtacgttaagacgaaatcaatcccagcttggtcgtagtccacgcagctctggacagggtgttgctgccccatcatcatctgtgacgagccggctaacgatggtacagatatggatgtcatgggtggcgtgaacgcggaacttgagcccggtgcatagcttccggagatgctcccactagatgtatatcccatgctggggttgctgataacatcgtccatggtgccaacaatagatgaagaaatgccattctggtgtaagaggctgcgcaactgtcggttctcctcggcaagcttgtccttatcttgcgaaacattgctgaacacttccttcaatcgcaacacctcatcctcaagggccttgatataaagctcctttcgttcccgatgtgttctataagcagggaccgttagttgagagtacaccattttcttgtcggggcggctcatacctctgggcctggcggttcaattcttgacgacgggtcaaagcgggcttgctgtcgggcttcggcccacgtcgcttgggtgggttgccatccctggtcgttctcttttcactcaatgtcttgaggaagttgagattcatagaagacagggggctcttgtcgtcttggggaggcgactgtgaagccatgttgtgctcatacgtgccatccataagggtcttgtctgagggatgcgaataatgcgggggcgacgggtagcttgcggcgggtccaacgttagcagacatgatggccgttacaatgaaaactggagcaatgaacagaaacaggaacaatgaagtgcgacgacgaggagactggagaacacgaaacaaaagacctaccagaagcgtgggacatcggcttctcaaatacaaagcgaggcggtggcggtgttgctcgaccagattgagaaggccagtcttggggtgtcagtgttacatgcgatgacagaagaaactcaaatcacttttgccgaatgtgggttcgcgtggatggggctctcacaacgcgcccagaaagccgccagggaaaataagcaggtcacagtgaagcaagagacacaacagtgatggccgacgatcctcttcatgcgaggatggcgtacatggctctaccgtggaccagggcactatgactaggcgggtatcgtgtggtctatcgtgtgtcgtgtagcacgctgaagttgatgatgatgcctgtgaaaagcgggcttcgggtgggagatggggtctggagacggagttgtgggcaattgaacagcaaggagagattgtcagacactggcgcaccagtcccgactcccgaa

SEQ ID NO: 11666 - DNA, 1173 bp, Muscodor strobelii
  misc_feature: SGI cDNA ID NO. 563755
  misc_feature: Elevated expression when VOC is produced
  misc_feature: Encodes the peptide sequence at SEQ ID NO 11667
atgtctgctaacgttggacccgccgcaagctacccgtcgcccccgcattattcgcatccctcagacaagacccttatggatggcacgtatgagcacaacatggcttcacagtcgcctccccaagacgacaagagccccctgtcttctatgaatctcaacttcctcaagacattgagtgaaaagagaacgaccagggatggcaacccacccaagcgacgtgggccgaagcccgacagcaagcccgctttgacccgtcgtcaagaattgaaccgccaggcccagagaacacatcgggaacgaaaggagctttatatcaaggcccttgaggatgaggtgttgcgattgaaggaagtgttcagcaatgtttcgcaagataaggacaagcttgccgaggagaaccgacagttgcgcagcctcttacaccagaatggcatttcttcatctattgttggcaccatggacgatgttatcagcaaccccagcatgggatatacatctagtgggagcatctccggaagctatgcaccgggctcaagttccgcgttcacgccacccatgacatccatatctgtaccatcgttagccggctcgtcacagatgatgatggggcagcaacaccctgtccagagctgcgtggactacgaccaagctgggattgatttcgtcttaactctcgagaaaccttgcatggatcatctcccctggctccttgagaagggcagtgaaaaccctaacgagccgtgtggtcatgctcttatggcgtcttgccccccagagccgttcagggaacttaatgatgagatcccgttcggccatagccatagctctgctgccgcaccagcagccgacggggtgaagtctgaagcccccactggacaacagaagactcttccaacttgggagctctccaagggtgaccttacgacactcctcgatctcagcaagaggctagatctggatggagaaatcactccggtcatggcctggggctacattctgtcacacccacgcctcactgaactcaaccgtcaagactttgtgaagatcacagatgatctgaagaccaaagtccgctgctacggttttggggccgtcatggaagagttcgaagtccgcgacgcactcacgtcagttctctccgccaagccagaggctagcatcggcaacttttga

SEQ ID NO: 11667 - protein, 390 aa, Muscodor strobelii
  misc_feature: SGI Peptide ID NO. 563755
  misc_feature (39)..(388): NCBI GI: 171684605 Blast Desc: protein product [Podospora anserina] gi|170942263|emb|CAP67915.1| protein product [Podospora anserina]
  misc_feature (44)..(385): NCBI GI: 145611490 Blast Desc: MGG_00342 [Magnaporthe grisea 70-15] gi|145018767|gb|EDK03046.1| MGG_00342 [Magnaporthe grisea 70-15]
  misc_feature (12)..(382): NCBI GI: 156051019 Blast Desc: SS1G_08098 [Sclerotinia sclerotiorum 1980] gi|154692497|gb|EDN92235.1| SS1G_08098 [Sclerotinia sclerotiorum 1980]
  misc_feature (43)..(361): NCBI GI: 85091377 Blast Desc: NCU07379 [Neurospora crassa OR74A] gi|28920261|gb|EAA29636.1| conserved [Neurospora crassa OR74A]
  misc_feature (41)..(382): NCBI GI: 46108862 Blast Desc: FG01313.1 [Gibberella zeae PH-1]
  misc_feature (41)..(383): NCBI GI: 261357517 Blast Desc: conserved [Verticillium albo-atrum VaMs.102]
  misc_feature (6)..(382): NCBI GI: 189203981 Blast Desc: conserved [Pyrenophora tritici-repentis Pt-1C-BFP] gi|187985425|gb|EDU50913.1| conserved [Pyrenophora tritici-repentis Pt-1C-BFP]
  misc_feature (96)..(383): NCBI GI: 154296717 Blast Desc: BC1G_12386 [Botryotinia fuckeliana B05.10] gi|150843225|gb|EDN18418.1| BC1G_12386 [Botryotinia fuckeliana B05.10]
  misc_feature (20)..(386): NCBI GI: 165931814 Blast Desc: bZIP-type transcription factor [Emericella nidulans] gi|259483861|tpe|CBF79600.1| TPA: BZIP-type transcription factor [Source:UniProtKB/TrEMBL;Acc:B0B2H8] [Aspergillus nidulans FGSC
  misc_feature (32)..(389): NCBI GI: 145250791 Blast Desc: An15g03710 [Aspergillus niger] gi|134082433|emb|CAK97241.1| protein product [Aspergillus niger]
  misc_feature: Useful for introducing or modulating the production of volatile compounds
MSANVGPAASYPSPPHYSHPSDKTLMDGTYEHNMASQSPPQDDKSPLSSMNLNFLKTLSEKRTTRDGNPPKRRGPKPDSKPALTRRQELNRQAQRTHRERKELYIKALEDEVLRLKEVFSNVSQDKDKLAEENRQLRSLLHQNGISSSIVGTMDDVISNPSMGYTSSGSISGSYAPGSSSAFTPPMTSISVPSLAGSSQMMMGQQHPVQSCVDYDQAGIDFVLTLEKPCMDHLPWLLEKGSENPNEPCGHALMASCPPEPFRELNDEIPFGHSHSSAAAPAADGVKSEAPTGQQKTLPTWELSKGDLTTLLDLSKRLDLDGEITPVMAWGYILSHPRLTELNRQDFVKITDDLKTKVRCYGFGAVMEEFEVRDALTSVLSAKPEASIGNF

SEQ ID NO: 11668 - DNA, 2963 bp, Muscodor strobelii
  misc_feature: SGI EST ID NO. CUFF.28079.2
  misc_feature: Variant of the nucleotide sequence at SEQ ID NO 11666
ttcgggagtcgggactggtgcgccagtgtctgacaatctctccttgctgttcaattgcccacaactccgtctccagaccccatctcccacccgaagcccgcttttcacaggcatcatcatcaacttcagcgtgctacacgacacacgatagaccacacgatacccgcctagtcatagtgccctggtccacggtagagccatgtacgccatcctcgcatgaagaggatcgtcggccatcactgttgtgtctcttgcttcactgtgacctgcttattttccctggcggctttctgggcgcgttgtgagagccccatccacgcgaacccacattcggcaaaagtgatttgagtttcttctgtcatcgcatgtaacactgacaccccaagactggccttctcaatctggtcgagcaacaccgccaccgcctcgctttgtatttgagaagccgatgtcccacgcttctggtaggtcttttgtttcgtgttctccagtctcctcgtcgtcgcacttcattgttcctgtttctgttcattgctccagttttcattgtaacggccatcatgtctgctaacgttggacccgccgcaagctacccgtcgcccccgcattattcgcatccctcagacaagacccttatggatggcacgtatgagcacaacatggcttcacagtcgcctccccaagacgacaagagccccctgtcttctatgaatctcaacttcctcaagacattgagtgaaaagagaacgaccagggatggcaacccacccaagcgacgtgggccgaagcccgacagcaagcccgctttgacccgtcgtcaagaattgaaccgccaggcccagagaacacatcgggaacgaaaggagctttatatcaaggcccttgaggatgaggtgttgcgattgaaggaagtgttcagcaatgtttcgcaagataaggacaagcttgccgaggagaaccgacagttgcgcagcctcttacaccagaatggcatttcttcatctattgttggcaccatggacgatgttatcagcaaccccagcatgggatatacatctagtgggagcatctccggaagctatgcaccgggctcaagttccgcgttcacgccacccatgacatccatatctgtaccatcgttagccggctcgtcacagatgatgatggggcagcaacaccctgtccagagctgcgtggactacgaccaagctgggattgatttcgtcttaacgtacgagctcccccacgttgttgacccctcgaaggcatatatgtcacctccccatcagtgaaaagtctcgagaaaccttgcatggatcatctcccctggctccttgagaagggcagtgaaaaccctaacgagccgtgtggtcatgctcttatggcgtcttgccccccagagccgttcagggaacttaatgatgagatcccgttcggccatagccatagctctgctgccgcaccagcagccgacggggtgaagtctgaagcccccactggacaacagaagactcttccaacttgggagctctccaagggtgaccttacgacactcctcgatctcagcaagaggctagatctggatggagaaatcactccggtcatggcctggggctacattctgtcacacccacgcctcactgaactcaaccgtcaagactttgtgaagatcacagatgatctgaagaccaaagtccgctgctacggttttggggccgtcatggaagagttcgaagtccgcgacgcactcacgtcagttctctccgccaagccagaggctagcatcggcaacttttgaggagttgtccagcgaatctggctacatgcaacgtgtaacttgacgatgtaatgacggagagatctctactggtgttatgggcctgaacaggattggagtgggttcattggaagaagtcgcgcgtgtcttgagtgtgtgtgcttgtgcatgtaatcctcttctagaaagatttacgaaacaatttgaagataatacacatgacaattcagaatacattgcagcgaacgaagtttagtgccatccaacgaagctcccgatcatatgccggccattctccgtatcgcaacattcgataccaggcggccctccatttcaatatccttgccctgcaatggctgccctttgctcatcgccagctccgtcaatatcttaccaaggggcttcgtaggcgtcaccatgttcttgtaaaccatattgattggtccaataagtactttcttataatatgcttgatttgggatgaatgggtgtatctccggatgctgtcgccagtcaacgcccgccggccggacgttgtaaatgttgaaattaggcaaagtcttggagaagtcaaaaagtgcttgctcgatttgacctttgacacgaccgtagactggtgtaaacatcccgggactctgcgtcgctccttcgccggagacatagacgaaggtgaatggggattcagggtgcaacttggaaaaggcttttgatgcctcgaggggatagtcgtgggttatctcaaagtactgcctttactaatatcagtgactagtttctcctaagaagtgtgtgagacacatactcctggttcacgtcgttttgcgacactcctaatgcccagacacaacctgcagcatctttgagctgatccagcagtgtttcatcgtagctcttgaagtccttgtggataataactttggctttgtcctcgtgtccttctgccatcttaactggtcgcctgctgagaattgagattcgggagatgccatcatttgcgagcatctgctggagtacgccggagccgacaaggcccgtcgcgccggtgagtatgatatggaccatcttgtgccttgtatattctgaatgatttggagtttctcgttgcttgtttttccacgacgttcatgagccttcttataaaaacgactctgcgcccaaatccatgggattcgaacgttcccttgtt

SEQ ID NO: 11669 - DNA, 1215 bp, Muscodor strobelii
  misc_feature: SGI cDNA ID NO. 563756
  misc_feature: Elevated expression when VOC is produced
  misc_feature: Encodes the peptide sequence at SEQ ID NO 11670
atgtctgctaacgttggacccgccgcaagctacccgtcgcccccgcattattcgcatccctcagacaagacccttatggatggcacgtatgagcacaacatggcttcacagtcgcctccccaagacgacaagagccccctgtcttctatgaatctcaacttcctcaagacattgagtgaaaagagaacgaccagggatggcaacccacccaagcgacgtgggccgaagcccgacagcaagcccgctttgacccgtcgtcaagaattgaaccgccaggcccagagaacacatcgggaacgaaaggagctttatatcaaggcccttgaggatgaggtgttgcgattgaaggaagtgttcagcaatgtttcgcaagataaggacaagcttgccgaggagaaccgacagttgcgcagcctcttacaccagaatggcatttcttcatctattgttggcaccatggacgatgttatcagcaaccccagcatgggatatacatctagtgggagcatctccggaagctatgcaccgggctcaagttccgcgttcacgccacccatgacatccatatctgtaccatcgttagccggctcgtcacagatgatgatggggcagcaacaccctgtccagagctgcgtggactacgaccaagctgggattgatttcgtcttaacgtacgagctcccccacgttgttgacccctcgaaggcatatattctcgagaaaccttgcatggatcatctcccctggctccttgagaagggcagtgaaaaccctaacgagccgtgtggtcatgctcttatggcgtcttgccccccagagccgttcagggaacttaatgatgagatcccgttcggccatagccatagctctgctgccgcaccagcagccgacggggtgaagtctgaagcccccactggacaacagaagactcttccaacttgggagctctccaagggtgaccttacgacactcctcgatctcagcaagaggctagatctggatggagaaatcactccggtcatggcctggggctacattctgtcacacccacgcctcactgaactcaaccgtcaagactttgtgaagatcacagatgatctgaagaccaaagtccgctgctacggttttggggccgtcatggaagagttcgaagtccgcgacgcactcacgtcagttctctccgccaagccagaggctagcatcggcaacttttga

SEQ ID NO: 11670 - protein, 404 aa, Muscodor strobelii
  misc_feature: SGI Peptide ID NO. 563756
  misc_feature (39)..(402): NCBI GI: 171684605 Blast Desc: protein product [Podospora anserina] gi|170942263|emb|CAP67915.1| protein product [Podospora anserina]
  misc_feature (44)..(399): NCBI GI: 145611490 Blast Desc: MGG_00342 [Magnaporthe grisea 70-15] gi|145018767|gb|EDK03046.1| MGG_00342 [Magnaporthe grisea 70-15]
  misc_feature (12)..(396): NCBI GI: 156051019 Blast Desc: SS1G_08098 [Sclerotinia sclerotiorum 1980] gi|154692497|gb|EDN92235.1| SS1G_08098 [Sclerotinia sclerotiorum 1980]
  misc_feature (43)..(375): NCBI GI: 85091377 Blast Desc: NCU07379 [Neurospora crassa OR74A] gi|28920261|gb|EAA29636.1| conserved [Neurospora crassa OR74A]
  misc_feature (41)..(396): NCBI GI: 46108862 Blast Desc: FG01313.1 [Gibberella zeae PH-1]
  misc_feature (41)..(397): NCBI GI: 261357517 Blast Desc: conserved [Verticillium albo-atrum VaMs.102]
  misc_feature (6)..(396): NCBI GI: 189203981 Blast Desc: conserved [Pyrenophora tritici-repentis Pt-1C-BFP] gi|187985425|gb|EDU50913.1| conserved [Pyrenophora tritici-repentis Pt-1C-BFP]
  misc_feature (96)..(397): NCBI GI: 154296717 Blast Desc: BC1G_12386 [Botryotinia fuckeliana B05.10] gi|150843225|gb|EDN18418.1| BC1G_12386 [Botryotinia fuckeliana B05.10]
  misc_feature (20)..(400): NCBI GI: 165931814 Blast Desc: bZIP-type transcription factor [Emericella nidulans] gi|259483861|tpe|CBF79600.1| TPA: BZIP-type transcription factor [Source:UniProtKB/TrEMBL;Acc:B0B2H8] [Aspergillus nidulans FGSC
  misc_feature (26)..(396): NCBI GI: 238844993 Blast Desc: conserved [Microsporum canis CBS 113480]
  misc_feature: Useful for introducing or modulating the production of volatile compounds
MSANVGPAASYPSPPHYSHPSDKTLMDGTYEHNMASQSPPQDDKSPLSSMNLNFLKTLSEKRTTRDGNPPKRRGPKPDSKPALTRRQELNRQAQRTHRERKELYIKALEDEVLRLKEVFSNVSQDKDKLAEENRQLRSLLHQNGISSSIVGTMDDVISNPSMGYTSSGSISGSYAPGSSSAFTPPMTSISVPSLAGSSQMMMGQQHPVQSCVDYDQAGIDFVLTYELPHVVDPSKAYILEKPCMDHLPWLLEKGSENPNEPCGHALMASCPPEPFRELNDEIPFGHSHSSAAAPAADGVKSEAPTGQQKTLPTWELSKGDLTTLLDLSKRLDLDGEITPVMAWGYILSHPRLTELNRQDFVKITDDLKTKVRCYGFGAVMEEFEVRDALTSVLSAKPEASIGNF

SEQ ID NO: 11671 - DNA, 2963 bp, Muscodor strobelii; identical to SEQ ID NO: 11668
  misc_feature: SGI EST ID NO. CUFF.28079.2
  misc_feature: Variant of the nucleotide sequence at SEQ ID NO 11669

SEQ ID NO: 11672 - DNA, 921 bp, Muscodor strobelii
  misc_feature: SGI cDNA ID NO. 563757
  misc_feature: Encodes the peptide sequence at SEQ ID NO 11673
atgaatctcttcgcgagtctctacacatacgtgagagctgctgtgctcgttgcaccttggtatgtcagggtcctctatctgggagtagcagatgtaggcttatcatgtctactcttcttaaaaccttttgctccagacctagtcaatcgcgtatcttcggtcattgcgctttccgtttggcgatggattcaactcatattcgttcgagcgaatagtgctcagatcaagtttcatggtgatgctttgcctcagaatgaatctgcgattgttatttcgaaccatgttagctgggcggatttctatatgattcaggcccttgctatgcgctcaaatatgcttgggcaatgccggtggtttgccaaaaagcagcttcgtatggtaccgttcctgggatggggattatgggctatgggaatgccaatggtgagcaggaaatggatgaccgaccagagggagatgcaacgggttttcagcggcgttgttgatagaaaatggccgatatggcttatcagcttcagcgaagcgactagatatacacctcagaaatatgccgaatcgaagacctggtgtagtcaaaatgaccgtcgccaaccgttgaatcttctctatccacgcactagaggctttattgctaccgtccagagcttgcgacgggcatcgcatgtcaaggcagtctacgacttgacgattgcatacgagcataaggggaaatttctcgaagcgcctacgatgtgggagacactgaaactagaagatatttccaacaaccacggatatcagtttcacgtcatggcacgacgttactcgctggagaacttgccatatgagaacgatgagctagcagcttggctcgaagaacgctggatcgagaaaggggaatggctggaagcaatgagactccatggcgcgcatattaattaa

SEQ ID NO: 11673 - protein, 306 aa, Muscodor strobelii
  misc_feature: SGI Peptide ID NO. 563757
  misc_feature (74)..(217): Pfam Id: PF01553 Pfam Desc: Acyltransferase
  misc_feature (74)..(163): Pfam Id: PF01553 Pfam Desc: Acyltransferase
  misc_feature (8)..(299): NCBI GI: 145611488 Blast Desc: MGG_00343 [Magnaporthe grisea 70-15] gi|145018766|gb|EDK03045.1| MGG_00343 [Magnaporthe grisea 70-15]
  misc_feature (5)..(297): NCBI GI: 256734320 Blast Desc: NECHADRAFT_74458 [Nectria haematococca mpVI 77-13-4]
  misc_feature (7)..(299): NCBI GI: 154296715 Blast Desc: BC1G_12385 [Botryotinia fuckeliana B05.10] gi|150843224|gb|EDN18417.1| BC1G_12385 [Botryotinia fuckeliana B05.10]
  misc_feature (9)..(303): NCBI GI: 261357518 Blast Desc: 1-acyl-sn-glycerol-3-phosphate acyltransferase [Verticillium albo-atrum VaMs.102]
  misc_feature (169)..(299): NCBI GI: 156051021 Blast Desc: SS1G_08099 [Sclerotinia sclerotiorum 1980] gi|154692498|gb|EDN92236.1| SS1G_08099 [Sclerotinia sclerotiorum 1980]
  misc_feature (66)..(302): NCBI GI: 255556121 Blast Desc: lysophosphatidic acid acyltransferase, [Ricinus communis] gi|223541758|gb|EEF43306.1| lysophosphatidic acid acyltransferase, [Ricinus communis]
  misc_feature (33)..(306): NCBI GI: 224063587 Blast Desc: [Populus trichocarpa] gi|222842941|gb|EEE80488.1| [Populus trichocarpa]
  misc_feature (10)..(301): NCBI GI: 167391416 Blast Desc: 1-acyl-sn-glycerol-3-phosphate acyltransferase [Entamoeba dispar SAW760] gi|165896434|gb|EDR23843.1| 1-acyl-sn-glycerol-3-phosphate acyltransferase, [Entamoeba dispar
  misc_feature (66)..(302): NCBI GI: 183211900 Blast Desc: 1-acyl-sn-glycerol-3-phosphate acyltransferase [Ricinus communis]
  misc_feature (24)..(306): NCBI GI: 255635102 Blast Desc: [Glycine max]
  misc_feature (36)..(296): SWISSPROT Homolog: EC 2.3.1.51 1-acylglycerol-3-phosphate O-acyltransferase
MNLFASLYTYVRAAVLVAPWYVRVLYLGVADVGLSCLLFLKPFAPDLVNRVSSVIALSVWRWIQLIFVRANSAQIKFHGDALPQNESAIVISNHVSWADFYMIQALAMRSNMLGQCRWFAKKQLRMVPFLGWGLWAMGMPMVSRKWMTDQREMQRVFSGVVDRKWPIWLISFSEATRYTPQKYAESKTWCSQNDRRQPLNLLYPRTRGFIATVQSLRRASHVKAVYDLTIAYEHKGKFLEAPTMWETLKLEDISNNHGYQFHVMARRYSLENLPYENDELAAWLEERWIEKGEWLEAMRLHGAHIN

SEQ ID NO: 11674 - DNA, 2717 bp, Muscodor strobelii
  misc_feature: SGI EST ID NO. CUFF.27707.0
  misc_feature: Variant of the nucleotide sequence at SEQ ID NO 11672
catgtctactcttcttaaaaccttttgctccagacctagtcaatcgcgtatcttcggtcattgcgctttccgtttggcgatggattcaactcatattcgttcgagcgaatagtgctcagatcaagtttcatggtgatgctttgcctcagaatgaatctgcgattgttatttcgaaccatgttagctgggcggatttctatatgattcaggcccttgctatgcgctcaaatatgcttgggcaatgccggtggtttgccaaaaagcagcttcgtatggtaccgttcctgggatggggattatgggctatgggaatgccaatggtgagcaggaaatggatgaccgaccagagggagatgcaacgggttttcagcggcgttgttgatagaaaatggccgatatggcttatcagcttcagcgaagcgactagatatacacctcagaaatatgccgaatcgaagacctggtgtagtcaaaatgaccgtcgccaaccgttgaatcttctctatccacgcactagaggctttattgctaccgtccagagcttgcgacgggcatcgcatgtcaaggcagtctacgacttgacgattgcatacgagcataaggggaaatttctcgaagcgcctacgatgtgggagacactgaaactagaagatatttccaacaaccacggatatcagtttcacgtcatggcacgacgttactcgctggagaacttgccatatgagaacgatgagctagcagcttggctcgaagaacgctggatcgagaaaggggaatggctggaagcaatgagactccatggcgcgcatattaattaagtaacagcaaatagttttatgaacatcgcaaactatcagacaccgagacaccaccttcctgtcttatctctcctacatacagcattggccggccagatctctctcaccggtgtatgttgactaagatcttgaaggttgccggatgctttttgcctaatgccagtcaaagcttcgcatgaagcagcattatgccatcaggactgcaggtcctgtaaggggtgctattacatatcgtcggcacgattgtattcgagctaagtaaattgataacatttatttactcgatgtgggtaactcaaatcatatcatcccgctcttcatgggcataagcattggtcaaatgggacgcaaggagaatgacactcggccgcgcccctaagcgtatatggatggagctcgaatatgaagtgtccgaacaagtcgtcacagaactcgtttctgatggtatcagccttaagccctgtatgtcttctagaggacgagagataatcacatctgctaacatcgaagaaatctgggcgtttgatagtgccgcgtctcgtccactagttgtgacgttcccatgtcttcaaattaacttgcttacgtagccagagtctagtgatatatgcaattagcgtagcaacgactcctcacaactccaaaagattgagagtcaagcagtgacacgagtaatgcacgtgcatctcctagcagatgcaaacaggctgttcaagggcttatgagattcaaaggtatggtaccagccgattggcctggcgtgagcaacagggatcaatattatgatgaatcctcatggatcttctccaagatgggcggagagaatagaggtttctacttgctcgacggcagtgatatagtggctcatcaagcccgtcgcgtgtggatcacgggtaatcgccgaggcgagggattgggttttgtgcaaggacgtttgctcatgcggacatttacattcctgcagatctgcatgcaagctgcaattctgctgcaaagggaggagaatcgcgagatgagggatggactgatgcatggtggggtgatgatgatgagtttatggatggtggaacggtcgtctgccgataacgtctcagctagctatgatatcgaccattgtaattctttccactgccaaaatctgcatgcactgatatcatcccattgtaagacgagatagattcgtgtcccggagttttgtttggagcgtttcagtgagaaccgaggtttccgcacaccgattgaacttccagaccgcccacatacctggcctcgtctgtgacgaggtgcatagctgatatgcaggttgacgcctaggatggggaggtttgctaagcacgttagatatctgtgtacttaggaacggatggcaatcctctgttggaatcttgaacgaccaattgctttcgacgagtcagttgcaaagacaggctgcatcatggattagaatggagtaggatcgcgctaatgtatggtgaccccaagctcgggttctctatgtgatagcgtgagacgggcgagacgggcaatggggtgtggtgtcaagaatccggtcaggttctgggatcgtttttatggttatatatttcgtatgcagatttaatgcaccaggacgtgatggatgcatacctaaatgtatcttgaagtcgaaagtaggctaaaggcctagagaatgttgtaacactaaaaggcagtgctgcattggcgaagagggaggtaacactacctcgaaccatgtaactccgtatgaaaaatggacgacgatgcccacgacaccaaggcgggtgtgccgcagaatccacacacacgacatagttattcccattggcatatcccatggcccggtcgtgggtcgtgatcggaattgcagtcggaatcttttgtctgccagctggcctgcat

SEQ ID NO: 11675 - DNA, 5682 bp, Muscodor strobelii
  misc_feature: SGI cDNA ID NO. 563758
  misc_feature: Reduced expression when VOC is produced
  misc_feature: Encodes the peptide sequence at SEQ ID NO 11676
atggaccaagactccagcagactggcggtgcccgccgtcgcctctctccgcagccaggccgtcggcaacgccatggagaggaccctcagccaggacatccgcgaggagcgcgaggagctgcgtgaagccgccgagcagaccctcaatgtcattgtcgacctcaacctcgacggctccatccgctgggtcagcccctcctgggccgatgtcgtcggcacggagcccagcagcgtcgaaggcacccctgtcgccgacctgatcatcagcgagcacaaggccctgttctccgaggccatcgactccatgaagaaggatgactcccggagccaatacatccgcttcaatgtctatctcggccccatgtccaagatgtaccccacagagacggtcacagagcctgatgctgctgagactgggcctgccacggtggaattggaggctcagggcatcatggtctacgaccgtacaacgggtgacgaaagccataccatgtggatgatacggccttggattgcgccacgcgagatcaagatcgatttaccaaccctcatcgtggagtccctcggctctggcgcagaagtccttgcgagctacttgacgaaactagctgagtctggtcaggacgagtccggcaaccagcctcttccaccacctgtgctgtgccggatttgcgagcgtcagattccgccttggtggttcgaaaagcacacggagctatgcttgcaagagcatcgggccgagatggacgtccagatggcccaagaaagcctgacggaacatcgacatgccatcgtcaaggtcctcgacgcgctggaagctcgcaagagtcgcacgctgacagatccctcttcgctccccattgccgagtacaaaggtatggcgatcggcccgtcgtcgagtacatcgtctccgggcacggcatccccggcgccgtcctccagagacagatcaggcggctttggtcactcgcgttctcgatcattcgccgtccgtcggccgcaagcccggatcgtcgagctccttctcgacctttgcgacactgctctggagattagcacacctgcaatcaaggaaccagcttcccaatcatcgggggatctgcgtacacagtctccgcaatcagagtcccgtatttcacaagtactgcaatggcaatcacctggatcaaacactgttgagcaagagcaaggactcgctgcactatgcaccgatacggaggccgtcgccaaagacaaggttgaggcggtttttcgacaccgcagagtcatcgaatattctgagcgtatccgcatcgaattcgctgttcttgtccaggattgcattgatgaggcaatgcacaaagctgcccgtattgcagctggtcgccttagtgattctactacggacgaggagggtgacgaggagggtgaagaggaagaagcagaccaagaaactccgtcggcatcgttccctgaacaacctgttcaaaacgcagccaatgttaacccttcgtcactcactctcgctttgagaaatatggaactagccgagaaggacaagaacggcggtccagctaccatacaatctaccagatcgagcagccctaaagaatgccctacgccgaggtcacaccgagatgctttaggtttcctaagccagacacgagactctcgtcgaggctcattactggttgagagcgaaggcggcgatagtgacggcagtgcaagatcggcttctgtcgcctcaaagctgccgccacgcacagagtctcctatctctgagtttggtggtatacgacgcggcgctagctcacgtcaacatcaacgacgaagcctgatcctaacaggaacttcctcgccgcaccggcaagaatcgccatcaagaggtactcagccttcatcccctctgcggatatcgaaaccgcgtaatctccagtactctcaagagggtgttgcctcaccagaagcatctccgatgctttcgcatagtgaatttagctctccagccatcattccgcaccaccgacggcaatcatctgcggcgttcccgaatctttctaaccaaccatcctcgccacggttgaatgctgctaatcctcctcctccccttgcccgagctgtacccccatccatcaaagattttgaaattattaagccaataagcaagggtgcatttggaagcgtttatctctccaagaaaaaatcaactggcgagtactttgcaatcaaggttctgaagaaggcagacatggttgcgaagaatcaggtaacaaatgtcaaggcggaacgagcaattatgatgtggcagggcgcaagcgatttcgtcgccaagctctattggacattctcgagcaaagactatctataccttgtgatggaatatctcaacggtggagactgcgcatctctcgtcaaggtcctaggcggcctacctgaggattgggtaaagaaatatcttggtgaggtgatcttaggtgtcgaacacctgcatgatcgcggcatcatccaccgagacttgaaacctgataatcttcttattgaccagaaaggtcatctcaaactgaccgattttgggctttctcgtatgggtcttattggtcgtcaaaagagagctctcaacagtggtacttccgatactacgcctgacttgctcaagtcgggcccctttgcacgatcgacatccattgcttcttctcgatcgacctcgttggatttacatgggtcacacccctcgcccagtgccactcctcagatcttccccgacaacagccttgcacagccatcatactttagtctatcccatgttcagcaagaacctcgtcgcatttctggtcagcgtagtgatagtggtggcagcgagacactcacgcacatgatgggcacattctccctcaatgatgtacctttacctcagtcaagtgttcgatccccacatgacgaaggaagtgaaggcggagcctctcctgatctgccatctctccaccacgtaaacagccaaagcagcgatgtgcgccgaagtacgccgcctcagacaagtatgatgccacctccgatggcgctcttcgacccagaagacacgaatcgtagatttgttggaactccggactaccttgcgccagaaacgattagtggcgggcgacaagacgaaacaagcgattggtggtctgttggctgcatcatgtttgagtttctttatggcattcccccatttcacgcaaacgaggccgatcaagtctttgaaaacattctagcccgcaaaatcacatggcccgatgacgaagagatggtatcgcccgaggcccaagacttgatgaaccggctgctgtgcatcgatccgcaacaaagactgggagcaaatagggaagagaagtatgcttcgggtggtgaggagatcagaaaccacccatggtttgctggaacaagctgggacaccttgctacaggacgaagcgcaatttatcccacagccagagaatcctgaggatactgaatactttgatgcccgtggtgcaacactgcaatccttcacggaagagatggaggatcagatgtctccgccgatggcgtccactccggactatccggataggcctcatgacgccctttctcgacctcgatcgcagattcaagtgaatcaaatcaaacgtggcttgatgccgctacatataccacctcacatcagagatctcaagactcgtcggcttagcgaacctgtggcatcagatgattttggctctttcgcgttcaagaatctgaacgtacttgagaaagctaataaggatgtcatccaacaattaaaggcgcaagcgatggcagcgcaaaacaggtccgctgttgtgagccctggtggtcctcaaagtggaacaacaccttcgcctgcgcttgaaggcagtccgatatcgtcagccccgattcagcgaaatctgtctaatgctaaggcttcagcatcgcagcgcccagcctcaccatccgctgcagctcatgccaatgcatccccgagccgagcatcgcaaccttcgtcaccacttctcgtgtctttccatgctggctcagcaaacgaaaatcgccgcaaagcgtctagcaattcctcaaatctgtctcagcaatctggcgtaaacacgttacagccgggaagcttctttgatatggctagatctgttccgagcttgcaaaaatcgacgagtgctgccgctgcaatggcgtcgcctatcaaggggaaaggagctgcgccgccgcctcttgcactctcacctcaaaagcttgttgcaaccccgagacagggcagtgggtcgtcaacgcgttcgcgatctctgactgttggttcgcaggagggtagcccagtgacatcagagcttctggcgcatcatcgtaatcgtcgaagtcaagtctttgatatgtcaccgtcatcctccgataatgagggcgaaagagcaagtgcgctcctgaaggtccagcgccgtcgtcagtcttcacggagaatgtcagctattatgctcgatagcccaacttttcgatccctggatgtgctcatatgtgaagaccatcctgtttcgcgcatggtcatggaaaagctattggagaagctccgctgtcgcactatatctgcttccactggttcggatgctgttcgctacgccgttggcgaagtcaagttcgatatcatttttaccgagttcaagctccctgaaattagtgggactgatgtggctcgcatggttcgagaagtgaagaatgtcaattctcaaacacctattgtggcaatcactgcatacctcaaagaattacaggctccgcactacttcgactcgctcatcgagaagcctatcagttcatccaaacttgtagaagttctttcgaacttatgtcaatggaaaccacactctcacggccagcctcacccgctaacaagccccaaccctatctcagcaatgaagcccatcaatactcgcctcgaggacagccctacatccgggtcgtcatacgccaaccccagtagcagtagcttccgcggctcgagccgagaggactccatcagctccagtctatttggtgattcggaatcagtggtcacagatgacataccagtcgtcgtgtcgcgcaaagccaccggagactggggcgatgacgctggacttggtatcagtgctgacgagaacttctcaagctcgacgcatcacgcacctatcaaactggtgtctcaagagtcagcccctgcacaaatggaagcacaacgcatgcctgtcccggctcaatctttagaaaagctgaggtctaggcgtgagcatctagagaccagaagacgtctagaaggcagcgattcggcggatgacgaagacgaggaggtgggcgccacgcgagatcgtggtcctcgtgctaaaccacttcctccgagctccaagctaggcattgaaatgatgagagcaaacagccatgacagcattgcagtcacgtccgagacaacaccagaaccaaccactcaactcgtgacaccttcgagagcacaaggtgcttcccccctccccagcgcaaagccctcggttgcagccgtggcgcatacgcctccaggaactacgtcaggaactggaagtgaagacaatgaacggacgccccgtccacctaccaaaacggaagaaaaaagtacttccgacgaacccactcctcgaccgcaggttcagcattccgaaacggtattacagattcggtag

SEQ ID NO: 11676 - protein, 1893 aa, Muscodor strobelii
  misc_feature: SGI Peptide ID NO. 563758
  misc_feature (707)..(1130): Pfam Id: PF00069 Pfam Desc: Protein kinase domain
  misc_feature (1499)..(1611): Pfam Id: PF00072 Pfam Desc: Response regulator receiver domain
  misc_feature (707)..(854): Pfam Id: PF00069 Pfam Desc: Protein kinase domain
  misc_feature (1023)..(1130): Pfam Id: PF00069 Pfam Desc: Protein kinase domain
  misc_feature (777)..(854): Pfam Id: PF07714 Pfam Desc: Protein tyrosine kinase
  misc_feature (1499)..(1583): Pfam Id: PF00072 Pfam Desc: Response regulator receiver domain
  misc_feature (5)..(1881): NCBI GI: 261357526 Blast Desc: serine/threonine-protein kinase ppk18 [Verticillium albo-atrum VaMs.102]
  misc_feature (8)..(1881): NCBI GI: 39726381 Blast Desc: response regulator receiver RIM15p [Gibberella moniliformis]
  misc_feature (8)..(1881): NCBI GI: 256734321 Blast Desc: [Nectria haematococca mpVI 77-13-4]
  misc_feature (8)..(1881): NCBI GI: 46108860 Blast Desc: FG01312.1 [Gibberella zeae PH-1]
  misc_feature (8)..(1869): NCBI GI: 39975017 Blast Desc: MGG_00345 [Magnaporthe grisea 70-15] gi|145018765|gb|EDK03044.1| MGG_00345 [Magnaporthe grisea 70-15]
  misc_feature (8)..(1881): NCBI GI: 171684607 Blast Desc: protein product [Podospora anserina] gi|170942264|emb|CAP67916.1| protein product [Podospora anserina]
  misc_feature (6)..(1824): NCBI GI: 85091375 Blast Desc: NCU07378 [Neurospora crassa OR74A] gi|28920260|gb|EAA29635.1| NCU07378 [Neurospora crassa OR74A]
  misc_feature (2)..(1890): NCBI GI: 154296733 Blast Desc: conserved [Botryotinia fuckeliana B05.10] gi|39726347|gb|AAR30116.1| response regulator receiver RIM15p [Botryotinia fuckeliana] gi|150843233|gb|EDN18426.1| conserved
  misc_feature (1)..(1876): NCBI GI: 156050993 Blast Desc: conserved [Sclerotinia sclerotiorum 1980] gi|154692484|gb|EDN92222.1| conserved [Sclerotinia sclerotiorum 1980]
  misc_feature (26)..(1880): NCBI GI: 116192527 Blast Desc: CHGG_05981 [Chaetomium globosum CBS 148.51] gi|88181894|gb|EAQ89362.1| CHGG_05981 [Chaetomium globosum CBS 148.51]
  misc_feature: Useful for introducing or modulating the production of volatile compounds
MDQDSSRLAVPAVASLRSQAVGNAMERTLSQDIREEREELREAAEQTLNVIVDLNLDGSIRWVSPSWADVVGTEPSSVEGTPVADLIISEHKALFSEAIDSMKKDDSRSQYIRFNVYLGPMSKMYPTETVTEPDAAETGPATVELEAQGIMVYDRTTGDESHTMWMIRPWIAPREIKIDLPTLIVESLGSGAEVLASYLTKLAESGQDESGNQPLPPPVLCRICERQIPPWWFEKHTELCLQEHRAEMDVQMAQESLTEHRHAIVKVLDALEARKSRTLTDPSSLPIAEYKGMAIGPSSSTSSPGTASPAPSSRDRSGGFGHSRSRSFAVRRPQARIVELLLDLCDTALEISTPAIKEPASQSSGDLRTQSPQSESRISQVLQWQSPGSNTVEQEQGLAALCTDTEAVAKDKVEAVFRHRRVIEYSERIRIEFAVLVQDCIDEAMHKAARIAAGRLSDSTTDEEGDEEGEEEEADQETPSASFPEQPVQNAANVNPSSLTLALRNMELAEKDKNGGPATIQSTRSSSPKECPTPRSHRDALGFLSQTRDSRRGSLLVESEGGDSDGSARSASVASKLPPRTESPISEFGGIRRGASSRQHQRRSLILTGTSSPHRQESPSRGTQPSSPLRISKPRNLQYSQEGVASPEASPMLSHSEFSSPAIIPHHRRQSSAAFPNLSNQPSSPRLNAANPPPPLARAVPPSIKDFEIIKPISKGAFGSVYLSKKKSTGEYFAIKVLKKADMVAKNQVTNVKAERAIMMWQGASDFVAKLYWTFSSKDYLYLVMEYLNGGDCASLVKVLGGLPEDWVKKYLGEVILGVEHLHDRGIIHRDLKPDNLLIDQKGHLKLTDFGLSRMGLIGRQKRALNSGTSDTTPDLLKSGPFARSTSIASSRSTSLDLHGSHPSPSATPQIFPDNSLAQPSYFSLSHVQQEPRRISGQRSDSGGSETLTHMMGTFSLNDVPLPQSSVRSPHDEGSEGGASPDLPSLHHVNSQSSDVRRSTPPQTSMMPPPMALFDPEDTNRRFVGTPDYLAPETISGGRQDETSDWWSVGCIMFEFLYGIPPFHANEADQVFENILARKITWPDDEEMVSPEAQDLMNRLLCIDPQQRLGANREEKYASGGEEIRNHPWFAGTSWDTLLQDEAQFIPQPENPEDTEYFDARGATLQSFTEEMEDQMSPPMASTPDYPDRPHDALSRPRSQIQVNQIKRGLMPLHIPPHIRDLKTRRLSEPVASDDFGSFAFKNLNVLEKANKDVIQQLKAQAMAAQNRSAVVSPGGPQSGTTPSPALEGSPISSAPIQRNLSNAKASASQRPASPSAAAHANASPSRASQPSSPLLVSFHAGSANENRRKASSNSSNLSQQSGVNTLQPGSFFDMARSVPSLQKSTSAAAAMASPIKGKGAAPPPLALSPQKLVATPRQGSGSSTRSRSLTVGSQEGSPVTSELLAHHRNRRSQVFDMSPSSSDNEGERASALLKVQRRRQSSRRMSAIMLDSPTFRSLDVLICEDHPVSRMVMEKLLEKLRCRTISASTGSDAVRYAVGEVKFDIIFTEFKLPEISGTDVARMVREVKNVNSQTPIVAITAYLKELQAPHYFDSLIEKPISSSKLVEVLSNLCQWKPHSHGQPHPLTSPNPISAMKPINTRLEDSPTSGSSYANPSSSSFRGSSREDSISSSLFGDSESVVTDDIPVVVSRKATGDWGDDAGLGISADENFSSSTHHAPIKLVSQESAPAQMEAQRMPVPAQSLEKLRSRREHLETRRRLEGSDSADDEDEEVGATRDRGPRAKPLPPSSKLGIEMMRANSHDSIAVTSETTPEPTTQLVTPSRAQGASPLPSAKPSVAAVAHTPPGTTSGTGSEDNERTPRPPTKTEEKSTSDEPTPRPQVQHSETVLQIR

SEQ ID NO: 11677 - DNA, 6703 bp, Muscodor strobelii
  misc_feature: SGI EST ID NO. CUFF.27995.0
  misc_feature: Variant of the nucleotide sequence at SEQ ID NO 11675
gccgccgaatccttccttcaaccgccgactctcttctgccaggttcactttttgcctcgacgcacccgattcactcccactggctgtatcgttgtgcagttgcattgggtctgttgtctgttatttatctctcttgctcaagccagcacggctgctctgtgtcccccgtctttttcgacaccgtgtctggctgcccaccgagaacatcgtccgtcatcttgatcgtcgagtcccacagaccctcgcccacgagcacaactacagctccggcgcaggcatcggtgccttgctctcgatcgccagcctgagcaacttgagcaacctgaaccgacacacctccgctgcccggcatcgtcatgtctcggtttcctgcccgctgctgacttggctctccgccagcccacctggccagcgccgtgtgcgttccaccttgcaccttgcaccttccaccttctgtgaagccagagctcccgcaacacccgtgccaccctgccacccgccgagcggccgagcggtgacgccagcaacgcgtttgtccgatgtcagctgtgcaattgagccgcgcaaccacctctgcccaccatggaccaagactccagcagactggcggtgcccgccgtcgcctctctccgcagccaggccgtcggcaacgccatggagaggaccctcagccaggacatccgcgaggagcgcgaggagctgcgtgaagccgccgagcagaccctcaatgtcattgtcgacctcaacctcgacggctccatccgctgggtcagcccctcctgggccgatgtcgtcggcacggagcccagcagcgtcgaaggcacccctgtcgccgacctgatcatcagcgagcacaaggccctgttctccgaggccatcgactccatgaagaaggatgactcccggagccaatacatccgcttcaatgtctatctcggccccatgtccaagatgtaccccacagagacggtcacagagcctgatgctgctgagactgggcctgccacggtggaattggaggctcagggcatcatggtctacgaccgtacaacgggtgacgaaagccataccatgtggatgatacggccttggattgcgccacgcgagatcaagatcgatttaccaaccctcatcgtggagtccctcggctctggcgcagaagtccttgcgagctacttgacgaaactagctgagtctggtcaggacgagtccggcaaccagcctcttccaccacctgtgctgtgccggatttgcgagcgtcagattccgccttggtggttcgaaaagcacacggagctatgcttgcaagagcatcgggccgagatggacgtccagatggcccaagaaagcctgacggaacatcgacatgccatcgtcaaggtcctcgacgcgctggaagctcgcaagagtcgcacgctgacagatccctcttcgctccccattgccgagtacaaaggtatggcgatcggcccgtcgtcgagtacatcgtctccgggcacggcatccccggcgccgtcctccagagacagatcaggcggctttggtcactcgcgttctcgatcattcgccgtccgtcggccgcaagcccggatcgtcgagctccttctcgacctttgcgacactgctctggagattagcacacctgcaatcaaggaaccagcttcccaatcatcgggggatctgcgtacacagtctccgcaatcagagtcccgtatttcacaagtactgcaatggcaatcacctggatcaaacactgttgagcaagagcaaggactcgctgcactatgcaccgatacggaggccgtcgccaaagacaaggttgaggcggtttttcgacaccgcagagtcatcgaatattctgagcgtatccgcatcgaattcgctgttcttgtccaggattgcattgatgaggcaatgcacaaagctgcccgtattgcagctggtcgccttagtgattctactacggacgaggagggtgacgaggagggtgaagaggaagaagcagaccaagaaactccgtcggcatcgttccctgaacaacctgttcaaaacgcagccaatgttaacccttcgtcactcactctcgctttgagaaatatggaactagccgagaaggacaagaacggcggtccagctaccatacaatctaccagatcgagcagccctaaagaatgccctacgccgaggtcacaccgagatgctttaggtttcctaagccagacacgagactctcgtcgaggctcattactggttgagagcgaaggcggcgatagtgacggcagtgcaagatcggcttctgtcgcctcaaagctgccgccacgcacagagtctcctatctctgagtttggtggtatacgacgcggcgctagctcacgtcaacatcaacgacgaagcctgatcctaacaggaacttcctcgccgcaccggcaagaatcgccatcaagaggtactcagccttcatcccctctgcggatatcgaaaccgcgtaatctccagtactctcaagagggtgttgcctcaccagaagcatctccgatgctttcgcatagtgaatttagctctccagccatcattccgcaccaccgacggcaatcatctgcggcgttcccgaatctttctaaccaaccatcctcgccacggttgaatgctgctaatcctcctcctccccttgcccgagctgtacccccatccatcaaagattttgaaattattaagccaataagcaagggtgcatttggaagcgtttatctctccaagaaaaaatcaactggcgagtactttgcaatcaaggttctgaagaaggcagacatggttgcgaagaatcaggtaacaaatgtcaaggcggaacgagcaattatgatgtggcagggcgcaagcgatttcgtcgccaagctctattggacattctcgagcaaagactatctataccttgtgatggaatatctcaacggtggagactgcgcatctctcgtcaaggtcctaggcggcctacctgaggattgggtaaagaaatatcttggtgaggtgatcttaggtgtcgaacacctgcatgatcgcggcatcatccaccgagacttgaaacctgataatcttcttattgaccagaaaggtcatctcaaactgaccgattttgggctttctcgtatgggtcttattggtcgtcaaaagagagctctcaacagtggtacttccgatactacgcctgacttgctcaagtcgggcccctttgcacgatcgacatccattgcttcttctcgatcgacctcgttggatttacatgggtcacacccctcgcccagtgccactcctcagatcttccccgacaacagccttgcacagccatcatactttagtctatcccatgttcagcaagaacctcgtcgcatttctggtcagcgtagtgatagtggtggcagcgagacactcacgcacatgatgggcacattctccctcaatgatgtacctttacctcagtcaagtgttcgatccccacatgacgaaggaagtgaaggcggagcctctcctgatctgccatctctccaccacgtaaacagccaaagcagcgatgtgcgccgaagtacgccgcctcagacaagtatgatgccacctccgatggcgctcttcgacccagaagacacgaatcgtagatttgttggaactccggactaccttgcgccagaaacgattagtggcgggcgacaagacgaaacaagcgattggtggtctgttggctgcatcatgtttgagtttctttatggcattcccccatttcacgcaaacgaggccgatcaagtctttgaaaacattctagcccgcaaaatcacatggcccgatgacgaagagatggtatcgcccgaggcccaagacttgatgaaccggctgctgtgcatcgatccgcaacaaagactgggagcaaatagggaagagaagtatgcttcgggtggtgaggagatcagaaaccacccatggtttgctggaacaagctgggacaccttgctacaggacgaagcgcaatttatcccacagccagagaatcctgaggatactgaatactttgatgcccgtggtgcaacactgcaatccttcacggaagagatggaggatcagatgtctccgccgatggcgtccactccggactatccggataggcctcatgacgccctttctcgacctcgatcgcagattcaagtgaatcaaatcaaacgtggcttgatgccgctacatataccacctcacatcagagatctcaagactcgtcggcttagcgaacctgtggcatcagatgattttggctctttcgcgttcaagaatctgaacgtacttgagaaagctaataaggatgtcatccaacaattaaaggcgcaagcgatggcagcgcaaaacaggtccgctgttgtgagccctggtggtcctcaaagtggaacaacaccttcgcctgcgcttgaaggcagtccgatatcgtcagccccgattcagcgaaatctgtctaatgctaaggcttcagcatcgcagcgcccagcctcaccatccgctgcagctcatgccaatgcatccccgagccgagcatcgcaaccttcgtcaccacttctcgtgtctttccatgctggctcagcaaacgaaaatcgccgcaaagcgtctagcaattcctcaaatctgtctcagcaatctggcgtaaacacgttacagccgggaagcttctttgatatggctagatctgttccgagcttgcaaaaatcgacgagtgctgccgctgcaatggcgtcgcctatcaaggggaaaggagctgcgccgccgcctcttgcactctcacctcaaaagcttgttgcaaccccgagacagggcagtgggtcgtcaacgcgttcgcgatctctgactgttggttcgcaggagggtagcccagtgacatcagagcttctggcgcatcatcgtaatcgtcgaagtcaagtctttgatatgtcaccgtcatcctccgataatgagggcgaaagagcaagtgcgctcctgaaggtccagcgccgtcgtcagtcttcacggagaatgtcagctattatgctcgatagcccaacttttcgatccctggatgtgctcatatgtgaagaccatcctgtttcgcgcatggtcatggaaaagctattggagaagctccgctgtcgcactatatctgcttccactggttcggatgctgttcgctacgccgttggcgaagtcaagttcgatatcatttttaccgagttcaagctccctgaaattagtgggactgatgtggctcgcatggttcgagaagtgaagaatgtcaattctcaaacacctattgtggcaatcactgcatacctcaaagaattacaggctccgcactacttcgactcgctcatcgagaagcctatcagttcatccaaacttgtagaagttctttcgaacttatgtcaatggaaaccacactctcacggccagcctcacccgctaacaagccccaaccctatctcagcaatgaagcccatcaatactcgcctcgaggacagccctacatccgggtcgtcatacgccaaccccagtagcagtagcttccgcggctcgagccgagaggactccatcagctccagtctatttggtgattcggaatcagtggtcacagatgacataccagtcgtcgtgtcgcgcaaagccaccggagactggggcgatgacgctggacttggtatcagtgctgacgagaacttctcaagctcgacgcatcacgcacctatcaaactggtgtctcaagagtcagcccctgcacaaatggaagcacaacgcatgcctgtcccggctcaatctttagaaaagctgaggtctaggcgtgagcatctagagaccagaagacgtctagaaggcagcgattcggcggatgacgaagacgaggaggtgggcgccacgcgagatcgtggtcctcgtgctaaaccacttcctccgagctccaagctaggcattgaaatgatgagagcaaacagccatgacagcattgcagtcacgtccgagacaacaccagaaccaaccactcaactcgtgacaccttcgagagcacaaggtgcttcccccctccccagcgcaaagccctcggttgcagccgtggcgcatacgcctccaggaactacgtcaggaactggaagtgaagacaatgaacggacgccccgtccacctaccaaaacggaagaaaaaagtacttccgacgaacccactcctcgaccgcaggttcagcattccgaaacggtattacagattcggtaggatatgcctgaggtgattttcacagtaacagcaaggcgttgatggaatggggtatgtgaatgacgcatttatttcctttgtgtgcacgtttacgggaatggagtcatgatttcatagtgggatgaatcagtcgtaaaataccgccaggctaagagaagacgatacatctacgggatccaacctccacaagtcacgagattgacgaatcattcttttgctcgattttgctccagcgagaagattggatcgccgtgtatcagtatccctagctctctttcttgtggcgtttcaacaagtagtgcaaatgatatattgccagccgcaatgcaataagacaccgataggactcattcgctgcttatgtacattgaactggctggaaggatgtaaatatgtcacgattaagatagtcacgaggtttctcaatgcctttacaact

SEQ ID NO: 11678 - DNA, 1272 bp, Muscodor strobelii
  misc_feature: SGI cDNA ID NO. 563759
  misc_feature: Encodes the peptide sequence at SEQ ID NO 11679
atgcccccgctgcctaccagccagcagcctggggaccaccccgggagccgatccacagtgcaacagcgacagcggaacgatggtcagtcgtcgcggttaaaccacgacactcagtatttcagcccttcgacagagtcgtgggtcgaggtctcgtcgcagccgtcgtcttcgtccgtgtcttccatcggtgacgacatcgtcaccacgggcctcaatgttggctcgtcctaccggccgcgccggcgtcgcttacacccacattcctacccccggaatgctattactagccaccccgctaccgccaacaccagcagtcaggacgaatacgatgagactgaaagcgaagaagatcatcttttgaatagttccaccgaaaatcttgtctcaggccagccgaatcagacacctctacgccaagtcttctctgcacaagtcgcaatggacgactcgagtgacgaggatgacgacgagaacgcaacggctcttggacgtctgccctctgagccatttcgcccgcagccaaatgtattttcacaccctccatctcatctacagcaccgtcactcaaccagctcggccatccctcaccatagaccgtctttcagccgacggtcgcacacgcgcgtcgatcctcacagcccgaattttatgtcgcccaactatcaggctgataacgatgctgcattgcgcgccagtctgaccactctgctcagctgtgccgcggctgcaagagggctacccagagatggcgacaaggagaaagcagaagatcgccctgcgccggctcgtggcggtcagcctgttgaacttcgccttgtacctgagcgtgagctgatggctacatcgcctactcagcccgcaccagcggccccggccttatcaagggcctctactaaaacagggacttcatcgccttcatccgcacccttggccgtagctggcgagaagatcaaacgctcagcaacgccaacgtcaggttccaagtctccacgcgcaaccaagaagaagagaacgactgctgctagtgaagacgctttcatcagcccgacgctcatgacctgggtcttcagtgctggcgtagtcgttctcgtttcggtcgttggttttggagcaggttacgtgatcgggagagaggcaggccgccaggaaacattgaatagtctcgctggtgggaacacgagttgcggcggagaagtcattaggagcggtggcggaactttgaggaggtttcggtttggaagtgggatgggaaggagtgttgttacggcttga

SEQ ID NO: 11679 - protein, 423 aa, Muscodor strobelii
  misc_feature: SGI Peptide ID NO. 563759
  misc_feature (25)..(421): NCBI GI: 171687831 Blast Desc: protein product [Podospora anserina] gi|170943877|emb|CAP69529.1| protein product [Podospora anserina]
  misc_feature (45)..(421): NCBI GI: 46108234 Blast Desc: FG00999.1 [Gibberella zeae PH-1]
  misc_feature (45)..(421): NCBI GI: 226500230 Blast Desc: LOC100273573 [Zea mays] gi|194704684|gb|ACF86426.1| [Zea mays]
  misc_feature (38)..(421): NCBI GI: 85111279 Blast Desc: NCU03091 [Neurospora crassa OR74A] gi|28925604|gb|EAA34625.1| [Neurospora crassa OR74A]
  misc_feature (23)..(421): NCBI GI: 116180412 Blast Desc: CHGG_00834 [Chaetomium globosum CBS 148.51] gi|88185131|gb|EAQ92599.1| CHGG_00834 [Chaetomium globosum CBS 148.51]
  misc_feature (6)..(421): NCBI GI: 39951014 Blast Desc: MGG_01269 [Magnaporthe grisea 70-15] gi|145020922|gb|EDK05051.1| MGG_01269 [Magnaporthe grisea 70-15]
  misc_feature (45)..(421): NCBI GI: 256735178 Blast Desc: NECHADRAFT_98782 [Nectria haematococca mpVI 77-13-4]
  misc_feature (35)..(423): NCBI GI: 71000289 Blast Desc: conserved [Aspergillus fumigatus Af293] gi|66852476|gb|EAL92801.1| conserved [Aspergillus fumigatus Af293] gi|159127851|gb|EDP52966.1| conserved [Aspergillus A1163]
  misc_feature (40)..(423): NCBI GI: 119492700 Blast Desc: NFIA_069430 [Neosartorya fischeri NRRL 181] gi|119411829|gb|EAW21772.1| conserved [Neosartorya fischeri NRRL 181]
  misc_feature (43)..(417): NCBI GI: 242822487 Blast Desc: conserved [Talaromyces stipitatus ATCC 10500] gi|218712817|gb|EED12242.1| conserved [Talaromyces stipitatus ATCC 10500]
MPPLPTSQQPGDHPGSRSTVQQRQRNDGQSSRLNHDTQYFSPSTESWVEVSSQPSSSSVSSIGDDIVTTGLNVGSSYRPRRRRLHPHSYPRNAITSHPATANTSSQDEYDETESEEDHLLNSSTENLVSGQPNQTPLRQVFSAQVAMDDSSDEDDDENATALGRLPSEPFRPQPNVFSHPPSHLQHRHSTSSAIPHHRPSFSRRSHTRVDPHSPNFMSPNYQADNDAALRASLTTLLSCAAAARGLPRDGDKEKAEDRPAPARGGQPVELRLVPERELMATSPTQPAPAAPALSRASTKTGTSSPSSAPLAVAGEKIKRSATPTSGSKSPRATKKKRTTAASEDAFISPTLMTWVFSAGVVVLVSVVGFGAGYVIGREAGRQETLNSLAGGNTSCGGEVIRSGGGTLRRFRFGSGMGRSVVTA

SEQ ID NO: 11680 - DNA, 2441 bp, Muscodor strobelii
  misc_feature: SGI EST ID NO. CUFF.27726.0
  misc_feature: Variant of the nucleotide sequence at SEQ ID NO 11678
ctgcattgctgttgatcagaggaaatggggcagtagacgatgacaaaaccacaactgatcagtcccgtcccactgatttcactaaatttgtcgagtctcgcatcatctctctccctctcatgacagacaaatcaacgccctgcatcgcgcgacaccttgtatggaccgggtgccaagaggctgctcgtcgagcgatacgtgtctagctgccgcacatcatcacccacagcgcccacagcgagtagaagcgcggggcagcggtgagagcccggccgaacccacctacattgcaccattaaccttcaactgcccggtttaacgaccaaccactctctacctctggctgcgtcttctgtggtctctttctcaagcctcagttacatgctgggcagaatttctccaacatcgtcactttttctgctgatttctctcattttatttgactacataggaacggacagcaacaccaagcaccaccatgcccccgctgcctaccagccagcagcctggggaccaccccgggagccgatccacagtgcaacagcgacagcggaacgatggtcagtcgtcgcggttaaaccacgacactcagtatttcagcccttcgacagagtcgtgggtcgaggtctcgtcgcagccgtcgtcttcgtccgtgtcttccatcggtgacgacatcgtcaccacgggcctcaatgttggctcgtcctaccggccgcgccggcgtcgcttacacccacattcctacccccggaatgctattactagccaccccgctaccgccaacaccagcagtcaggacgaatacgatgagactgaaagcgaagaagatcatcttttgaatagttccaccgaaaatcttgtctcaggccagccgaatcagacacctctacgccaagtcttctctgcacaagtcgcaatggacgactcgagtgacgaggatgacgacgagaacgcaacggctcttggacgtctgccctctgagccatttcgcccgcagccaaatgtattttcacaccctccatctcatctacagcaccgtcactcaaccagctcggccatccctcaccatagaccgtctttcagccgacggtcgcacacgcgcgtcgatcctcacagcccgaattttatgtcgcccaactatcaggctgataacgatgctgcattgcgcgccagtctgaccactctgctcagctgtgccgcggctgcaagagggctacccagagatggcgacaaggagaaagcagaagatcgccctgcgccggctcgtggcggtcagcctgttgaacttcgccttgtacctgagcgtgagctgatggctacatcgcctactcagcccgcaccagcggccccggccttatcaagggcctctactaaaacagggacttcatcgccttcatccgcacccttggccgtagctggcgagaagatcaaacgctcagcaacgccaacgtcaggttccaagtctccacgcgcaaccaagaagaagagaacgactgctgctagtgaagacgctttcatcagcccgacgctcatgacctgggtcttcagtgctggcgtagtcgttctcgtttcggtcgttggttttggagcaggttacgtgatcgggagagaggcaggccgccaggaaacattgaatagtctcgctggtgggaacacgagttgcggcggagaagtcattaggagcggtggcggaactttgaggaggtttcggtttggaagtgggatgggaaggagtgttgttacggcttgatccgcttgatggcttcaaccgacaacactaagagtcgttctcgacgctgtcatcgaagaggaagagttgacgttggtaatgaccgtcgcttgaattggataatcgagcaattggcgtcgcataatcttggttctggccgaagtcatttgtcgggttatgacgacaaattaactcgagtctgtttggattctggaaccatctcggggatcttacactgatgtggtgtcgccttttcgatgtctacgatttagccatctgatatccgggatgaaaatgtcacgattggcacaatgaacgaaatatgcgcaaggagtctttgggaacccgaggacgcatatcacgcatttatatcctggctatgagtgagagtagctcacgagaagactctctatgctttcttttgtctactatgagattcaaataatctcaagttataggatcctaccaagatacgagggtagcttaagcactgggttggagtcacggttgggaatcggggtttccatgacacacagactaatgctggaatgtctcgacgtgatgtggatggaacgaataccctactctagttatataggaggcaaactcataatcaaaataagaccgtgctcaagttgattgtgtgattgtatattagggttcggggaggatactctcagctctagccaacggtgatcatgctgggaacaac

SEQ ID NO: 11681 - DNA, 858 bp, Muscodor strobelii
  misc_feature: SGI cDNA ID NO. 563760
  misc_feature: Reduced expression when VOC is produced
  misc_feature: Encodes the peptide sequence at SEQ ID NO 11682
atgctggcaccgcgctatcttcccatcgcccttgctggaatcagcactgtagtcgcagactctctcacgggtcacgacttcgacttcgaagtttcctatatcacctaccttgataaccacggacctgaattcacaacatccgaccctccaaaagatgcagtcaaagcatcagtcgctgttctcgagcagcccaagatcacacttaccaagccgtccaaagatgcgttggcggacttatacatctcgttcctagaaatcaccaaagtctcaacaataagcgaaagagacacgataccagaagactacatattcccctgggtcaaaacgaatcagagcgcagggccagacggactactcgcgatcgacctcgcatatttcgacaactcaaaatttttaacaaatgagatgcacaacgctacaatccaagtctggaaacagacaccggaagtcctcaaatacataaccgacggcgcagatcccacggcaaagctatcaactctgtggcagaatgcctcgagcgatatcgctggcacgaaacttccatcgctcaattttgagcgtgccagcatcagcctcaaagttcaaaactcaacaggattgtgcaggaatgacgttaattctgatggcgagcctgtgtcagtaaccaaggctgcaacaagtgcatgtggtgcttcgacgacgagtcctactgcctctcagacgtctggtgcgtcacaaaccgaatcaccaacaacgacgacgacaaccggtacaccgagtccgacaaccacgccgggtgcggcatctacgaatctcgtcagtgtaggctgggcgtcgacagcttgtgcatttgtggtgttgttcctatccaccatatag

SEQ ID NO: 11682 - protein, 285 aa, Muscodor strobelii
  misc_feature: SGI Peptide ID NO. 563760
  misc_feature: Useful for introducing or modulating the production of volatile compounds
MLAPRYLPIALAGISTVVADSLTGHDFDFEVSYITYLDNHGPEFTTSDPPKDAVKASVAVLEQPKITLTKPSKDALADLYISFLEITKVSTISERDTIPEDYIFPWVKTNQSAGPDGLLAIDLAYFDNSKFLTNEMHNATIQVWKQTPEVLKYITDGADPTAKLSTLWQNASSDIAGTKLPSLNFERASISLKVQNSTGLCRNDVNSDGEPVSVTKAATSACGASTTSPTASQTSGASQTESPTTTTTTGTPSPTTTPGAASTNLVSVGWASTACAFVVLFLSTI

SEQ ID NO: 11683 - DNA, 1738 bp, Muscodor strobelii
  misc_feature: SGI EST ID NO. CUFF.27753.0
  misc_feature: Variant of the nucleotide sequence at SEQ ID NO 11681
aaaggggccaaatcatcgccgttggaatgcggggagatgatataattatctagataccctgtttgcatatattttttttagcttcttgacatgtttcttgatgtttcgattgacgtacgatatgaggacttgttgataaagtgatgctatattggaagtgaaacattgccctcccgaactaagacttcgacacacataccatccagtgaatcaccagaaacattgtcgaaaatcgatatcgaaatctcaaacgaaaatattcacgatgctggcaccgcgctatcttcccatcgcccttgctggaatcagcactgtagtcgcagactctctcacgggtcacgacttcgacttcgaagtttcctatatcacctaccttgataaccacggacctgaattcacaacatccgaccctccaaaagatgcagtcaaagcatcagtcgctgttctcgagcagcccaagatcacacttaccaagccgtccaaagatgcgttggcggacttatacatctcgttcctagaaatcaccaaagtctcaacaataagcgaaagagacacgataccagaagactacatattcccctgggtcaaaacgaatcagagcgcagggccagacggactactcgcgatcgacctcgcatatttcgacaactcaaaatttttaacaaatgagatgcacaacgctacaatccaagtctggaaacagacaccggaagtcctcaaatacataaccgacggcgcagatcccacggcaaagctatcaactctgtggcagaatgcctcgagcgatatcgctggcacgaaacttccatcgctcaattttgagcgtgccagcatcagcctcaaagttcaaaactcaacaggattgtgcaggaatgacgttaattctgatggcgagcctgtgtcagtaaccaaggctgcaacaagtgcatgtggtgcttcgacgacgagtcctactgcctctcagacgtctggtgcgtcacaaaccgaatcaccaacaacgacgacgacaaccggtacaccgagtccgacaaccacgccgggtgcggcatctacgaatctcgtcagtgtaggctgggcgtcgacagcttgtgcatttgtggtgttgttcctatccaccatatagctggtctaatagttatggatgaagtttagtaacccaatatactggattgtaagcttaggaaagcagagcgttttgttattgcgccagaattcgagattaacaatacgttgctgacgtcaacggcagctgatataagttgcttaaatgggttttcgtggcgcggtagtttcttgtgagacaacatatatgggaaacggccgagagaagtatgttgcggcctgaagaacggaaaatgggctggacgtttggatcataggtttcatagtagagtgtacattacgtctatatcaacactgatggacatcatggatttcagacaaagggcgggacggaactcggtgaatagatacaggacacaatgcgctgtagattaggcgcaattcgagtatgaaatcggcgttatcagcgtgactctgctattgcgccataccgaaaacgtcggacgttttggtagcgacataccttttgggcaggtatcgcagatagtctgcatcgctgtgacatcgcgtgaggaggtacatgcatgtagggtatcgagcagagatgcccaaaagcttagatcaaactaagattagaaaatggaatatctttgggtcagccggcggggtgttggag

SEQ ID NO: 11684 - DNA, 1410 bp, Muscodor strobelii
  misc_feature: SGI cDNA ID NO. 563761
  misc_feature: Encodes the peptide sequence at SEQ ID NO 11685
atgccccgtacaggactaagttgcagtgatgaacttagcattgcgctaaaggatttcaagtcttggttctcgcccggtgatccaattgtcggcgcggttaatcggaagacagcccttgccgggaactacatagtcaagttgactttttacggtaggactaagactaaaatcgacgtcaaaacgagcaatgcccgaacaatctaccgggggagagcttcactgttcagcgagacacatgtcttgcatcagggtgacattagcgacgacgctcaattcccatttgccctgaccgtgccagaagcaacccagccggggatggtatcacggggtgattcatttcaccgtgccgccaatccccaaggtagatttctttcgtccgaggatgacttgtccaagcaccctttaccatcatcattctactacaaaggcgatcggagcaactggagcgggaagaaacaggaatcatacgttgagtatgtgctagaggcggagcttacagggccaaagacgaagaagataactgccacgtccccacttttcatacatgctcactcaacgccatcgcctattcaggactacaggcttgcgacgcgcagccaattcattggtatcaagtcacgcctcttgttgggagcagcgggtgcagagcaaagcgtctggcagaagagcaaaaacgtcttcagttcgaagacccccaaactagagttcgatctctatatgcaagtgccaagcataatacaactcgagcacccagatcccgtgccgattggcctatacttagttgcattcactaaccctgaacacacatctatccttgataataatagcaagtcgacggacgttccccctgtcgagcttatttcggtcagcaagttgaatctgaaagcgcgcactgagatccgcgccccgggcacattcgttgatcatgagtccggtcgtgatcatgaattcgtattacacccgcgattctctcttccagctccggttccaataccagtacattcactcgggctcaagtcgtcaccacccgtctcttcctcagtcgtacccttccagataggcgaactcctgcaattacgagtagacggcgagggagcgacatgtcaggaagcaagacatgagttcaaggataaccggcgtctacagccgagctttagcacctataatatccatgtctcgtattcactcgagtggaagattgagattcggtgtgctgacgtggtcaagccgtttgaaggcacggtgccggtcacggtactaccgcccagcgagcagcaggaatggctcaagatgcaagagctaggtaccgagggaatgaagaagaattatgatgattttgcaagggctgcagagatagggttgactgggttagacctggtgacgaccatactccagagttttggtggttga

SEQ ID NO: 11685 - protein, 469 aa, Muscodor strobelii
  misc_feature: SGI Peptide ID NO. 563761
  misc_feature (1)..(423): NCBI GI: 261360534 Blast Desc: conserved [Verticillium albo-atrum VaMs.102]
  misc_feature (59)..(426): NCBI GI: 46109416 Blast Desc: FG01590.1 [Gibberella zeae PH-1]
  misc_feature (1)..(412): NCBI GI: 238502371 Blast Desc: conserved [Aspergillus flavus NRRL3357] gi|220691229|gb|EED47577.1| conserved [Aspergillus flavus NRRL3357]
  misc_feature (1)..(412): NCBI GI: 169775731 Blast Desc: [Aspergillus oryzae RIB40] gi|83771067|dbj|BAE61199.1| protein product [Aspergillus oryzae]
  misc_feature (1)..(433): NCBI GI: 261352755 Blast Desc: conserved [Verticillium albo-atrum VaMs.102]
  misc_feature (1)..(302): NCBI GI: 85090049 Blast Desc: NCU05922 [Neurospora crassa OR74A] gi|28919572|gb|EAA28997.1| [Neurospora crassa OR74A]
  misc_feature (8)..(420): NCBI GI: 242805436 Blast Desc: conserved [Talaromyces stipitatus ATCC 10500] gi|218715154|gb|EED14576.1| conserved [Talaromyces stipitatus ATCC 10500]
  misc_feature (9)..(424): NCBI GI: 39952843 Blast Desc: MGG_01866 [Magnaporthe grisea 70-15] gi|145020266|gb|EDK04395.1| MGG_01866 [Magnaporthe grisea 70-15]
  misc_feature (79)..(423): NCBI GI: 256727796 Blast Desc: NECHADRAFT_46453 [Nectria haematococca mpVI 77-13-4]
  misc_feature (23)..(427): NCBI GI: 46133887 Blast Desc: FG09083.1 [Gibberella zeae PH-1]
MPRTGLSCSDELSIALKDFKSWFSPGDPIVGAVNRKTALAGNYIVKLTFYGRTKTKIDVKTSNARTIYRGRASLFSETHVLHQGDISDDAQFPFALTVPEATQPGMVSRGDSFHRAANPQGRFLSSEDDLSKHPLPSSFYYKGDRSNWSGKKQESYVEYVLEAELTGPKTKKITATSPLFIHAHSTPSPIQDYRLATRSQFIGIKSRLLLGAAGAEQSVWQKSKNVFSSKTPKLEFDLYMQVPSIIQLEHPDPVPIGLYLVAFTNPEHTSILDNNSKSTDVPPVELISVSKLNLKARTEIRAPGTFVDHESGRDHEFVLHPRFSLPAPVPIPVHSLGLKSSPPVSSSVVPFQIGELLQLRVDGEGATCQEARHEFKDNRRLQPSFSTYNIHVSYSLEWKIEIRCADVVKPFEGTVPVTVLPPSEQQEWLKMQELGTEGMKKNYDDFARAAEIGLTGLDLVTTILQSFGG

SEQ ID NO: 11686 - DNA, 312 bp, Muscodor strobelii
  misc_feature: SGI EST ID NO. CUFF.27735.0
  misc_feature: Variant of the nucleotide sequence at SEQ ID NO 11684
cgagcacccagatcccgtgccgattggcctatacttagttgcattcactaaccctgaacacacatctatccttgataataatagcaagtcgacggacgttccccctgtcgagcttatttcggtcagcaagttgaatctgaaagcgcgcactgagatccgcgccccgggcacattcgttgatcatgagtccggtcgtgatcatgaattcgtattacacccgcgattctctcttccagctccggttccaataccagtacattcactcgggctcaagtcgtcaccacccgtctcttcctcagtcgtacccttcca

SEQ ID NO: 11687 - DNA, 1833 bp, Muscodor strobelii
  misc_feature: SGI cDNA ID NO. 563762
  misc_feature: Encodes the peptide sequence at SEQ ID NO 11688
atgagcactgaatcctttgactttgtaattgttggaggtggaactgctggcatcgctctggctgcccggcttgccgagctcgctgaccagagcattctcgtgttggaggccggagcggatcatactgatgatcctcgagtcaagacgccggcgctctacacggcactgtttgacaccgatgttgattggggatacaagactgtaccacaacctactttgaatcaacgaaccatcagcctgagccaaggcaagactcttggaggctcgtcatgcatgaatgcacaggtttatgcaccacctactcaagcagttctcgatgcctgggctaaactgggaaatgatggatgggagtggagcaaaatgagcaactactacactaaggcgttttcacgacccgaagtacctgaagttcacaagcgctcacttggaatccagcattggccatcatcaaataacacctcgtgtggtcccgtgcggtgttcttatcctggagaccattcccatcctgttcgtaggctgtgggccgagacgttccaacagaaaggctaccttgcgaacgaagatccttggctttgtgcttccgtcggagcattcagcaatatcgccagcattgactcggattctaaggagcgtagtcatgcagtcagatcatatttagctggatctccccatcgaccaaaccttcgaattgttctcggtgctcacgccgagaaggtcctatttatagatgaccgcaatttaaaccgagccgtaggtgtccaatatcgacatgagaacattgtgaagcaggccaccgcccataaagaagtcatcattgcagccggagccttgcagtcaccaaaactgctcgagttatctggaatcggcaacccgaaaattcttgacaaatacaacatcgagatcgtcaagagcctccccggtgtcggggagaacctccaagatcatctcgcatgtgacgtctcgtttgcagctgtaaacgaactcgagacactagattcgcttataagagaagaaccacatgtattggaagaagcgatgggcaagtacatgcagcaacgcgaagggccgttaacttcaagtggcatcatgacgtatgcctatctccccgtcatgaactccgtctctggggctggccacgagacgttgatcaagcttatcaacaacaaccgtcccccagctgcaatgattggtgaaaatggtcgagcttcaacatattatggcttagctgaatctacgctgctcgatcccatgcaggcctctggtgcttatctcacagtcataggacagaacccagtcgcaacagatcctaccactggcggacgatcgcctcctcaacctggcaaatacttcactatcgcggccgtgttgacccagccactctctcgtcgcactgtgcatattgtatccaaggactgtactgacctgccagagatcgaccccagatatctctccaaccctcttgatatcgaagtcttcacacggcacattttatacatcaaatcgattgcaaactcttctcctctcaatggcatactcaaacaaccgcttcaagggtcgtcgtcgtcggcagattttgccgatataagctctgccaagcgatatatggagtcacgaaccacttctatgtggcatctcgctggaacttgttcaatgcttcctgaagagattggaggagttgtagattctaacttgagagtttacgggatcaacaaccttaggatcgtggactccagcgtggtaccattgcttccgcccgggaatctacagtcgacggtttacgcacttgccgagagggctgcagacctgatcaaagccgcacatggaatgctataa

SEQ ID NO: 11688 - protein, 610 aa, Muscodor strobelii
  misc_feature: SGI Peptide ID NO. 563762
  misc_feature (452)..(599): Pfam Id: PF05199 Pfam Desc: GMC oxidoreductase
  misc_feature (6)..(331): Pfam Id: PF00732 Pfam Desc: GMC oxidoreductase
  misc_feature (7)..(38): Pfam Id: PF01266 Pfam Desc: FAD dependent oxidoreductase
  misc_feature (7)..(43): Pfam Id: PF00890 Pfam Desc: FAD binding domain
  misc_feature (534)..(599): Pfam Id: PF05199 Pfam Desc: GMC oxidoreductase
  misc_feature (6)..(128): Pfam Id: PF00732 Pfam Desc: GMC oxidoreductase
  misc_feature (210)..(317): Pfam Id: PF00732 Pfam Desc: GMC oxidoreductase
  misc_feature (7)..(40): Pfam Id: PF05834 Pfam Desc: Lycopene cyclase protein
  misc_feature (7)..(40): Pfam Id: PF07992 Pfam Desc: Pyridine nucleotide-disulphide oxidoreductase
  misc_feature (5)..(604): NCBI GI: 238508294 Blast Desc: glucose-methanol-choline (gmc) oxidoreductase, [Aspergillus flavus NRRL3357] gi|220688863|gb|EED45215.1| glucose-methanol-choline (gmc) oxidoreductase, [Aspergillus
  misc_feature (6)..(604): NCBI GI: 145248171 Blast Desc: An13g01960 [Aspergillus niger] gi|134081083|emb|CAK41595.1| protein product [Aspergillus niger]
  misc_feature (5)..(604): NCBI GI: 169784540 Blast Desc: [Aspergillus oryzae RIB40] gi|83775478|dbj|BAE65598.1| protein product [Aspergillus oryzae]
  misc_feature (7)..(604): NCBI GI: 225560142 Blast Desc: glucose-methanol-choline oxidoreductase [Ajellomyces capsulatus G186AR]
  misc_feature (7)..(604): NCBI GI: 154288082 Blast Desc: [Ajellomyces capsulatus NAm1] gi|150408477|gb|EDN04018.1| [Ajellomyces capsulatus NAm1]
  misc_feature (7)..(605): NCBI GI: 145247064 Blast Desc: An12g07280 [Aspergillus niger] gi|134080508|emb|CAK46356.1| protein product [Aspergillus niger]
  misc_feature (7)..(609): NCBI GI: 171678515 Blast Desc: protein product [Podospora anserina] gi|170937327|emb|CAP61985.1| protein product [Podospora anserina]
  misc_feature (7)..(605): NCBI GI: 256726130 Blast Desc: NECHADRAFT_94455 [Nectria haematococca mpVI 77-13-4]
  misc_feature (3)..(605): NCBI GI: 261356447 Blast Desc: choline dehydrogenase [Verticillium albo-atrum VaMs.102]
  misc_feature (4)..(603): NCBI GI: 119501657 Blast Desc: aryl-alcohol dehydrogenase, [Neosartorya fischeri NRRL 181] gi|119415751|gb|EAW25688.1| aryl-alcohol dehydrogenase, [Neosartorya fischeri NRRL 181]
  misc_feature (3)..(605): SWISSPROT Homolog: EC 1.1.99.32 L-sorbose 1-dehydrogenase
MSTESFDFVIVGGGTAGIALAARLAELADQSILVLEAGADHTDDPRVKTPALYTALFDTDVDWGYKTVPQPTLNQRTISLSQGKTLGGSSCMNAQVYAPPTQAVLDAWAKLGNDGWEWSKMSNYYTKAFSRPEVPEVHKRSLGIQHWPSSNNTSCGPVRCSYPGDHSHPVRRLWAETFQQKGYLANEDPWLCASVGAFSNIASIDSDSKERSHAVRSYLAGSPHRPNLRIVLGAHAEKVLFIDDRNLNRAVGVQYRHENIVKQATAHKEVIIAAGALQSPKLLELSGIGNPKILDKYNIEIVKSLPGVGENLQDHLACDVSFAAVNELETLDSLIREEPHVLEEAMGKYMQQREGPLTSSGIMTYAYLPVMNSVSGAGHETLIKLINNNRPPAAMIGENGRASTYYGLAESTLLDPMQASGAYLTVIGQNPVATDPTTGGRSPPQPGKYFTIAAVLTQPLSRRTVHIVSKDCTDLPEIDPRYLSNPLDIEVFTRHILYIKSIANSSPLNGILKQPLQGSSSSADFADISSAKRYMESRTTSMWHLAGTCSMLPEEIGGVVDSNLRVYGINNLRIVDSSVVPLLPPGNLQSTVYALAERAADLIKAAHGML

SEQ ID NO: 11689 - DNA, 663 bp, Muscodor strobelii
  misc_feature: SGI cDNA ID NO. 563763
  misc_feature: Encodes the peptide sequence at SEQ ID NO 11690
atgagattctttctatacacagcgctcttagccttgtcagcgctgtcaagagtcaccgcgcaatgtgatacggacatcccctccacaattgcagacgggccttttgccttacatgtcaaaggcaaaactgcgaacagcactatcgacggctatcttcacatggttcttggtgacccgactacaggaaatgtgatgcagtatgaggccatatctacgcctgtcgttgatgattcgtcctaccgcttttacttcaactacacgggacgacaaatggacggtaatgcacaactcggagtattgaattcggactacacagtcgaagaaccgaatatctgtggggtgataggtcacactgtaggtctcttctatcgacccatcacgaatgtggcgatttcggtaatgggcggtggtccggcagaggcagtaggcttcaatgagcataaacaggtgtttctttattactatgtcaatgacgagtcgtggagacctggaccgtatccgggcgatgtttatggtcgctattataagtggcaactgtgttggcagaagctaggcgcgatttatgcaccggtcttaagctgggtcgggatagggacgagtcataacccaacctgtgaagctgtcgatgtaaccagggttgacgttcaggttttagtctcctag

SEQ ID NO: 11690 - protein, 220 aa, Muscodor strobelii
  misc_feature: SGI Peptide ID NO. 563763
  misc_feature (32)..(207): NCBI GI: 164423958 Blast Desc: NCU07569 [Neurospora crassa OR74A] gi|157070305|gb|EAA29378.2| NCU07569 [Neurospora crassa OR74A]
  misc_feature (33)..(219): NCBI GI: 171686266 Blast Desc: protein product [Podospora anserina] gi|170943094|emb|CAP68747.1| protein product [Podospora anserina]
MRFFLYTALLALSALSRVTAQCDTDIPSTIADGPFALHVKGKTANSTIDGYLHMVLGDPTTGNVMQYEAISTPVVDDSSYRFYFNYTGRQMDGNAQLGVLNSDYTVEEPNICGVIGHTVGLFYRPITNVAISVMGGGPAEAVGFNEHKQVFLYYYVNDESWRPGPYPGDVYGRYYKWQLCWQKLGAIYAPVLSWVGIGTSHNPTCEAVDVTRVDVQVLVS

SEQ ID NO: 11691 - DNA, 954 bp, Muscodor strobelii
  misc_feature: SGI EST ID NO. CUFF.27747.0
  misc_feature: Variant of the nucleotide sequence at SEQ ID NO 11689
ttgaaagttaacatttgacgtatcagtactctccccagaaaactgaaagctgaaaacattataacttgctcataccaaccctagatatctgtttacaggttttcggaacacatggagttatgatcaatcggcgctggtactcgaagttgaacgatgagattctttctatacacagcgctcttagccttgtcagcgctgtcaagagtcaccgcgcaatgtgatacggacatcccctccacaattgcagacgggccttttgccttacatgtcaaaggcaaaactgcgaacagcactatcgacggctatcttcacatggttcttggtgacccgactacaggaaatgtgatgcagtatgaggccatatctacgcctgtcgttgatgattcgtcctaccgcttttacttcaactacacgggacgacaaatggacggtaatgcacaactcggagtattgaattcggactacacagtcgaagaaccgaatatctgtggggtgataggtcacactgtaggtctcttctatcgacccatcacgaatgtggcgatttcggtaatgggcggtggtccggcagaggcagtaggcttcaatgagcataaacaggtgtttctttattactatgtcaatgacgagtcgtggagacctggaccgtatccgggcgatgtttatggtcgctattataagtggcaactgtgttggcagaagctaggcgcgatttatgcaccggtcttaagctgggtcgggatagggacgagtcataacccaacctgtgaagctgtcgatgtaaccagggttgacgttcaggttttagtctcctagacttacaaaacatggtatctgagcgatccagggtcaggtgctgtatgtcagatgcctggattctaattagatatagagatcatgatgtgtttaagaaaacagctaccaagtagtcgcgagcacaagaatcaaaaaaat

SEQ ID NO: 11692 - DNA, 390 bp, Muscodor strobelii
  misc_feature: SGI cDNA ID NO. 563764
  misc_feature: Elevated expression when VOC is produced
  misc_feature: Encodes the peptide sequence at SEQ ID NO 11693
atgtcctctatctttcaatcgctcgaggcagaagatctcaatgaccttgagaggccggttttcgatgtgctcaaggccagcattcaataccctaccaccgacaaagtgctgccaaggcggcttgccgacgatatcgttttcttctgtcggtcggccgatggggatgatgagtacgaggggattttaactggtgtgtggcgtttgagctttgatatgatttgttgcatcccgtcagatcatacatggcaagactcttgggtcaatgccataaaagaactcaagggtcgcggaactcttcctgccaggaatgacaatggctatgacctcgcatgggaagaccttccttgcttcctaatagaactggatacacacttgagtaggatcgtctga

SEQ ID NO: 11693 - protein, 129 aa, Muscodor strobelii
  misc_feature: SGI Peptide ID NO. 563764
  misc_feature: Useful for introducing or modulating the production of volatile compounds
MSSIFQSLEAEDLNDLERPVFDVLKASIQYPTTDKVLPRRLADDIVFFCRSADGDDEYEGILTGVWRLSFDMICCIPSDHTWQDSWVNAIKELKGRGTLPARNDNGYDLAWEDLPCFLIELDTHLSRIV

SEQ ID NO: 11694 - DNA, 1126 bp, Muscodor strobelii
  misc_feature: SGI EST ID NO. CUFF.27756.0
  misc_feature: Variant of the nucleotide sequence at SEQ ID NO 11692
gcgtgccccagagaattataaaaattcaacgtttgtctatattctacttgcgacttggacgacaaagatttctcattgatccatttcacgcgctgaaatttggccctcgcaatcacaaaatgtcctctatctttcaatcgctcgaggcagaagatctcaatgaccttgagaggccggttttcgatgtgctcaaggccagcattcaataccctaccaccgacaaagtgctgccaaggcggcttgccgacgatatcgttttcttctgtcggtcggccgatggggatgatgagtacgaggggattttaactggtgtgtggcgtttgagctttgatatgatttgttgcatcccgtcagatcatacatggcaagactcttgggtcaatgccataaaagaactcaagggtcgcggaactcttcctgccaggaatgacaatggctatgacctcgcatgggaagaccttccttgcttcctaatagaactggatacacacttgaaccgagtctataaaaaagacaacgattttcaaaatctcaactcctttgtggctagactttacacaacagatgtactgcgacacaacaggttcccgattgtgagattgcgcgacgccctggaacgacgcgacaatcaaacacaagactgtcttctttgggttgcaagtgaatggctgattcgctgcgcaaatgatatctatgaagcaatgaatgacactgaaacaatatctgaaaggtctggatggtggaatcttggggagggatttgctaacagggaaagtatcacgccttttagtgtaaatcgatggaatttgtggaaagaacggatatcagaggaaagggacaaattgttatcgtctgattctggatctgcagcatctggtcttgcggagcgattagagagagctctggtgaaaatgagagaggcggagaaactagcatagtagaacgttgttagaacgacatatttagtgaatgatacacaagcaccgggcgatgatcgtggaagcttgcggaagtgtagtaggcgctcatgtaggaagagtaatgatgggatgaccttccatctatcttccgagtaaaccagcgaataacactcacatatatatatacacctgaacccttatatcac

SEQ ID NO: 11695 - DNA, 1032 bp, Muscodor strobelii
  misc_feature: SGI cDNA ID NO. 563765
  misc_feature: Encodes the peptide sequence at SEQ ID NO 11696
atggcttctcagaacgtcctagccccggtctcgagctcaaagctgagcgaacaactgccaggaagtgttgcagcgagacaatctacccctctataccaaagaaatggaccaagcagctcgccaatgacccttctcgggttgatacggcatgaagtgctggtgactgagcgtctccttcggtccaacttcgtagcattcctcttcatattcttgggtggactgctgtcaagggttatcgccgcccctgtgtccataatcgacactgccataggcacgggcaaagccctggccgttgggctgttgtgcagctatattttcgacatctgcaaccagactacctcaccggctgaggactacattaacaagccacatcgccctatccccgcgggtctgatcacagttgagcagggccagactcggtggatcttggtatgggcgctcggccctcttgtcatgtaccatttcttcggcatctgggctgcgggacatttagtcgagtgggaagccctcataactttctgctacgtgtggccgcggtggttttcttggtttatgcgcaatttcttcgcctcgttcgcttacttcatcctcggacggcttcttaaccaggtcttagcgaccgagagtttcccagctacttgggatatcagctttcttgtggatgctactatattcgcctggttcatggggaccatccacattcaagaattttatgatctcgaaggcgatcgcaacagtgatcgcaaaacactaccaatgctgctgtcagagcgtggcctccgcgacctgagagctggcacgtcaatctatctactcgcatttggtagtgcttttgcctctgcgagttctcaaaggatggatcaggactgtatcacagcgcccatctctgtactccagcttacatcgtcctgcatccttgcctatcgggtatgggcatctacatcgccggagatggatcggaaaacatatcatgtctactactacattccggctctcctcatcttgttgtcgttggtgctcatcaccatatag

SEQ ID NO: 11696 - protein, 343 aa, Muscodor strobelii
  misc_feature: SGI Peptide ID NO. 563765
  misc_feature (38)..(343): NCBI GI: 145234931 Blast Desc: An03g02150 [Aspergillus niger] gi|134057790|emb|CAK38185.1| protein product [Aspergillus niger]
  misc_feature (48)..(342): NCBI GI: 121710796 Blast Desc: UbiA prenyltransferase family protein [Aspergillus clavatus NRRL 1] gi|119401164|gb|EAW11588.1| UbiA prenyltransferase family protein [Aspergillus clavatus NRRL 1]
  misc_feature (48)..(275): NCBI GI: 159128744 Blast Desc: UbiA prenyltransferase family protein [Aspergillus fumigatus A1163]
  misc_feature (48)..(275): NCBI GI: 70988962 Blast Desc: UbiA prenyltransferase family protein [Aspergillus fumigatus Af293] gi|66846962|gb|EAL87293.1| UbiA prenyltransferase family protein [Aspergillus fumigatus Af293]
  misc_feature (48)..(343): NCBI GI: 119498009 Blast Desc: UbiA prenyltransferase family protein [Neosartorya fischeri NRRL 181] gi|119413926|gb|EAW23865.1| UbiA prenyltransferase family protein [Neosartorya fischeri NRRL 181]
  misc_feature (31)..(336): NCBI GI: 238502359 Blast Desc: conserved [Aspergillus flavus NRRL3357] gi|220691223|gb|EED47571.1| conserved [Aspergillus flavus NRRL3357]
  misc_feature (50)..(336): NCBI GI: 169775717 Blast Desc: [Aspergillus oryzae RIB40] gi|83771060|dbj|BAE61192.1| protein product [Aspergillus oryzae]
  misc_feature (117)..(272): NCBI GI: 169780674 Blast Desc: [Aspergillus oryzae RIB40] gi|83773541|dbj|BAE63668.1| protein product [Aspergillus oryzae]
  misc_feature (103)..(280): NCBI GI: 119474053 Blast Desc: NFIA_003610 [Neosartorya fischeri NRRL 181] gi|119407055|gb|EAW17005.1| NFIA_003610 [Neosartorya fischeri NRRL 181]
  misc_feature (101)..(328): NCBI GI: 149916785 Blast Desc: PPSIR1_05473 [Plesiocystis pacifica SIR-1] gi|149822502|gb|EDM81891.1| PPSIR1_05473 [Plesiocystis pacifica SIR-1]
MASQNVLAPVSSSKLSEQLPGSVAARQSTPLYQRNGPSSSPMTLLGLIRHEVLVTERLLRSNFVAFLFIFLGGLLSRVIAAPVSIIDTAIGTGKALAVGLLCSYIFDICNQTTSPAEDYINKPHRPIPAGLITVEQGQTRWILVWALGPLVMYHFFGIWAAGHLVEWEALITFCYVWPRWFSWFMRNFFASFAYFILGRLLNQVLATESFPATWDISFLVDATIFAWFMGTIHIQEFYDLEGDRNSDRKTLPMLLSERGLRDLRAGTSIYLLAFGSAFASASSQRMDQDCITAPISVLQLTSSCILAYRVWASTSPEMDRKTYHVYYYIPALLILLSLVLITI

SEQ ID NO: 11697 - DNA, 1578 bp, Muscodor strobelii
  misc_feature: SGI cDNA ID NO. 563766
  misc_feature: Encodes the peptide sequence at SEQ ID NO 11698
atggctatcggcgcgaactcgatcatcgttgcgcttgtgatcttatcactgctttatgctctcagaaatgtcggccgacgacctaagggttatccgccgggcccgccgactcttcctataattggcaatttgcatcttatgcctaaggagaagggtcatctacaattccacaaatgggctgaagaatatggatcgatctactccctggttcttggcacgaaggtgatgattgtgttatcctcggaccaagtagtgaaagacctgctagacaagagaagcactgtttattcatcgcgaccggacatgtatcttgcgagcgatatcgcaagtggcggactccgcgtgctgctcatggaatacggggaacaatggcggatgatccgtgggatcattcacaatagccttaacatcaaggctgcacgaacatatgttccataccaagatctcgaaaacaaggcgatgctgctcggctttcttgaagaaccgtcccgatttagggagcacattcagcgatataccacttctatttcaacgcaaatgatatacggcttcagggtagcaacttacgacgatcctaggctgaagaaattgttccattgcgctgagaagtggagcgaagtagctggaagccaaagcgcagcactgcttgacgtctttccgattttacgacatctacccgatgcgttccttccgatgcgacggtatgccaaagagttacatcgaaaagaatatgagttcatggtcggattatacatcgagacgaagaagaaattaaaagcgggcacggccaagccttgcgtctgtgcagagtttgttcgggcgcaggacgagcttaagttctctgacggtattgccggttacactggcggatctcttctccaagccgggtcagatacgtcggcgcagaccttgatcgcatttgtgcaggccatgttgctgttcccagaagtctttaaaatggcacaagcggaagttgacaggatctgcggtgaccgactgccagacttaaatgattttccggagatgccatacatcaggggctgtgttaaggagagcatgcgctggatgccaactgctatccttggtattcctcattcgactacgcgcgacgatgaatatatgggccaccgcatccccaaaggtgcgacagtagtcttgaatgtttggggaattcacaatgacgatcgtcgtcacccagatccacgacgattcgaccctgggcgatgggcggacgaccgtcagacctcatcagaagctgcacttaatagagatgcttcaaaacgcgaccagttcgtgtttggggccggcaggcgtatttgccaaggaatgcatattgctgatagaaacttgttcctaggcatgtcgcgaatgttatgggcgttcgatataacccgggctgttgacaaatttaccggaaaagagatcgttccagatatgactgccctatcggacgggctactagtggggcccaagcccttcacagctattttgaagccccgcagcgcgtttaaggaagagcaggttcgcgcggaatggcagcaagtgaggacgttgcttgacgacgagctacagtggtaa

SEQ ID NO: 11698 - protein, 525 aa, Muscodor strobelii
  misc_feature: SGI Peptide ID NO. 563766
  misc_feature (32)..(497): Pfam Id: PF00067 Pfam Desc: Cytochrome P450
  misc_feature (12)..(525): NCBI GI: 242773378 Blast Desc: cytochrome P450, [Talaromyces stipitatus ATCC 10500] gi|218721847|gb|EED21265.1| cytochrome P450, [Talaromyces stipitatus ATCC 10500]
  misc_feature (13)..(525): NCBI GI: 119483586 Blast Desc: Cytochrome P450 oxidoreductase, [Neosartorya fischeri NRRL 181] gi|119409852|gb|EAW19799.1| Cytochrome P450 oxidoreductase, [Neosartorya fischeri NRRL 181]
  misc_feature (21)..(525): NCBI GI: 171678956 Blast Desc: protein product [Podospora anserina] gi|170937549|emb|CAP62206.1| protein product [Podospora anserina]
  misc_feature (8)..(525): NCBI GI: 259484285 Blast Desc: TPA: cytochrome P450, (Eurofung) [Aspergillus nidulans FGSC A4]
  misc_feature (19)..(525): NCBI GI: 212530062 Blast Desc: cytochrome P450, [Penicillium marneffei ATCC 18224] gi|210074586|gb|EEA28673.1| cytochrome P450, [Penicillium marneffei ATCC 18224]
  misc_feature (1)..(525): NCBI GI: 171694638 Blast Desc: protein product [Podospora anserina] gi|170947561|emb|CAP59722.1| protein product [Podospora anserina]
  misc_feature (8)..(525): NCBI GI: 255944711 Blast Desc: Pc20g05940 [Penicillium chrysogenum Wisconsin 54-1255] gi|211587858|emb|CAP85923.1| Pc20g05940 [Penicillium chrysogenum Wisconsin 54-1255]
  misc_feature (12)..(525): NCBI GI: 85111866 Blast Desc: NCU11242 [Neurospora crassa OR74A] gi|28925910|gb|EAA34906.1| NCU11242 [Neurospora crassa OR74A] gi|38566928|emb|CAE76231.1| related to O-methylsterigmatocystin
  misc_feature (7)..(525): NCBI GI: 240111106 Blast Desc: Cytochrome P450 family protein [Coccidioides posadasii C735 delta SOWgp]
  misc_feature (9)..(525): NCBI GI: 46139749 Blast Desc: FG11389.1 [Gibberella zeae PH-1]
  misc_feature (53)..(500): SWISSPROT Homolog: EC 1.14.14.1 Unspecific monooxygenase
MAIGANSIIVALVILSLLYALRNVGRRPKGYPPGPPTLPIIGNLHLMPKEKGHLQFHKWAEEYGSIYSLVLGTKVMIVLSSDQVVKDLLDKRSTVYSSRPDMYLASDIASGGLRVLLMEYGEQWRMIRGIIHNSLNIKAARTYVPYQDLENKAMLLGFLEEPSRFREHIQRYTTSISTQMIYGFRVATYDDPRLKKLFHCAEKWSEVAGSQSAALLDVFPILRHLPDAFLPMRRYAKELHRKEYEFMVGLYIETKKKLKAGTAKPCVCAEFVRAQDELKFSDGIAGYTGGSLLQAGSDTSAQTLIAFVQAMLLFPEVFKMAQAEVDRICGDRLPDLNDFPEMPYIRGCVKESMRWMPTAILGIPHSTTRDDEYMGHRIPKGATVVLNVWGIHNDDRRHPDPRRFDPGRWADDRQTSSEAALNRDASKRDQFVFGAGRRICQGMHIADRNLFLGMSRMLWAFDITRAVDKFTGKEIVPDMTALSDGLLVGPKPFTAILKPRSAFKEEQVRAEWQQVRTLLDDELQW

SEQ ID NO: 11699 - DNA, 753 bp, Muscodor strobelii
  misc_feature: SGI cDNA ID NO. 563767
  misc_feature: Encodes the peptide sequence at SEQ ID NO 11700
atgaccaactcaccatcaatcatattctacgactttgctggcggcccgggcgaacatccgccaaaactacaagcccctagcccatggaaggttcgatatgcactgaactacaaaggcattccctaccgtacggaatttgtcgatttcccggatattccctcggtgcgccaatctctcggtgtagagacaacggataaatacatcgacggaagcacacgctacactttacctatgctcaaggatgagtcaacaggtgccttaatcggcgagacatgggatattgcggtttatcttgagaaacagtatccgcaaggaccatcgctctttcccaacggaagcattggtctcttgaaaaacttcagcgaatacatggaggaggcttttacaccttttattatgctgagcatcgacgatttccccttcaaccctgagagcgctgatgtcatgaagaacaaaatgttagtgcgcttcgggaagaagtcttgggacgaagtgcccctcaagcccgacgagcgggctcagactctgcagaagctcgagacagagctcacgaaagttgctgccttgtatcagctgacggacgggccgttcatgatgggtggcaacaagccatctttcgcagactttgttgttggttcaagattaggcatgtttaaatgttcgatgaaggagtggagtgacattgaaaaatggaacgacggtgtatggaagcaattgcttcaggcccttgagccgtggcaagaggtcaagtga

SEQ ID NO: 11700 - protein, 250 aa, Muscodor strobelii
  misc_feature: SGI Peptide ID NO. 563767
  misc_feature (5)..(250): NCBI GI: 70985777 Blast Desc: conserved [Aspergillus fumigatus Af293] gi|66846023|gb|EAL86356.1| conserved [Aspergillus fumigatus Af293] gi|159128471|gb|EDP53586.1| conserved [Aspergillus A1163]
  misc_feature (2)..(250): NCBI GI: 119473615 Blast Desc: NFIA_001340 [Neosartorya fischeri NRRL 181] gi|119406836|gb|EAW16786.1| conserved [Neosartorya fischeri NRRL 181]
  misc_feature (68)..(250): NCBI GI: 238587329 Blast Desc: MPER_09130 [Moniliophthora perniciosa FA553] gi|215456103|gb|EEB92371.1| MPER_09130 [Moniliophthora perniciosa FA553]
  misc_feature (1)..(250): NCBI GI: 189205256 Blast Desc: conserved [Pyrenophora tritici-repentis Pt-1C-BFP] gi|187986062|gb|EDU51550.1| conserved [Pyrenophora tritici-repentis Pt-1C-BFP]
  misc_feature (1)..(250): NCBI GI: 115402661 Blast Desc: conserved [Aspergillus terreus NIH2624] gi|114189253|gb|EAU30953.1| conserved [Aspergillus terreus NIH2624]
  misc_feature (2)..(250): NCBI GI: 256722893 Blast Desc: NECHADRAFT_52941 [Nectria haematococca mpVI 77-13-4]
  misc_feature (3)..(250): NCBI GI: 238842800 Blast Desc: conserved [Microsporum canis CBS 113480]
  misc_feature (71)..(250): NCBI GI: 238591165 Blast Desc: MPER_07878 [Moniliophthora perniciosa FA553] gi|215458708|gb|EEB93459.1| MPER_07878 [Moniliophthora perniciosa FA553]
  misc_feature (7)..(250): NCBI GI: 169776856 Blast Desc: [Aspergillus oryzae RIB40] gi|238502041|ref|XP_002382254.1| conserved [Aspergillus flavus NRRL3357] gi|83771630|dbj|BAE61761.1| protein product oryzae]
  misc_feature (1)..(244): NCBI GI: 171689838 Blast Desc: protein product [Podospora anserina] gi|170944881|emb|CAP70993.1| protein product [Podospora anserina]
MTNSPSIIFYDFAGGPGEHPPKLQAPSPWKVRYALNYKGIPYRTEFVDFPDIPSVRQSLGVETTDKYIDGSTRYTLPMLKDESTGALIGETWDIAVYLEKQYPQGPSLFPNGSIGLLKNFSEYMEEAFTPFIMLSIDDFPFNPESADVMKNKMLVRFGKKSWDEVPLKPDERAQTLQKLETELTKVAALYQLTDGPFMMGGNKPSFADFVVGSRLGMFKCSMKEWSDIEKWNDGVWKQLLQALEPWQEVK

SEQ ID NO: 11701 - DNA, 162 bp, Muscodor strobelii
  misc_feature: SGI EST ID NO. CUFF.27774.0
  misc_feature: Variant of the nucleotide sequence at SEQ ID NO 11699
cgaacatccgccaaaactacaagcccctagcccatggaaggttcgatatgcactgaactacaaaggcattccctaccgtacggaatttgtcgatttcccggatattccctcggtgcgccaatctctcggtgtagagacaacggataaatacatcgacggaag

SEQ ID NO: 11702 - DNA, 1137 bp, Muscodor strobelii
  misc_feature: SGI cDNA ID NO. 563768
  misc_feature: Encodes the peptide sequence at SEQ ID NO 11703
atggaacccttgccaccacttcccgggccaaagcttcatcccttttcagacagcaatgacagccttaaaattagatatctccaaaagctcggagttggtcgcgatgctacggtatggaaagtagagatccgggagaaaacgtattccttgaagatttttggattctcattgttccttctcaagaaatacggtattcctccaatgctccgagatcgtgggctcacatccgagctttaccatccatacgcggaccagtttaccgccgaatgccgagcttttggacgtctgaaagaaacaggaaaggagcacctggcggtcaagtgcttcggatatatcatattgaccaaagaacaagagggagatcttattgcagcaggtggtggagacgacgagacactcgagcgagaccatatcaaactcaaagacgagcctttgcgttgtatactgaaggagtacatcgaattggaagataggcccttggaccttaggcctcgtagagttccccgaatgatccgcgacctagatgcagtccatagaatagggatcattatcgaggacattagggaggacaactatctaaatggggtgatgatggacttcagtcgatctgagactgttccgcatccgtatcaggatgttgaattccaagagtttctctattgtcagccgtggaagtactcgacgtcggcacgaggcgacgaggaatgctttgattcgatgatcgaccggtacaacgcgcgtgttcaggaaggcgagctctcaggtcccacaatttgggccagaatgcggcccaatcaacacctgaagaggaaacttaggggtggatcggacggtgaagacgaagacgatgatgatattcgtatttatggccctaacgacctggatgatgtcgacaaatatcccagggttcgtgcggagctttatgactggaagtcagctcaggaagagcgagacaaacaaggattgtctcctatagtcgctattaccgggtccagtgggaggcaagaggtcatccatagcatggacgacgagcagcatgatagcgataatgaatcacttccatctaagagcaagaaaaaggagacaaagaagaagaagaagaagcgaaaggcgaaagcgaaaagaaagcgacgatag

SEQ ID NO: 11703 - protein, 378 aa, Muscodor strobelii
  misc_feature: SGI Peptide ID NO. 563768
  misc_feature (1)..(245): NCBI GI: 256732290 Blast Desc: NECHADRAFT_93838 [Nectria haematococca mpVI 77-13-4]
  misc_feature (1)..(245): NCBI GI: 256722232 Blast Desc: NECHADRAFT_52380 [Nectria haematococca mpVI 77-13-4]
  misc_feature (3)..(213): NCBI GI: 171677145 Blast Desc: protein product [Podospora anserina] gi|170936640|emb|CAP61299.1| protein product [Podospora anserina]
  misc_feature (1)..(241): NCBI GI: 46134137 Blast Desc: FG09208.1 [Gibberella zeae PH-1]
  misc_feature (11)..(209): NCBI GI: 116194294 Blast Desc: [Chaetomium globosum CBS 148.51] gi|88179658|gb|EAQ87126.1| [Chaetomium globosum CBS 148.51]
  misc_feature (1)..(249): NCBI GI: 256724494 Blast Desc: NECHADRAFT_88133 [Nectria haematococca mpVI 77-13-4]
  misc_feature (9)..(248): NCBI GI: 46111095 Blast Desc: FG02429.1 [Gibberella zeae PH-1]
  misc_feature (82)..(245): NCBI GI: 256725568 Blast Desc: NECHADRAFT_81415 [Nectria haematococca mpVI 77-13-4]
  misc_feature (24)..(255): NCBI GI: 238841788 Blast Desc: conserved [Microsporum canis CBS 113480]
  misc_feature (9)..(208): NCBI GI: 256730012 Blast Desc: NECHADRAFT_82569 [Nectria haematococca mpVI 77-13-4]
MEPLPPLPGPKLHPFSDSNDSLKIRYLQKLGVGRDATVWKVEIREKTYSLKIFGFSLFLLKKYGIPPMLRDRGLTSELYHPYADQFTAECRAFGRLKETGKEHLAVKCFGYIILTKEQEGDLIAAGGGDDETLERDHIKLKDEPLRCILKEYIELEDRPLDLRPRRVPRMIRDLDAVHRIGIIIEDIREDNYLNGVMMDFSRSETVPHPYQDVEFQEFLYCQPWKYSTSARGDEECFDSMIDRYNARVQEGELSGPTIWARMRPNQHLKRKLRGGSDGEDEDDDDIRIYGPNDLDDVDKYPRVRAELYDWKSAQEERDKQGLSPIVAITGSSGRQEVIHSMDDEQHDSDNESLPSKSKKKETKKKKKKRKAKAKRKRR

SEQ ID NO: 11704 - DNA, 2076 bp, Muscodor strobelii
  misc_feature: SGI cDNA ID NO. 563769
  misc_feature: Encodes the peptide sequence at SEQ ID NO 11705
atgcaagatgagcggtatcggcgcttgtcaatcgactcgctggagcaagatcctgacgaattcttcgaagtcatcgttcagcagcattccgatccagtgaagaatagcagcgaagatgatgtctcaattaatacctcctcgatcggcctagagcaataccacccataccagggctcgggttctacatatgagctcacatcaacaacgaaacacccggatgtgaacaccacagctcagcctgcccaagcgagacgtcagaccgcttctcgtacccagaataaggtctctgagcgatggcgacggatctggttttacgggtgggtggcggagacgatgggctatcttctgtctatcgtcgctttactggccatcttcgctacgctgcgcatacatgaggacaagccgctgccgaagtggccgttcagcatcagtatcaacgcgctgattgcagtatttggtgtgttgttcaaagcagggttgacaatgccgctgtcggaaggtataagtcaactgaagtggcaatggttcgaaaacaagcgaaggcaactcaacgatttgcaagagtttgactcggccagtcgcggcgcatggggatcttttctgtttctgttcatgggatcgggcgactcacccgcacaacctgcgcgttggtggttatggcccgagagcattggcaagtcattcattgacggattcgcaaccaactttccaagtcatttagcgaaatatgcagcgattttgacggtcttgtccttgctagttgacccaattctgcagcagattgttgtctatgtcaattgcggacagattagcgaaacggacacagcatcggttgcgcgaacaaataactactacaatcagggaggacatatctttgcccaagaagtcgacattgatagtccgatggccgtcgctatcaataccggcatagtgaatccaccagcgtatatcccatcactcataacaacaacgtgcagatcagggaattgcactttcaatggatttgcatccgttggtctatgcagtgcctgtgaagacttgtcgaatcaaacccgaccagcaaactctaccgacggctctctgaacttcactcttccgggcaacctggatagagacggatatggcttcccagccatgtatctttaccaccaatatgcatttcgtagcgccaccacaggctcacttcaaccacgacttctagacctccgcgtcatgagcttgccgaaggacagcccaggtgaaatccaagcgtctgcgttccattgtagcatcgagccctgtgtccacgggtatcatagtcaaatagacaacaacaatcttactcaatctgttcaaacttcaattcccatggggtttaactacaatattatcgacgaccagaatatccactctaacgacacagagtaccgaggcctagctcggtaccgattagccacaagcctggtcaaagtagctaaagagaatgttgacgcggcacctctggaagacgtcagtgataagactggcaatggcgtttcaaaagatccagtgtggtacccagaggattgcgtctttagtttcagaatgggagctgaatacgcgatcagcacgactgttggctcggcactagacgatctcgagatgcagcgtactggcggcgtggaggtgggaccgataactgctaagaacatgtggcggaacggaacagtcgatttagcacacatgcaggatttcacgcaggagctcgccgatgtcatgacggcaactatacgcaataacgggggtgacaagtatgcgtccggtcaagtccttatcaacgatacatgtatcagtgtgcaatgggcctggctcgcatacccggctgtgctactgggcttgtcgattctgttcttgatattgctgatctttcaagcaccgacgggttcatcggcgagggtctggaagtcgtcgattctcgcgccgcttttcgtctctatggatgagacgatgtatgacactaatcactatgatatgtcgaaacatgacatgaatcagtttgcgaaattgattcgtgcgcagcttgttcgagatgcggaggggaaggcgaagttcttgtag

SEQ ID NO: 11705 - protein, 691 aa, Muscodor strobelii
  misc_feature: SGI Peptide ID NO. 563769
  misc_feature (90)..(686): NCBI GI: 189210465 Blast Desc: conserved [Pyrenophora tritici-repentis Pt-1C-BFP] gi|187977657|gb|EDU44283.1| conserved [Pyrenophora tritici-repentis Pt-1C-BFP]
  misc_feature (107)..(677): NCBI GI: 242787121 Blast Desc: conserved [Talaromyces stipitatus ATCC 10500] gi|218721087|gb|EED20506.1| conserved [Talaromyces stipitatus ATCC 10500]
  misc_feature (92)..(649): NCBI GI: 145236391 Blast Desc: An06g00150 [Aspergillus niger] gi|134075297|emb|CAK44931.1| protein product [Aspergillus niger]
  misc_feature (73)..(653): NCBI GI: 115400213 Blast Desc: [Aspergillus terreus NIH2624] gi|114191361|gb|EAU33061.1| [Aspergillus terreus NIH2624]
  misc_feature (98)..(680): NCBI GI: 70985502 Blast Desc: conserved [Aspergillus fumigatus Af293] gi|66845885|gb|EAL86219.1| conserved [Aspergillus fumigatus Af293]
  misc_feature (98)..(680): NCBI GI: 159125812 Blast Desc: conserved [Aspergillus fumigatus A1163]
  misc_feature (82)..(680): NCBI GI: 169782207 Blast Desc: [Aspergillus oryzae RIB40] gi|83774309|dbj|BAE64433.1| protein product [Aspergillus oryzae]
  misc_feature (35)..(682): NCBI GI: 256730090 Blast Desc: [Nectria haematococca mpVI 77-13-4]
  misc_feature (51)..(680): NCBI GI: 240280136 Blast Desc: conserved [Ajellomyces capsulatus H143]
  misc_feature (98)..(658): NCBI GI: 115492355 Blast Desc: [Aspergillus terreus NIH2624] gi|114197665|gb|EAU39365.1| [Aspergillus terreus NIH2624]
MQDERYRRLSIDSLEQDPDEFFEVIVQQHSDPVKNSSEDDVSINTSSIGLEQYHPYQGSGSTYELTSTTKHPDVNTTAQPAQARRQTASRTQNKVSERWRRIWFYGWVAETMGYLLSIVALLAIFATLRIHEDKPLPKWPFSISINALIAVFGVLFKAGLTMPLSEGISQLKWQWFENKRRQLNDLQEFDSASRGAWGSFLFLFMGSGDSPAQPARWWLWPESIGKSFIDGFATNFPSHLAKYAAILTVLSLLVDPILQQIVVYVNCGQISETDTASVARTNNYYNQGGHIFAQEVDIDSPMAVAINTGIVNPPAYIPSLITTTCRSGNCTFNGFASVGLCSACEDLSNQTRPANSTDGSLNFTLPGNLDRDGYGFPAMYLYHQYAFRSATTGSLQPRLLDLRVMSLPKDSPGEIQASAFHCSIEPCVHGYHSQIDNNNLTQSVQTSIPMGFNYNIIDDQNIHSNDTEYRGLARYRLATSLVKVAKENVDAAPLEDVSDKTGNGVSKDPVWYPEDCVFSFRMGAEYAISTTVGSALDDLEMQRTGGVEVGPITAKNMWRNGTVDLAHMQDFTQELADVMTATIRNNGGDKYASGQVLINDTCISVQWAWLAYPAVLLGLSILFLILLIFQAPTGSSARVWKSSILAPLFVSMDETMYDTNHYDMSKHDMNQFAKLIRAQLVRDAEGKAKFL

SEQ ID NO: 11706 - DNA, 2469 bp, Muscodor strobelii
  misc_feature: SGI EST ID NO. CUFF.27781.0
  misc_feature: Variant of the nucleotide sequence at SEQ ID NO 11704
ccgcgcgcaaggatattcagcggcacatactgcatacgaccgagattttacgacgagggtcagcgtgtacgagctgatttggtggctcgcgtgcctgtcagcggcaagaatacccagaatgcccactttgttttcgagcttcggcgatggaaatctggggcgtacaaagtcgaacgactggaaaaagaagcatgcgtcactccctaccatttgatgctctgagcatcaaacttatagccagacacacgcgacgcgatgcaagatgagcggtatcggcgcttgtcaatcgactcgctggagcaagatcctgacgaattcttcgaagtcatcgttcagcagcattccgatccagtgaagaatagcagcgaagatgatgtctcaattaatacctcctcgatcggcctagagcaataccacccataccagggctcgggttctacatatgagctcacatcaacaacgaaacacccggatgtgaacaccacagctcagcctgcccaagcgagacgtcagaccgcttctcgtacccagaataaggtctctgagcgatggcgacggatctggttttacgggtgggtggcggagacgatgggctatcttctgtctatcgtcgctttactggccatcttcgctacgctgcgcatacatgaggacaagccgctgccgaagtggccgttcagcatcagtatcaacgcgctgattgcagtatttggtgtgttgttcaaagcagggttgacaatgccgctgtcggaaggtataagtcaactgaagtggcaatggttcgaaaacaagcgaaggcaactcaacgatttgcaagagtttgactcggccagtcgcggcgcatggggatcttttctgtttctgttcatgggatcgggcgactcacccgcacaacctgcgcgttggtggttatggcccgagagcattggcaagtcattcattgacggattcgcaaccaactttccaagtcatttagcgaaatatgcagcgattttgacggtcttgtccttgctagttgacccaattctgcagcagattgttgtctatgtcaattgcggacagattagcgaaacggacacagcatcggttgcgcgaacaaataactactacaatcagggaggacatatctttgcccaagaagtcgacattgatagtccgatggccgtcgctatcaataccggcatagtgaatccaccagcgtatatcccatcactcataacaacaacgtgcagatcagggaattgcactttcaatggatttgcatccgttggtctatgcagtgcctgtgaagacttgtcgaatcaaacccgaccagcaaactctaccgacggctctctgaacttcactcttccgggcaacctggatagagacggatatggcttcccagccatgtatctttaccaccaatatgcatttcgtagcgccaccacaggctcacttcaaccacgacttctagacctccgcgtcatgagcttgccgaaggacagcccaggtgaaatccaagcgtctgcgttccattgtagcatcgagccctgtgtccacgggtatcatagtcaaatagacaacaacaatcttactcaatctgttcaaacttcaattcccatggggtttaactacaatattatcgacgaccagaatatccactctaacgacacagagtaccgaggcctagctcggtaccgattagccacaagttagcaccctggaactggttcaacgcaagactgccaggccagcgacaagggagggccaggcctggtcaaagtagctaaagagaatgttgacgcggcacctctggaagacgtcagtgataagactggcaatggcgtttcaaaagatccagtgtggtacccagaggattgcgtctttagtttcagaatgggagctgaatacgcgatcagcacgactgttggctcggcactagacgatctcgagatgcagcgtactggcggcgtggaggtgggaccgataactgctaagaacatgtggcggaacggaacagtcgatttagcacacatgcaggatttcacgcaggagctcgccgatgtcatgacggcaactatacgcaataacgggggtgacaagtatgcgtccggtcaagtccttatcaacgatacatgtatcagtgtgcaatgggcctggctcgcatacccggctgtgctactgggcttgtcgattctgttcttgatattgctgatctttcaagcaccgacgggttcatcggcgagggtctggaagtcgtcgattctcgcgccgcttttcgtctctatggatgagacgatgtatgacactaatcactatgatatgtcgaaacatgacatgaatcagtttgcgaaattgattcgtgcgcagcttgttcgagatgcggaggggaaggcgaagttcttgtagtttgacagaatgttaaacggacaatagaaataatatttgataacctttaagatgtttctcccgaaattgatacctcag

SEQ ID NO: 11707 - DNA, 621 bp, Muscodor strobelii
  misc_feature: SGI cDNA ID NO. 563770
  misc_feature: Encodes the peptide sequence at SEQ ID NO 11708
atggaccttcttgccgaagtatgcgagcgcctagccgcgactgccctgctgggctcgccagacatagacaattgtaccatttccacttccgacgtcaagcgctggcaaaatctattcggattcaccgctgaagaagcggagaatgagatcatccgatggaggactaatacagatcacacaagtatctgcaatcacagctggagcctcgtggaggagaacagctcgaagcaaggtatgaacaaggaggcgtacgaatacgctttggccaccagccgcttgagagaagtactggagctcaggaaccctcccctcacagttgcaaagtccaacaagaagtttttgttgaagctcgaaggagtgatgtcgacaccagctgctgtccaaactatcggatcacttgcccacccgccggccgaataccatgccgagaacgaggaaggagagcaagccttgttttgcatcattgatggaaatgagaggcgaatgattgaaataggtctatcgaagctcagtaccggctcggagatggacagcgggcgctgcctgcacagaacgattaccctgtatggtacttcttctacggtacactggccgagcgagaggtgcttgcccgagttctaa

SEQ ID NO: 11708 - protein, 206 aa, Muscodor strobelii
  misc_feature: SGI Peptide ID NO. 563770
  misc_feature (1)..(169): NCBI GI: 169617558 Blast Desc: SNOG_11961 [Phaeosphaeria nodorum SN15] gi|111059253|gb|EAT80373.1| SNOG_11961 [Phaeosphaeria nodorum SN15]
MDLLAEVCERLAATALLGSPDIDNCTISTSDVKRWQNLFGFTAEEAENEIIRWRTNTDHTSICNHSWSLVEENSSKQGMNKEAYEYALATSRLREVLELRNPPLTVAKSNKKFLLKLEGVMSTPAAVQTIGSLAHPPAEYHAENEEGEQALFCIIDGNERRMIEIGLSKLSTGSEMDSGRCLHRTITLYGTSSTVHWPSERCLPEF

SEQ ID NO: 11709 - DNA, 2184 bp, Muscodor strobelii
  misc_feature: SGI cDNA ID NO. 563771
  misc_feature: Encodes the peptide sequence at SEQ ID NO 11710
atgtcgcagagcaagggcggccgaggcggctctgccgtcaaaggcaagaaaggcgccaaggccggagcagaagagaagggagaagatgttctccaggctgtgataatcgcagatggcttccaatccaggttcttgccatttgccattagcaaacctcgatgtcttctgcccttagccaatacgcctctcatcgagtatacactcgagttcttggccatgaacggcgtacaagaggtcttcgtgtatgccggcgctcactacgagatggtagaagaatacgttcaaaattctagatgggctatggatactccgtcgtgccccttcttcaatcttgaattcatccctgttgctgatgctcactctgttggcgacttcttaagagatctcgacaagcggaatcttatacgaggagattttctgctggtcaatggagacgtcgtatcgaacttgtacctggacaaggctctggctgcccacaaggccaggagagaagctaatcgagattcgtgtatgactatggtcttgcgggaggtcagcgcggaggaccattacgcaaaggcgaaggccactcagccagtcttcgtcatcgatcctaggcagcatagatgtctccattacgaagagatgactccctttcagtcggagcgctatgtggatctcgacccggcagtcttagaaaatgctgaagcggaaacgcgcacagatctcatcgatccccagattgacatttgcacacccgacgtgcttgctctgtggtcagagagttttgattacgagctcccacgtctcaatttcctgcacggggtgctgaaagattgggagctgaatggaaagcttatacatacggagattgtcaccgaaggctactgcgcaagggcttcagatctacgcatgtacgacgtggtaagcagagacttactcgccggttggatctctccttttaccccggaaatgaacatgctagacgatcagacctatcgttgccgaaatgggatctaccgtgaagagggcgtatacgtcgaagatgattctgatatcaccaattctgttataggacgagacacactcgtaggctcggggacgagaatacagagcagcgtcattggtcggaactgcagagtcggaaacaatgtccggatttctgacagttatatctgggcgaatgctgagattgaagatgatgctgtcatagaacatgctgtagttggagacggagtctttatcgccaagggaacttcgattcatgagggggctttgctgtcctctgatgtccgtatcgatggaaaagatgacatcgaggccgctactgtcctatccacactctctcacgaatcaacacctctcgagcttcagcccgaagctgttggcgcgcaaggtaaaggtgccatatttgaatatcccgaacacgatgagcaaggtacagaagaagtctggcaattagaatgcgccctggtctactctcttgacaacttcgacatcgaggtatcgtcggtatctactctagatgacgacgacttcgtttcagactcagacgacgatgcccccacacccagtcaattcaacactcgttctcgactctcctcctttgcatccgacgactctgcagctctcaacaatgcctccttccataccgacgctgtcaatggcctactagaggtgcttcgaggtggatcggggaacttcgattcagagaaggtggaattcacatccctccgactagccaataatgcctcagacgcagccatgcgcaaggcggttgcgacggctttcgttcgtcgcgcagtagagttaatgaacggcgaaagtcctctcgatgctgtggccgctgccaaggactcgctcacctctagaacaggtgctacatccttcgttcaaggcgttggcgttggcagcgattccgtaacggaccaagtcgaatttacacttgccgtccagcgctcatgtgtgcgcagcatctcagcgatcgaggtcggtaaggccggcagcctactggccgcgatgctgcaacagatgtacgataacgacgttctcgaggaagaaggaattatcgcctggtggaatgacgtcagaggaaaagatggtgagaatatgacgagcgtcagggctaagtgtcaggtgctcgtcgaatggctggaaaatgctagcgaagaagagagtgatgatgaggatgatgatagcgattaa

SEQ ID NO: 11710 - protein, 727 aa, Muscodor strobelii
  misc_feature: SGI Peptide ID NO. 563771
  misc_feature (634)..(722): Pfam Id: PF02020 Pfam Desc: eIF4-gamma/eIF5/eIF2-epsilon
  misc_feature (1)..(714): NCBI GI: 85092955 Blast Desc: NCU02414 [Neurospora crassa OR74A] gi|28921040|gb|EAA30360.1| conserved [Neurospora crassa OR74A]
  misc_feature (24)..(714): NCBI GI: 256732447 Blast Desc: NECHADRAFT_68025 [Nectria haematococca mpVI 77-13-4]
  misc_feature (5)..(714): NCBI GI: 46123961 Blast Desc: FG06358.1 [Gibberella zeae PH-1]
  misc_feature (24)..(711): NCBI GI: 189091862 Blast Desc: [Podospora anserina] gi|27803041|emb|CAD60744.1| protein product [Podospora anserina] gi|188219284|emb|CAP49264.1| protein product [Podospora anserina]
  misc_feature (24)..(712): NCBI GI: 39942874 Blast Desc: MGG_03517 [Magnaporthe grisea 70-15] gi|145009922|gb|EDJ94578.1| MGG_03517 [Magnaporthe grisea 70-15]
  misc_feature (11)..(714): NCBI GI: 156039353 Blast Desc: SS1G_11813 [Sclerotinia sclerotiorum 1980] gi|154697550|gb|EDN97288.1| SS1G_11813 [Sclerotinia sclerotiorum 1980]
  misc_feature (24)..(714): NCBI GI: 154309875 Blast Desc: BC1G_06858 [Botryotinia fuckeliana B05.10] gi|150851646|gb|EDN26839.1| BC1G_06858 [Botryotinia fuckeliana B05.10]
  misc_feature (12)..(713): NCBI GI: 189191640 Blast Desc: translation initiation factor eIF-2B subunit epsilon [Pyrenophora tritici-repentis Pt-1C-BFP] gi|187973765|gb|EDU41264.1| translation initiation factor eIF-2B
  misc_feature (23)..(713): NCBI GI: 212534490 Blast Desc: translation initiation factor eif-2b epsilon subunit, [Penicillium marneffei ATCC 18224] gi|210069800|gb|EEA23890.1| translation initiation factor eif-2b epsilon subunit, marneffei
  misc_feature (14)..(711): NCBI GI: 255947402 Blast Desc: Pc22g04300 [Penicillium chrysogenum Wisconsin 54-1255] gi|211591485|emb|CAP97718.1| Pc22g04300 [Penicillium chrysogenum Wisconsin 54-1255]
  misc_feature (30)..(410): SWISSPROT Homolog: EC 2.7.7.13 Mannose-1-phosphate guanylyltransferase
MSQSKGGRGGSAVKGKKGAKAGAEEKGEDVLQAVIIADGFQSRFLPFAISKPRCLLPLANTPLIEYTLEFLAMNGVQEVFVYAGAHYEMVEEYVQNSRWAMDTPSCPFFNLEFIPVADAHSVGDFLRDLDKRNLIRGDFLLVNGDVVSNLYLDKALAAHKARREANRDSCMTMVLREVSAEDHYAKAKATQPVFVIDPRQHRCLHYEEMTPFQSERYVDLDPAVLENAEAETRTDLIDPQIDICTPDVLALWSESFDYELPRLNFLHGVLKDWELNGKLIHTEIVTEGYCARASDLRMYDVVSRDLLAGWISPFTPEMNMLDDQTYRCRNGIYREEGVYVEDDSDITNSVIGRDTLVGSGTRIQSSVIGRNCRVGNNVRISDSYIWANAEIEDDAVIEHAVVGDGVFIAKGTSIHEGALLSSDVRIDGKDDIEAATVLSTLSHESTPLELQPEAVGAQGKGAIFEYPEHDEQGTEEVWQLECALVYSLDNFDIEVSSVSTLDDDDFVSDSDDDAPTPSQFNTRSRLSSFASDDSAALNNASFHTDAVNGLLEVLRGGSGNFDSEKVEFTSLRLANNASDAAMRKAVATAFVRRAVELMNGESPLDAVAAAKDSLTSRTGATSFVQGVGVGSDSVTDQVEFTLAVQRSCVRSISAIEVGKAGSLLAAMLQQMYDNDVLEEEGIIAWWNDVRGKDGENMTSVRAKCQVLVEWLENASEEESDDEDDDSD

SEQ ID NO: 11711 - DNA, 2392 bp, Muscodor strobelii
  misc_feature: SGI EST ID NO. CUFF.27787.0
  misc_feature: Variant of the nucleotide sequence at SEQ ID NO 11709
gcaacatctctcgatatccgccatcacacattcatacggcagcgctcatgtcgcagagcaagggcggccgaggcggctctgccgtcaaaggcaagaaaggcgccaaggccggagcagaagagaagggagaagatgttctccaggctgtgataatcgcagatggcttccaatccaggttcttgccatttgccattagcaaacctcgatgtcttctgcccttagccaatacgcctctcatcgagtatacactcgagttcttggccatgaacggcgtacaagaggtcttcgtgtatgccggcgctcactacgagatggtagaagaatacgttcaaaattctagatgggctatggatactccgtcgtgccccttcttcaatcttgaattcatccctgttgctgatgctcactctgttggcgacttcttaagagatctcgacaagcggaatcttatacgaggagattttctgctggtcaatggagacgtcgtatcgaacttgtacctggacaaggctctggctgcccacaaggccaggagagaagctaatcgagattcgtgtatgactatggtcttgcgggaggtcagcgcggaggaccattacgcaaaggcgaaggccactcagccagtcttcgtcatcgatcctaggcagcatagatgtctccattacgaagagatgactccctttcagtcggagcgctatgtggatctcgacccggcagtcttagaaaatgctgaagcggaaacgcgcacagatctcatcgatccccagattgacatttgcacacccgacgtgcttgctctgtggtcagagagttttgattacgagctcccacgtctcaatttcctgcacggggtgctgaaagattgggagctgaatggaaagcttatacatacggagattgtcaccgaaggctactgcgcaagggcttcagatctacgcatgtacgacgtggtaagcagagacttactcgccggttggatctctccttttaccccggaaatgaacatgctagacgatcagacctatcgttgccgaaatgggatctaccgtgaagagggcgtatacgtcgaagatgattctgatatcaccaattctgttataggacgagacacactcgtaggctcggggacgagaatacagagcagcgtcattggtcggaactgcagagtcggaaacaatgtccggatttctgacagttatatctgggcgaatgctgagattgaagatgatgctgtcatagaacatgctgtagttggagacggagtctttatcgccaagggaacttcgattcatgagggggctttgctgtcctctgatgtccgtatcgatggaaaagatgacatcgaggccgctactgtcctatccacactctctcacgaatcaacacctctcgagcttcagcccgaagctgttggcgcgcaaggtaaaggtgccatatttgaatatcccgaacacgatgagcaaggtacagaagaagtctggcaattagaatgcgccctggtctactctcttgacaacttcgacatcgaggtatcgtcggtatctactctagatgacgacgacttcgtttcagactcagacgacgatgcccccacacccagtcaattcaacactcgttctcgactctcctcctttgcatccgacgactctgcagctctcaacaatgcctccttccataccgacgctgtcaatggcctactagaggtgcttcgaggtggatcggggaacttcgattcagagaaggtggaattcacatccctccgactagccaataatgcctcagacgcagccatgcgcaaggcggttgcgacggctttcgttcgtcgcgcagtagagttaatgaacggcgaaagtcctctcgatgctgtggccgctgccaaggactcgctcacctctagaacaggtgctacatccttcgttcaaggcgttggcgttggcagcgattccgtaacggaccaagtcgaatttacacttgccgtccagcgctcatgtgtgcgcagcatctcagcgatcgaggtcggtaaggccggcagcctactggccgcgatgctgcaacagatgtacgataacgacgttctcgaggaagaaggaattatcgcctggtggaatgacgtcagaggaaaagatggtgagaatatgacgagcgtcagggctaagtgtcaggtgctcgtcgaatggctggaaaatgctagcgaagaagagagtgatgatgaggatgatgatagcgattaagcatactgtgtgtatccatacgagctcgcgcatgatagttccgactactgttgcagcatcgcgccgaaaagctcacggagtaatcataaatattaatatcggcaaatgagtcatgatattaagtgcacaagcaactattgatagcccttataaaatcgaac

SEQ ID NO: 11712 - DNA, 1764 bp, Muscodor strobelii
  misc_feature: SGI cDNA ID NO. 563772
  misc_feature: Encodes the peptide sequence at SEQ ID NO 11713
atgcttgaagatccagcatatagtgaagtagtaagatggggagaccaagggaatagcttcgttgtgctagagaacgagaaatttacgaaaacgatattaccgaaacatttcaagcatagcaatttcgccagcttcgtccgacagctgaacaagtacgacttccacaaagttcgacatactgaagagaatggacagtcaccgtatggtgcatcggcatgggagttcaaacatccagagtttcgcgctgataggaaggacaatctggacaatatccgaaggaaagccccggctccgagaaaagtccagactcaagaggaccaattctccgtcaccagtcaacaggtcgtcgcgcttaccgatacgctggcagcaacgcagcatcaggtccaacaactccaggagtcgtattacgagatcatgagcgccaacaagatttttgtcgacgaaattcttcacctgcgcaagttggtcgaggcgcaacaccgagtccacaacgaatttctcagccatcttaacaaaactgagtccgaaaagagagaaactcgcacgtcgaatcactcaacgcccggctacaattcaaaccagagtcttatgtcggatggctccgaatcaccaatggagttgcgtcgggctcgggacattctcaacggcgttaccatggaacatgttgctgatcgagacttgaatcgcatgtcaatcgccttccatcaatccggtgggtcgccagaatcagtcggatcgtcatcgatgatgggaccacctggcgctgcagcaggcgttgcgccgttcttgcacgatccgctaagtgacatgcgtcatctcgtttatcccgtaggccacaacatcggtattgacccattcgccccggagcatatgagcaatattccatacaatcgtcctggaagcgagaacgcaggccaacatggcttcgaatctgccggtgcgcaacaacccatggcaactcccacgcctccgaatagtggcgtgccggggcaatcgccttgggcgtcgaagaagcccgtcgttctccttgtcgaagatgatcgcacttgcgctcgcattggttccaaattcctgtcacaacaagattgcggagttgagatagctcgtgatggaatggaggctgtcaacaaggtcagctcgaggcaacatccgtacgacttgatcttcatggacataatcatgcccaatctagatggcgtcagtgctactgccatgatccgtgacatgcagccaaacatcccaattgtggccatgacgtccaacattaaccaacaggatcttgaaatgtacttccactggggtatgaaagacgtattagccaagcccttcaccaaggaaggcatggtcagtaagctcaagcgccatctcgctagtatgttgcggaatcctccgccggagggaatgttggaccagatgtatcccaatggtggacctgctcaacctccgactccaggatatccaaatcaaggtatgggaatggctccactgcccgtcacatccgctggaggtcccgtctcgaaatttgacacgacgccgttacagtcgccttctacgagtaactcgtggcactcgccaagccaactgccgcatgcttcaccgacaatggcccaggatgggatatctcgcagccggccaaggcacgggaatgttgcttacgcccggcggatctcagaagccttatccacctggaatgatggcacagatgagtggaggagggcatcgtgtgtcggattccatctcatcacgcgatggacctcctga

SEQ ID NO: 11713 - protein, 587 aa, Muscodor strobelii
  misc_feature: SGI Peptide ID NO. 563772
  misc_feature (1)..(188): Pfam Id: PF00447 Pfam Desc: HSF-type DNA-binding
  misc_feature (340)..(454): Pfam Id: PF00072 Pfam Desc: Response regulator receiver domain
  misc_feature (1)..(105): Pfam Id: PF00447 Pfam Desc: HSF-type DNA-binding
  misc_feature (1)..(540): NCBI GI: 94467523 Blast Desc: response regulator-like protein [Neurospora crassa]
  misc_feature (1)..(536): NCBI GI: 116179540 Blast Desc: CHGG_00398 [Chaetomium globosum CBS 148.51] gi|88184695|gb|EAQ92163.1| CHGG_00398 [Chaetomium globosum CBS 148.51]
  misc_feature (1)..(526): NCBI GI: 189091864 Blast Desc: [Podospora anserina] gi|188219285|emb|CAP49265.1| protein product [Podospora anserina]
  misc_feature (1)..(526): NCBI GI: 27803042 Blast Desc: protein product [Podospora anserina]
  misc_feature (72)..(540): NCBI GI: 164427100 Blast Desc: NCU02413 [Neurospora crassa OR74A] gi|157071608|gb|EAA30305.2| conserved [Neurospora crassa OR74A]
  misc_feature (1)..(549): NCBI GI: 39726349 Blast Desc: two-component response regulator SKN7p [Botryotinia fuckeliana]
  misc_feature (1)..(534): NCBI GI: 46123963 Blast Desc: FG06359.1 [Gibberella zeae PH-1]
  misc_feature (1)..(534): NCBI GI: 256732900 Blast Desc: [Nectria haematococca mpVI 77-13-4]
  misc_feature (4)..(434): NCBI GI: 261354808 Blast Desc: transcription factor prr1 [Verticillium albo-atrum VaMs.102]
  misc_feature (25)..(549): NCBI GI: 154309873 Blast Desc: conserved [Botryotinia fuckeliana B05.10] gi|150851645|gb|EDN26838.1| conserved [Botryotinia fuckeliana B05.10]
MLEDPAYSEVVRWGDQGNSFVVLENEKFTKTILPKHFKHSNFASFVRQLNKYDFHKVRHTEENGQSPYGASAWEFKHPEFRADRKDNLDNIRRKAPAPRKVQTQEDQFSVTSQQVVALTDTLAATQHQVQQLQESYYEIMSANKIFVDEILHLRKLVEAQHRVHNEFLSHLNKTESEKRETRTSNHSTPGYNSNQSLMSDGSESPMELRRARDILNGVTMEHVADRDLNRMSIAFHQSGGSPESVGSSSMMGPPGAAAGVAPFLHDPLSDMRHLVYPVGHNIGIDPFAPEHMSNIPYNRPGSENAGQHGFESAGAQQPMATPTPPNSGVPGQSPWASKKPVVLLVEDDRTCARIGSKFLSQQDCGVEIARDGMEAVNKVSSRQHPYDLIFMDIIMPNLDGVSATAMIRDMQPNIPIVAMTSNINQQDLEMYFHWGMKDVLAKPFTKEGMVSKLKRHLASMLRNPPPEGMLDQMYPNGGPAQPPTPGYPNQGMGMAPLPVTSAGGPVSKFDTTPLQSPSTSNSWHSPSQLPHASPTMAQDGISRSRPRHGNVAYARRISEALSTWNDGTDEWRRASCVGFHLITRWTS

SEQ ID NO: 11714 - DNA, 7209 bp, Muscodor strobelii
  misc_feature: SGI EST ID NO. CUFF.28211.2
  misc_feature: Variant of the nucleotide sequence at SEQ ID NO 11712
ttgaagttaattcaattaattagtagaattgcgatcaaagcattatatgctttgttcctcggtatcttgtctggaaagcaaaacgagtaaaccgagaaacactttcagttcgtagagacgcgaagagcggtacatgactataccgtgcgccgcggcattcctccccacatctcccctacctttctgcattcgcactccgtccctctcttgtctctctaccagcacattcatcctgtccagtcaccctgttttattcgtcctctttcttgttattgtatcccgaaggcgtgtgagacgacatacaacactatcccctcttgtgcacctgatcttgtcaccattattctgtacagaaaggccttttaaatcctggtttctttgaccccctggactgacgcagttgacgtacgacgcacacatactgactgacagaaccattaacttccggctcggctcgccatgaattgactgacggctcgattgccatccccgacgaattggagtgtcacctcaacaacctcacgaaccttaatccgcaacgtcactcttctactctatccatcacacgtaatagcgtggccattgttcgcaacgttgaatcatcattagtccatcaaagttcgcattgcgcggttttatcatcggtcagctgttgcggataagctcacataccgctctgtatccgaagtaggaccgctccgaccgccgaacagcagctgcattctccgaccacgagctacggcccccggcgcgccggcaattcgtcgctgagctcagcatagccggtcacagccaacctggctggcgtcttgacctggattgtgaccgctgcgagacacgatccactcgaatagcatcaagacagaatcgaaaaactccgcgttccgtccccggccttggctggcgagacagacagaatcgcccgtctcaaggcgctgtcgcacgaatttctacttccccgctgtgtggcgggctgtgggcactgctggacgagacagtccatcgttgcacacttctgtacatacataagagtgcaatcgggtggttggttagttgcgtaattgtgtttggcggtttgatataactaccagccatgccaccagagaacgatatgatggcctctcagggtgctggcaataattcaagcgactttgtgagtagcatggcattgtcttctgaatcgagacccgacattgttgcggatagatgcatgtgcattgagctaatggagtgcgcacccgaaacaggttcgaaaactttacaagtaaatttgcactttcttgactgcatctctgatggtggagatgtgatatagttactgataccttttgccttgttgtagaatgcttgaagatccagcatatagtgaagtagtaagatggggagaccaagggaatagcttcgttgtgctagagaacgagaaatttacgaaaacgatattaccgaaacatttcaagcatagcaatttcgccagcttcgtccgacagctgaacaagtacgacttccacaaagttcgacatactgaagagaatggacagtcaccgtatggtgcatcggcatgggagttcaaacatccagagtttcgcgctgataggaaggacaatctggacaatatccgaaggaaagccccggctccgagaaaagtccagactcaagaggaccaattctccgtcaccagtcaacaggtcgtcgcgcttaccgatacgctggcagcaacgcagcatcaggtccaacaactccaggagtcgtattacgagatcatgagcgccaacaagatttttgtcgacgaaattcttcacctgcgcaagttggtcgaggcgcaacaccgagtccacaacgaatttctcagccatcttaacaaaactgagtccgaaaagagagaaactcgcacgtcgaatcactcaacgcccggctacaattcaaaccagagtcttatgtcggatggctccgaatcaccaatggagttgcgtcgggctcgggacattctcaacggcgttaccatggaacatgttgctgatcgagacttgaatcgcatgtcaatcgccttccatcaatccggtgggtcgccagaatcagtcggatcgtcatcgatgatgggaccacctggcgctgcagcaggcgttgcgccgttcttgcacgatccgctaagtgacatgcgtcatctcgtttatcccgtaggccacaacatcggtattgacccattcgccccggagcatatgagcaatattccatacaatcgtcctggaagcgagaacgcaggccaacatggcttcgaatctgccggtgcgcaacaacccatggcaactcccacgcctccgaatagtggcgtgccggggcaatcgccttgggcgtcgaagaagcccgtcgttctccttgtcgaagatgatcgcacttgcgctcgcattggttccaaattcctgtcacaacaagattgcggagttgagatagctcgtgatggaatggaggctgtcaacaaggtcagctcgaggcaacatccgtacgacttgatcttcatggacataatcatgcccaatctagatggcgtcagtgctactgccatgatccgtgacatgcagccaaacatcccaattgtggccatgacgtccaacattaaccaacaggatcttgaaatgtacttccactggggtatgaaagacgtattagccaagcccttcaccaaggaaggcatggtcagtaagctcaagcgccatctcgctagtatgttgcggaatcctccgccggagggaatgttggaccagatgtatcccaatggtggacctgctcaacctccgactccaggatatccaaatcaaggtatgggaatggctccactgcccgtcacatccgctggaggtcccgtctcgaaatttgacacgacgccgttacagtcgccttctacgagtaactcgtggcactcgccaagccaactgccgcatgcttcaccgacaatggcccaggatgggatatctcgcagccggccaaggcacgggaatgttgcttacgcccggcggatctcagaagccttatccacctggaatgatggcacagatgagtggaggagggcatcgtgtgtcggattccatctcatcacgcgatggacctcctgagaagcggcagaggctttacggtccacctgggagcaactatcctcagtgatcttgatccagtttccggatgttgtatatatggtgtatgttgcgttcattcggcatttacgagggcggcatcgggaaagcgagcgtcgatcgtatcggccattatgttggcgaaggttatatggcaactttattgtcagcttcggcgtactgtgtagccctgttggggcttgtcggttgtcctgctagtatggatggtggtggtagtggaggctgtaatcatggcatgatacccctgtctcctgattgaaacatcggacgactgtctgaataatgtgacgactacataaccgccgacaagcgtggatagatatgttgtgtggcttgcgctttgacggccggaatgttggattcgtgcgatatgtcgtggaagagatataccgagggagcggaagtgatggcagggggatggaatgaagaaagtgtgcggcatttataatgacttcgagctaagctcctttgcgcgatcgattcggtatataggataagcattgcggtgctaacgatgacaaggtaatcagtcgaccgcttgttacgaactgggatagagaataataacattctccccaatcctactactgctccttgcgtgagtgactgtagggcgtagtggtatggaatctcgtgatgtgaagtgttgccatgtgaattagggttcaatggatggtgtgatggttaagcgtagattccgcagcgagtgacggacacttcatagtatcatgcagatattaatagaggtatgccgtactgatttcgtccgtgggttagctctgtttcaacggagctcggccgtctccaaggcaatgattcaagtcgccgactgagtatgagcctgggtcgacattctccgaaaagggggacgagaactctgctgtgggttaagttagtttatatagtccatgctgccggcagtgtccatacagatgaggagctgagacaaaattttgacataggacaaacgcacgatggtgaaggtctagtgtacgtctagaaatgtagtagatgctctcggggccggtttagatgaaagcgctcaaaatcgctctaggcctgaatttgcgaagagcatcctttagacgttggaagaagcctgttcgctctggggcagtgggttgatgggcgaatacgcggcgaagctttagctcgcttggacacggtgacatgactcctgaggtcgctattggtgacatggctccccgagtcgatactggcgacatggttccaggactggatattggtgatagggctgtcgggctgtctcgaggttcatgctcaagggctttgagacggatgacgaccgacctatggaagttaggattcggtatgtctggtagcgacaccggcgtgtaagacatattggattaagtattagtttgattttggattggaagcgacggtgtcttgttgtttggctatcggatagctgcgtgaagtagggagggagtaatgttgcataaagtagaagggagaaaataagagggagaattgtattcgtgtatcagttcgataaagcgaaggcaatgtttatatacgatggcaacctgcgcgtgataattcaaaagagttggtacggaaaaacaaatggatgtaccgtcgaacgttcaaaaagtgagtcgattaacagccggcaaacctaaacgagacgcgacctatttgaagcagtccaaacacgtaattacgtaacgtaaggatatgtaagttatgatggtcggatttgatgaagtagcatccatggattaagcttgttgttgtcgtcgccgtcgcttgttcgaggcggaatatgtttgtgaacgtcgttgttgggggcccgtgccattcgtgagcggcgactgagatcggttcattacttgcgcgtgtcggtcgcgtcgcgcagacgccggcgatggcgtgctcattcatggctcgatcggtcgaccatagcgtttggttcaatagcacctttccggctcgtgatgtaagggacccgtccggattcttgatcgttctttgaggcttgccctcgtgctgatcatcctagtctccgaccccgtgctcttcgtctacatcaagcgccaacaagagacacagctgcagggatccagtcggaatacgaaaggcaacgtcggcgactggtgagccatcgtgtgtcgcggcttctgatctaagaacggtgccagtgaaagggctcagggtgcgactttgacgtcgatagggactagcatgtgctttcaactcccccagagaggtgagatggagaagacaccccttagacgatgtggcgtgggctatcgcaataatatcgcgtgaagcgttgtgatcgcgtgttgcatcagtaacacttccctcgtacgctcgaagcgaaaccttcaacagcgggacgaaatagaataactgcatctgatgaaccagcttaggcccctgtatattcaaaagatttaaggcggcgatgtggtacctccgcctcaataatcacctgtcggtccgtcgtagagtaaagctggatgatcacttctgtttaccccccgggctgcctcccagtacatctctagctctctcgactttcattattgcccattatcaccgtttgctcccctgcttgtcgacaatctgtatcatagtcgttttcggatagagttctgctgtattctacttcgactactctcaactgccagttcgataaatgctagaattggagttcctttgaaggcgtcgatcgttcgttgagttccgggtgctcgtatcattcagacataatcggctcttatgtcataaactctgtaggatggcatgcaagtgagtattgggggtggcgtcacggtgcaaactttgcaggcacaacaagaagaaacaattaacgtcaggcacgtggataaacgaactatagagtgatgtgtggaagagtacggtcagttcgtaataatgatcatttgtattagtagatactacaccgcttttctgtcatgaacgatcgtagaaggagagtcatgcgagtgcttcaacgcgagaaatggacctagaccgagagtgacatcccatcttgacggtaatattcgtggggagttgataccagataggttgacaaacggaataaaaggaagaggatatgcgaatcttgtagtgaaggttcgggtatgattttagtcacccaagggagcaaaggagagaaagaggatattcaacgctcgtggctatcattcgccgctgacatatatttaaagagatgtgggagccactgggtcaggcaggcatgtacaatatgcgatgaatatactagggcggatattttggggtataagctggcaaggatgtggcagatcgccgggcctgtgtgatacgaggagcctgggaagtggtatatgtttctgtgtaattgtccgttggttgatatgtgcacaccgttcactagccgggggggtagcccaatgatgagcgctgaagagcgggagcaggtgcctgtagatttagatctcgcgtgtagcttgcagtggttgtatctgcatcccttgactctcaggcaatcagctttattgtcgtgtgtatgagtatgtatcgtaatgttcaccgccgtcggcatttatcatggccatgcaggcaacgcatgaataacagcggagtctggttgtgtgttcgagtgttggctggcctagcctggccggtagatcgtgcagcacacaatactggaagatttgcgggtatgcgtacattccatctatctgtaacgtcgactggcatctgtcacatcattttgggtcgatcgagaagcggctgagccgcgatttcgctgttttgtgtaatgtgtacccggagcaaacagcctggattcggcctggacgcccgaatcccttgcccttgtttcaagtcggcagtcataaattaacgcgggatttgtcttgcttctagttgtgacgcacgacgaaaaagtatctgctgcgcacgacagcgacaggagccaatctcgacagcattatgctcttagatttagtgcagcagaaacaagaagggagtagaagcggcagatatggccgtcgcaaagggagaccatgacaaatacatacgggaaaggatacgatttggc

SEQ ID NO: 11715 - DNA, 1902 bp, Muscodor strobelii
  misc_feature: SGI cDNA ID NO. 563773
  misc_feature: Encodes the peptide sequence at SEQ ID NO 11716
atgccaccagagaacgatatgatggcctctcagggtgctggcaataattcaagcgactttgtgagtagcatggcattgtcttctgaatcgagacccgacattgttgcggatagatgcatgtgcattgagctaatggaaatgcttgaagatccagcatatagtgaagtagtaagatggggagaccaagggaatagcttcgttgtgctagagaacgagaaatttacgaaaacgatattaccgaaacatttcaagcatagcaatttcgccagcttcgtccgacagctgaacaagtacgacttccacaaagttcgacatactgaagagaatggacagtcaccgtatggtgcatcggcatgggagttcaaacatccagagtttcgcgctgataggaaggacaatctggacaatatccgaaggaaagccccggctccgagaaaagtccagactcaagaggaccaattctccgtcaccagtcaacaggtcgtcgcgcttaccgatacgctggcagcaacgcagcatcaggtccaacaactccaggagtcgtattacgagatcatgagcgccaacaagatttttgtcgacgaaattcttcacctgcgcaagttggtcgaggcgcaacaccgagtccacaacgaatttctcagccatcttaacaaaactgagtccgaaaagagagaaactcgcacgtcgaatcactcaacgcccggctacaattcaaaccagagtcttatgtcggatggctccgaatcaccaatggagttgcgtcgggctcgggacattctcaacggcgttaccatggaacatgttgctgatcgagacttgaatcgcatgtcaatcgccttccatcaatccggtgggtcgccagaatcagtcggatcgtcatcgatgatgggaccacctggcgctgcagcaggcgttgcgccgttcttgcacgatccgctaagtgacatgcgtcatctcgtttatcccgtaggccacaacatcggtattgacccattcgccccggagcatatgagcaatattccatacaatcgtcctggaagcgagaacgcaggccaacatggcttcgaatctgccggtgcgcaacaacccatggcaactcccacgcctccgaatagtggcgtgccggggcaatcgccttgggcgtcgaagaagcccgtcgttctccttgtcgaagatgatcgcacttgcgctcgcattggttccaaattcctgtcacaacaagattgcggagttgagatagctcgtgatggaatggaggctgtcaacaaggtcagctcgaggcaacatccgtacgacttgatcttcatggacataatcatgcccaatctagatggcgtcagtgctactgccatgatccgtgacatgcagccaaacatcccaattgtggccatgacgtccaacattaaccaacaggatcttgaaatgtacttccactggggtatgaaagacgtattagccaagcccttcaccaaggaaggcatggtcagtaagctcaagcgccatctcgctagtatgttgcggaatcctccgccggagggaatgttggaccagatgtatcccaatggtggacctgctcaacctccgactccaggatatccaaatcaaggtatgggaatggctccactgcccgtcacatccgctggaggtcccgtctcgaaatttgacacgacgccgttacagtcgccttctacgagtaactcgtggcactcgccaagccaactgccgcatgcttcaccgacaatggcccaggatgggatatctcgcagccggccaaggcacgggaatgttgcttacgcccggcggatctcagaagccttatccacctggaatgatggcacagatgagtggaggagggcatcgtgtgtcggattccatctcatcacgcgatggacctcctga

SEQ ID NO: 11716 - protein, 633 aa, Muscodor strobelii
  misc_feature: SGI Peptide ID NO. 563773
  misc_feature (44)..(234): Pfam Id: PF00447 Pfam Desc: HSF-type DNA-binding
  misc_feature (386)..(500): Pfam Id: PF00072 Pfam Desc: Response regulator receiver domain
  misc_feature (46)..(151): Pfam Id: PF00447 Pfam Desc: HSF-type DNA-binding
  misc_feature (2)..(586): NCBI GI: 94467523 Blast Desc: response regulator-like protein [Neurospora crassa]
  misc_feature (47)..(582): NCBI GI: 116179540 Blast Desc: CHGG_00398 [Chaetomium globosum CBS 148.51] gi|88184695|gb|EAQ92163.1| CHGG_00398 [Chaetomium globosum CBS 148.51]
  misc_feature (47)..(572): NCBI GI: 189091864 Blast Desc: [Podospora anserina] gi|188219285|emb|CAP49265.1| protein product [Podospora anserina]
  misc_feature (47)..(572): NCBI GI: 27803042 Blast Desc: protein product [Podospora anserina]
  misc_feature (118)..(586): NCBI GI: 164427100 Blast Desc: NCU02413 [Neurospora crassa OR74A] gi|157071608|gb|EAA30305.2| conserved [Neurospora crassa OR74A]
  misc_feature (13)..(595): NCBI GI: 39726349 Blast Desc: two-component response regulator SKN7p [Botryotinia fuckeliana]
  misc_feature (43)..(580): NCBI GI: 46123963 Blast Desc: FG06359.1 [Gibberella zeae PH-1]
  misc_feature (13)..(580): NCBI GI: 256732900 Blast Desc: [Nectria haematococca mpVI 77-13-4]
  misc_feature (1)..(480): NCBI GI: 261354808 Blast Desc: transcription factor prr1 [Verticillium albo-atrum VaMs.102]
  misc_feature (71)..(595): NCBI GI: 154309873 Blast Desc: conserved [Botryotinia fuckeliana B05.10] gi|150851645|gb|EDN26838.1| conserved [Botryotinia fuckeliana B05.10]
MPPENDMMASQGAGNNSSDFVSSMALSSESRPDIVADRCMCIELMEMLEDPAYSEVVRWGDQGNSFVVLENEKFTKTILPKHFKHSNFASFVRQLNKYDFHKVRHTEENGQSPYGASAWEFKHPEFRADRKDNLDNIRRKAPAPRKVQTQEDQFSVTSQQVVALTDTLAATQHQVQQLQESYYEIMSANKIFVDEILHLRKLVEAQHRVHNEFLSHLNKTESEKRETRTSNHSTPGYNSNQSLMSDGSESPMELRRARDILNGVTMEHVADRDLNRMSIAFHQSGGSPESVGSSSMMGPPGAAAGVAPFLHDPLSDMRHLVYPVGHNIGIDPFAPEHMSNIPYNRPGSENAGQHGFESAGAQQPMATPTPPNSGVPGQSPWASKKPVVLLVEDDRTCARIGSKFLSQQDCGVEIARDGMEAVNKVSSRQHPYDLIFMDIIMPNLDGVSATAMIRDMQPNIPIVAMTSNINQQDLEMYFHWGMKDVLAKPFTKEGMVSKLKRHLASMLRNPPPEGMLDQMYPNGGPAQPPTPGYPNQGMGMAPLPVTSAGGPVSKFDTTPLQSPSTSNSWHSPSQLPHASPTMAQDGISRSRPRHGNVAYARRISEALSTWNDGTDEWRRASCVGFHLITRWTS

SEQ ID NO: 11717 - DNA, 7209 bp, Muscodor strobelii; identical to SEQ ID NO: 11714
  misc_feature: SGI EST ID NO. CUFF.28211.2
  misc_feature: Variant of the nucleotide sequence at SEQ ID NO 11715

SEQ ID NO: 11718 - DNA, 1497 bp, Muscodor strobelii
  misc_feature: SGI cDNA ID NO. 563774
  misc_feature: Encodes the peptide sequence at SEQ ID NO 11719
atggctcacatcaacagtttgaatctgctggtgagcattgcttcgaacatgcggactgcctcgattgaaagtactctgagcgagagtttcaagcttctagaagagctccataaggtgtactctgagaatttgaaagatagtcggcctaaggtaacggaaaccgttgacgtcacagaagctacccatgctactgacaacagcactttcgcagttgctagagccaataatgatgggtgggatcagatatgtcgacgcgcatctctaaacactgaatggctggcccttttctgcagcgactctcatgacatgaggtcagaggcaatatttacatgtagatgcccgcgcaatgaaaatgacccttggcttcatcaagggtcattgcgccattacggattgtctcatttaattttccccatccgagtagctggtgaggatgtccaatggattctattcaagacaagggatatggtcagcaaccagctcgtcaacctctatatccgcaatatccatcctgattatattcagaaattagaagaaacgttcttccaagagatctccaggcgacgccgggaagccatactgggtgttggctcagggaacagcctatgttatttctcagaggaaagccaagaagagcgcacccttacagcaatgagtgatttgcgaatatcgccgaattcagtagaatctgttacattcaagaccgggtcaacgcagtacaaccaagaatgggtcagcgatatccaaatcttgcaatatagtgcgcaaagtgcaggaacctctagcgacattgtctcacacaatgcagcgcagtcgttagactttgcagagatcctcatttcgtacgacgtacaaaaggcggcagagaggaacgacattgcaggaatgatacttaaattgaaattcgatacgaacacaaatctcacgaatatggcagcggttgagatattgttgatagaagctgtaggaacttacccaaacggtcaagcttcaaactcatcggaggggaacgcaactattcagtttacaactaaagctgcggcaatagagtttcacgataacgtggaatcgatgcaaaaggaactccttgtgcataggctccaacatccgagatcagacgaacgaatagttctaaggctacaaggcgccaccgttgaatgcgaggcgctctacattgccgatgccgatattactattgtgtgcaacacaaatgcgaagtatcgactgatcatcgtaagccgcaatagatgcacgcttatcagtcaggttctcgtcgacgacttttttacatctcgaagcacaagacccaattatagcggtccgacctacctagtacaagtcgatgacacgaggaagagaagaatctatcactacgaacatggattccagtatttgagcctggctactacgcaagcgaatcgaatgctagagctagcgcgcagctcgattgcattgaatattgaacagggccagcaaatacaggagacctcaacataa

SEQ ID NO: 11719 - protein, 498 aa, Muscodor strobelii
  misc_feature: SGI Peptide ID NO. 563774
  misc_feature (1)..(483): NCBI GI: 116198895 Blast Desc: CHGG_07603 [Chaetomium globosum CBS 148.51] gi|88178882|gb|EAQ86350.1| CHGG_07603 [Chaetomium globosum CBS 148.51]
  misc_feature (358)..(484): NCBI GI: 171693033 Blast Desc: protein product [Podospora anserina] gi|170946465|emb|CAP73266.1| protein product [Podospora anserina]
  misc_feature (1)..(301): NCBI GI: 171693031 Blast Desc: protein product [Podospora anserina] gi|170946464|emb|CAP73265.1| protein product [Podospora anserina]
  misc_feature (3)..(468): NCBI GI: 238839105 Blast Desc: conserved [Microsporum canis CBS 113480]
MAHINSLNLLVSIASNMRTASIESTLSESFKLLEELHKVYSENLKDSRPKVTETVDVTEATHATDNSTFAVARANNDGWDQICRRASLNTEWLALFCSDSHDMRSEAIFTCRCPRNENDPWLHQGSLRHYGLSHLIFPIRVAGEDVQWILFKTRDMVSNQLVNLYIRNIHPDYIQKLEETFFQEISRRRREAILGVGSGNSLCYFSEESQEERTLTAMSDLRISPNSVESVTFKTGSTQYNQEWVSDIQILQYSAQSAGTSSDIVSHNAAQSLDFAEILISYDVQKAAERNDIAGMILKLKFDTNTNLTNMAAVEILLIEAVGTYPNGQASNSSEGNATIQFTTKAAAIEFHDNVESMQKELLVHRLQHPRSDERIVLRLQGATVECEALYIADADITIVCNTNAKYRLIIVSRNRCTLISQVLVDDFFTSRSTRPNYSGPTYLVQVDDTRKRRIYHYEHGFQYLSLATTQANRMLELARSSIALNIEQGQQIQETST

SEQ ID NO: 11720 - DNA, 3196 bp, Muscodor strobelii
  misc_feature: SGI EST ID NO. CUFF.27876.3
  misc_feature: Variant of the nucleotide sequence at SEQ ID NO 11718
ccatattctatcttcactgcacatgcgttcttgaaactatttcaaaggacataacgaagaccatacaatgccttctcctatttcaataggagatgttattcgcctagcagagattgcctggacattggcaagggcatttacaaaaggaagaaagtcagcaccagcagaatttagagaagtcgaaagcgaattgtattcgataagtgcagctttggaagcaatcagtaatgagcaaggtacagtcatcttaatggatggcagcttgagaccgccgacaactctcagccctcaagattcggacgtgatgcaacattcagcatttgagcatgtcgcaagaaactgcgagcaaaccttaacacatttagaaagaattgtcaaaaagtacatggttgtgtccaaagcaacaaatccaaaacagccgcttcaagagagatggaatcaatcaataatcaggacatggagaaagatcgagtggacgactgaaaggggcgatctcaacacacttcgaagtcagatcatggctcacatcaacagtttgaatctgctggtgagcattgcttcgaacatgcggactgcctcgattgaaagtactctgagcgagagtttcaagcttctagaagagctccataaggtgtactctgagaatttgaaagatagtcggcctaaggtaacggaaaccgttgacgtcacagaagctacccatgctactgacaacagcactttcgcagttgctagagccaataatgatgggtgggatcagatatgtcgacgcgcatctctaaacactgaatggctggcccttttctgcagcgactctcatgacatgaggtcagaggcaatatttacatgtagatgcccgcgcaatgaaaatgacccttggcttcatcaagggtcattgcgccattacggattgtctcatttaattttccccatccgagtagctggtgaggatgtccaatggattctattcaagacaagggatatggtcagcaaccagctcgtcaacctctatatccgcaatatccatcctgattatattcagaaattagaagaaacgttcttccaagagatctccaggcgacgccgggaagccatactgggtgttggctcagggaacagcctatgttatttctcagaggaaagccaagaagagcgcacccttacagcaatgagtgatttgcgaatatcgccgaattcagtagaatctgttacattcaagaccgggtcaacgcagtacaaccaagaatgggtcagcgatatccaaatcttgcaatatagtgcgcaaagtgcaggaacctctagcgacattgtctcacacaatgcagcgcagtcgttagactttgcagagatcctcatttcgtacgacgtacaaaaggcggcagagaggaacgacattgcaggaatgatacttaaattgaaattcgatacgaacacaaatctcacgaatatggcagcggttgagatattgttgatagaagctgtaggaacttacccaaacggtcaagcttcaaactcatcggaggggaacgcaactattcagtttacaactaaagctgcggcaatagagtttcacgataacgtggaatcgatgcaaaaggaactccttgtgcataggctccaacatccgagatcagacgaacgaatagttctaaggctacaaggcgccaccgttgaatgcgaggcgctctacattgccgatgccgatattactattgtgtgcaacacaaatgcgaagtatcgactgatcatcgtaagccgcaatagatgcacgcttatcagtcaggttctcgtcgacgacttttttacatctcgaagcacaagacccaattatagcggtccgacctacctagtacaagtcgatgacacgaggaagagaagaatctatcactacgaacatggattccagtatttgagcctggctactacgcaagcgaatcgaatgctagagctagcgcgcagctcgattgcattgaatattgaacagggccagcaaatacaggagacctcaacataatggacgagccggtatcgatacttgcgtgatacgctatcatgtcatgggacgagtcatgtagcaacaaatcgtgaaagagcctatattgccttgatgtgtctatttttgttacctgttcatctactctccattttcatatcactatttatagagctgtttccctgtcctgggatgagcacatattgggaaagctgtgtataatacttgaacatgaccacattcattaaaccttatgcattacattggaaaagtaaatttcgctcaaaccaatgagtgacgctcgtactgcgctgtgccttgatggacgtgttatccgtgtcggctaatttagagtgtcgtattggtcacggactggttcgcgcgcatgagtccctgcatcgactttggtcccgagtgacgttgtcaccagcccaccattctgccgtcttcttgattgaaagctgtccctagtccatgtcacctgaaaaaagttacagaccccatcgtccgattcaaatcacgtcattccatcgtacatttcgtggactggctcgcagaaaaacatcgggcacctacggatccgtactcttggctcggtagattgtgttatggacccggcatattccatctcatgtatgcaagctagtacaattgagatatgcgcaatggatactttgacttgcaggatagagcggagcgagtagtccgtctcttttcttcgcgcattttcatgtagttaaatggagaattgtgagcgcgaaatagtaagttggtctcgggagaacgtggtggtgggtgtctacagcggcgccgtctaggcgctacgatgctgcttaacggcggattgctcggccctgcgaaatttggattccaacaaagcagaaggatacgattcaacgtcatacttcgcgacacgtactcagtatcgtcagctatcttcaattaatccatcacggagaccaggagggatggtctgataacgcaacagtgtcttcatagagctaaatactcgattatctctacgtggcacgatcgcgcaagctgggtgcttatcccccggtctgccgcgacagactgtcactgaaaaacaccgagtcgctgaatcggaaaattcttccagctgggcactagtgagaggcctgcagggcttggcgagagtaagagctgaccgatgaattgccgccaggtcctggctcgtgctcg

SEQ ID NO: 11721 - DNA, 1383 bp, Muscodor strobelii
  misc_feature: SGI cDNA ID NO. 563775
  misc_feature: Encodes the peptide sequence at SEQ ID NO 11722
atgaatgtcttttgtgctggaatctcatgggacccgcgagagcctctgcctcccgaatacatgcaggcccggcgcctggcgaacgacggcatcccccgggaatatggcgaacagcatacgataaaagcttttgcgaagccacccagcgaaggtgtttcatctaactacagtacagcaaatatcgggttggaaagtagatgtccgccaacgcccagttcgaagaagattcctacctacactattcgagatcttcatcgaaacgttttacctgcaacctcaatttcaattagcgtgcagatcacgggcgaggtagcagaagctacggtgaagcagctgttctggaatgacgctgatgtaccgatcaaagagggcacctacacatttccgttgccaagtggttgcactgtcaacggctttaaatgtcgcgtgggaaatggtgaagaaatggtcgcccgtgctgttcctaaaagcaaagctcgaacggcattccaggaggctgtcgaatcaaataagattgcagccttattggaacaaaatacttcggagatattctctacctcactaggcagcattccaccgagcacgaggattaacgtgcacatttcgtacatcacgttgttgaagccaagatttgcagatcacaagagtgtcaccaccttcgttatcccaacatctattgcaaaccggtacggatcgcgccctgtcgatcttaccaattgtgagcttggttcagggccaagcggtctcagcctgcatgtggatattgaccagcctgataaaattatctcaatacatagcgacaaccaagatatcatcatcaattcgagcggtgagcctccttttgctccgacctggcagaacattggacaggcagcagtcaatgatacagttcaccatactagagtcgagttaccagataatacgatgtccctgaatgctgatttcgatataacgatcgagacggaaacttatgatggcgctacaacagggatggctattatagagcaacacgcatccctccacaaccacgcagctatgatgataacatttccaccattgtcgttgctacccaaacgcaatgtcgtaaacactggagatggcgaggtgatatttttggctgatcgctcgggatcaatggaagacaagatggaaagtcttaaatctgccttgcaatttttcctcaaaggcataccgcttggcctgtggtatttggatgagactttgaatgctgttggagacgcctataatggatcgggcggagccgtccgattcttttcacttggtattgaattctcgaatattcttgctggcgaagaatgggattcggttgaacgcgagcaagcaattacgactatttgtgagctcaaacatctaccaacatga

SEQ ID NO: 11722 - protein, 460 aa, Muscodor strobelii
  misc_feature: SGI Peptide ID NO. 563775
  misc_feature (87)..(205): Pfam Id: PF08487 Pfam Desc: Vault protein inter-alpha-trypsin
  misc_feature (2)..(400): NCBI GI: 171693029 Blast Desc: protein product [Podospora anserina] gi|170946463|emb|CAP73264.1| protein product [Podospora anserina]
  misc_feature (3)..(400): NCBI GI: 116198897 Blast Desc: CHGG_07604 [Chaetomium globosum CBS 148.51] gi|88178883|gb|EAQ86351.1| CHGG_07604 [Chaetomium globosum CBS 148.51]
  misc_feature (46)..(403): NCBI GI: 238839106 Blast Desc: von Willebrand factor type A domain-containing protein [Microsporum canis CBS 113480]
  misc_feature (85)..(403): NCBI GI: 116192639 Blast Desc: CHGG_06037 [Chaetomium globosum CBS 148.51] gi|88181950|gb|EAQ89418.1| CHGG_06037 [Chaetomium globosum CBS 148.51]
  misc_feature (84)..(400): NCBI GI: 85117086 Blast Desc: NCU00984 [Neurospora crassa OR74A] gi|28926981|gb|EAA35941.1| [Neurospora crassa OR74A] gi|38567055|emb|CAE76353.1| [Neurospora crassa]
  misc_feature (86)..(403): NCBI GI: 171684709 Blast Desc: protein product [Podospora anserina] gi|170942315|emb|CAP67967.1| protein product [Podospora anserina]
  misc_feature (69)..(416): NCBI GI: 121715878 Blast Desc: von Willebrand domain protein [Aspergillus clavatus NRRL 1] gi|119403705|gb|EAW14122.1| von Willebrand domain protein [Aspergillus clavatus NRRL 1]
  misc_feature (69)..(398): NCBI GI: 67538388 Blast Desc: AN5364.2 [Aspergillus nidulans FGSC A4] gi|40743334|gb|EAA62524.1| AN5364.2 [Aspergillus nidulans FGSC A4] gi|259485192|tpe|CBF82031.1| TPA: von Willebrand domain FGSC
  misc_feature (72)..(398): NCBI GI: 159122051 Blast Desc: von Willebrand domain protein [Aspergillus fumigatus A1163]
  misc_feature (72)..(398): NCBI GI: 70981624 Blast Desc: von Willebrand domain protein [Aspergillus fumigatus Af293] gi|66843963|gb|EAL84303.1| von Willebrand domain protein [Aspergillus fumigatus Af293]
  misc_feature (81)..(380): SWISSPROT Homolog: EC 2.4.2.30 NAD(+) ADP-ribosyltransferase
MNVFCAGISWDPREPLPPEYMQARRLANDGIPREYGEQHTIKAFAKPPSEGVSSNYSTANIGLESRCPPTPSSKKIPTYTIRDLHRNVLPATSISISVQITGEVAEATVKQLFWNDADVPIKEGTYTFPLPSGCTVNGFKCRVGNGEEMVARAVPKSKARTAFQEAVESNKIAALLEQNTSEIFSTSLGSIPPSTRINVHISYITLLKPRFADHKSVTTFVIPTSIANRYGSRPVDLTNCELGSGPSGLSLHVDIDQPDKIISIHSDNQDIIINSSGEPPFAPTWQNIGQAAVNDTVHHTRVELPDNTMSLNADFDITIETETYDGATTGMAIIEQHASLHNHAAMMITFPPLSLLPKRNVVNTGDGEVIFLADRSGSMEDKMESLKSALQFFLKGIPLGLWYLDETLNAVGDAYNGSGGAVRFFSLGIEFSNILAGEEWDSVEREQAITTICELKHLPT

SEQ ID NO: 11723 - DNA, 888 bp, Muscodor strobelii
  misc_feature: SGI cDNA ID NO. 563776
  misc_feature: Encodes the peptide sequence at SEQ ID NO 11724
atggtttctggcgacgactatgttttcactcgtgatgttctggacaattccaggctcaacttgatgcattcactttggacgagaagttcaggatatgtgatacatccatcaatcccgaccagtaatcctaagctctttgtagcagatgttggtgctggtacaggatttcccagagcttggctatgcgacgtcagcgaacgactcccgcagactgttcatatctatggccttgatatatccttcgacgctatgccaccatcaggagtgttgccacctaacgtgacgcttcggcaatgggacgttcgaacagatgtccatgaggatcttgtgtgtatcttcgacgttattcagattcgattctttatcttcgtcttgttgagaaacgaagtaccctcggttattagcaaactaatcaagatgctgagtatgagtttctacaaaccaaagcatgtcagtcagctaatcatgtggcgcttcgcagaacctggaggatatcttcagtggattgattccgacaatagtcacatgtctttccagaagacactgccggaaaactcgattgggaaccttaccaatcttatgcgccatttggaatctcaaaatccgcggctgaagccagactgggtaccggatctacccagaatgttctccgaaggcggcctagtagatgtagaggtggataaaagagacacaccacctcatcttgcatatatgatgcacgaaaatggattgataatgcatgaactaattgctcgcaagacacgaaatgaagagatgagagcccaactgaagcacttattaccccttgcagttgacgagacaagacgcggggcttacattactacggatcgctatacaatcattggccaaaagccacagagtgcttga

SEQ ID NO: 11724 - protein, 295 aa, Muscodor strobelii
  misc_feature: SGI Peptide ID NO. 563776
  misc_feature (1)..(292): NCBI GI: 119495959 Blast Desc: NFIA_015500 [Neosartorya fischeri NRRL 181] gi|119412916|gb|EAW22857.1| conserved [Neosartorya fischeri NRRL 181]
  misc_feature (1)..(291): NCBI GI: 189206205 Blast Desc: conserved [Pyrenophora tritici-repentis Pt-1C-BFP] gi|187975530|gb|EDU42156.1| conserved [Pyrenophora tritici-repentis Pt-1C-BFP]
  misc_feature (1)..(292): NCBI GI: 121701965 Blast Desc: conserved [Aspergillus clavatus NRRL 1] gi|119397390|gb|EAW07821.1| conserved [Aspergillus clavatus NRRL 1]
  misc_feature (52)..(292): NCBI GI: 70995237 Blast Desc: conserved [Aspergillus fumigatus Af293] gi|66850016|gb|EAL90343.1| conserved [Aspergillus fumigatus Af293] gi|159131135|gb|EDP56248.1| conserved [Aspergillus A1163]
  misc_feature (60)..(291): NCBI GI: 238503001 Blast Desc: conserved [Aspergillus flavus NRRL3357] gi|220691544|gb|EED47892.1| conserved [Aspergillus flavus NRRL3357]
  misc_feature (42)..(295): NCBI GI: 145246352 Blast Desc: An12g03500 [Aspergillus niger] gi|134080140|emb|CAK46121.1| protein product [Aspergillus niger]
  misc_feature (3)..(292): NCBI GI: 70998749 Blast Desc: methyltransferase [Aspergillus fumigatus Af293] gi|66851733|gb|EAL92058.1| methyltransferase, [Aspergillus fumigatus Af293]
  misc_feature (3)..(292): NCBI GI: 119489916 Blast Desc: NFIA_061810 [Neosartorya fischeri NRRL 181] gi|119411077|gb|EAW21020.1| conserved [Neosartorya fischeri NRRL 181]
  misc_feature (3)..(292): NCBI GI: 159127115 Blast Desc: methyltransferase, [Aspergillus fumigatus A1163]
  misc_feature (1)..(292): NCBI GI: 170940319 Blast Desc: protein product [Podospora anserina]
MVSGDDYVFTRDVLDNSRLNLMHSLWTRSSGYVIHPSIPTSNPKLFVADVGAGTGFPRAWLCDVSERLPQTVHIYGLDISFDAMPPSGVLPPNVTLRQWDVRTDVHEDLVCIFDVIQIRFFIFVLLRNEVPSVISKLIKMLSMSFYKPKHVSQLIMWRFAEPGGYLQWIDSDNSHMSFQKTLPENSIGNLTNLMRHLESQNPRLKPDWVPDLPRMFSEGGLVDVEVDKRDTPPHLAYMMHENGLIMHELIARKTRNEEMRAQLKHLLPLAVDETRRGAYITTDRYTIIGQKPQSA

SEQ ID NO: 11725 - DNA, 1380 bp, Muscodor strobelii
  misc_feature: SGI cDNA ID NO. 563777
  misc_feature: Encodes the peptide sequence at SEQ ID NO 11726
atgcaaagccgggacggttcgctcgcattgcttgctggtagctgttggggtggtggaggtacagtgaattgggctgcgagtttgccaccccaacagtttgtcctcaaggaatgggcagatggagggctcccatttttcctcacccctgagttccaggacagtgttgatcgtgtctccaagttcatgggcgtagggacaaaaggtattagccacaaccatggcaacaggaccctcctcgaaggggcaagatcgctcggctggaaagctgaagtgtgcccgcagaatgcgatgggtgagcatcatccctgtggtcattgcgggatgggttgtagatcagggctgaagcaaggaccggctgtaagctggcttccagcagcacagaaggctggtgctcagttcatcgaaggcttggcagtgtcgacggtggtctttgatcaagacaacgcaggaagcaacagggctactgggattcttggtcggtggacatcgcgcgactctgatggaaacttgcactctcccctcgcacagagggtccaacggcatgtggagattagcgcgaagagagtcattattgctgcaggtaccctgaacacacctcttttgctaatgcgaagtggactgaagagcccccaccttgggaagaaccttcatgtacatcctgcgggcaacctcatcgccacctttgaagaagaggtcaaaggctgggagggaactattcttacgagtgtgatcactgaattcgaaaatcttgatggaaacggacatggcgtaaagattgaaaggtctgcaatggtgccttacatgactgctttctcgctagcgtggcaaagcgcactttcgtggaagacacagatgctcaagcttcagcatatgaaccaattcgttgctattgctcgagatcgggattctggcagcgtgtcggccaatactatcaccggtgcacccgtcgtggcatatacaccgtccacatttgaccgagggcacatcctacagggacttatagcaattgctaagctatgctatgtaaggggcgcgcgggagctcactcccttcctacctaatatgccttcgttcaagagtggaaagccaacctcaagtcggaacgtgactgattcggacttcaccgaatggctgtcatcattagagcgacacaaacttgcatcctctgggactgtatttggatgcgcgcatcagatggggacttgtcgtatgagtgcaaatcctgccggtggtgtcgtcgaccattgcgggagggtatgggagaccagcaaccttttcattgcagacgcaagcgtgtttccgtcagcttcaggcgtcaaccccatgatcaccattatggctgttgctgaccacattgctcgcaagattgcagacatttaa

SEQ ID NO: 11726 - protein, 459 aa, Muscodor strobelii
  misc_feature: SGI Peptide ID NO. 563777
  misc_feature (293)..(452): Pfam Id: PF05199 Pfam Desc: GMC oxidoreductase
  misc_feature (1)..(234): Pfam Id: PF00732 Pfam Desc: GMC oxidoreductase
  misc_feature (397)..(452): Pfam Id: PF05199 Pfam Desc: GMC oxidoreductase
  misc_feature (5)..(234): Pfam Id: PF00732 Pfam Desc: GMC oxidoreductase
  misc_feature (1)..(457): NCBI GI: 154309784 Blast Desc: BC1G_07362 [Botryotinia fuckeliana B05.10] gi|150851823|gb|EDN27016.1| BC1G_07362 [Botryotinia fuckeliana B05.10]
  misc_feature (1)..(457): NCBI GI: 156052058 Blast Desc: SS1G_07437 [Sclerotinia sclerotiorum 1980] gi|154705214|gb|EDO04953.1| SS1G_07437 [Sclerotinia sclerotiorum 1980]
  misc_feature (5)..(456): NCBI GI: 145614222 Blast Desc: MGG_11317 [Magnaporthe grisea 70-15] gi|145021167|gb|EDK05296.1| MGG_11317 [Magnaporthe grisea 70-15]
  misc_feature (1)..(459): NCBI GI: 46125081 Blast Desc: FG06918.1 [Gibberella zeae PH-1]
  misc_feature (1)..(458): NCBI GI: 189208306 Blast Desc: long chain fatty alcohol oxidase [Pyrenophora tritici-repentis Pt-1C-BFP] gi|187976579|gb|EDU43205.1| long chain fatty alcohol oxidase [Pyrenophora tritici-repentis
  misc_feature (5)..(456): NCBI GI: 256732696 Blast Desc: NECHADRAFT_37686 [Nectria haematococca mpVI 77-13-4]
  misc_feature (1)..(457): NCBI GI: 85091650 Blast Desc: NCU08977 [Neurospora crassa OR74A] gi|28920401|gb|EAA29769.1| [Neurospora crassa OR74A]
  misc_feature (1)..(444): NCBI GI: 169599110 Blast Desc: SNOG_02371 [Phaeosphaeria nodorum SN15] gi|160704537|gb|EAT90583.2| SNOG_02371 [Phaeosphaeria nodorum SN15]
  misc_feature (1)..(457): NCBI GI: 255957169 Blast Desc: Pc21g23700 [Penicillium chrysogenum Wisconsin 54-1255] gi|211591048|emb|CAP97267.1| Pc21g23700 [Penicillium chrysogenum Wisconsin 54-1255]
  misc_feature (3)..(458): NCBI GI: 212533793 Blast Desc: long chain fatty alcohol oxidase, [Penicillium marneffei ATCC 18224] gi|210072417|gb|EEA26506.1| long chain fatty alcohol oxidase, [Penicillium marneffei ATCC 18224]
MQSRDGSLALLAGSCWGGGGTVNWAASLPPQQFVLKEWADGGLPFFLTPEFQDSVDRVSKFMGVGTKGISHNHGNRTLLEGARSLGWKAEVCPQNAMGEHHPCGHCGMGCRSGLKQGPAVSWLPAAQKAGAQFIEGLAVSTVVFDQDNAGSNRATGILGRWTSRDSDGNLHSPLAQRVQRHVEISAKRVIIAAGTLNTPLLLMRSGLKSPHLGKNLHVHPAGNLIATFEEEVKGWEGTILTSVITEFENLDGNGHGVKIERSAMVPYMTAFSLAWQSALSWKTQMLKLQHMNQFVAIARDRDSGSVSANTITGAPVVAYTPSTFDRGHILQGLIAIAKLCYVRGARELTPFLPNMPSFKSGKPTSSRNVTDSDFTEWLSSLERHKLASSGTVFGCAHQMGTCRMSANPAGGVVDHCGRVWETSNLFIADASVFPSASGVNPMITIMAVADHIARKIADI

SEQ ID NO: 11727 - DNA, 328 bp, Muscodor strobelii
  misc_feature: SGI EST ID NO. CUFF.27831.0
  misc_feature: Variant of the nucleotide sequence at SEQ ID NO 11725
gctgtaagctggcttccagcagcacagaaggctggtgctcagttcatcgaaggcttggcagtgtcgacggtggtctttgatcaagacaacgcaggaagcaacagggctactgggattcttggtcggtggacatcgcgcgactctgatggaaacttgcactctcccctcgcacagagggtccaacggcatgtggagattagcgcgaagagagtcattattgctgcaggtaccctgaacacacctcttttgctaatgcgaagtggactgaaggtgccatccctctgaagcatccttcgaaccaatagcccccaccttgggaagaaccttc

SEQ ID NO: 11728 - DNA, 774 bp, Muscodor strobelii
  misc_feature: SGI cDNA ID NO. 563778
  misc_feature: Encodes the peptide sequence at SEQ ID NO 11729
atgtcaatctcctacggcacttctctccgtccgcgtgttcttggacataatacatggttttctgagtcacaatggcagaaacttctcgctcttctagatgcagtcactccgcgcatcgtagtaggggcgtctatcgatgacgaccacgatattaacaagctgattatatccgagttagagtttctgaaagcatatggagacatcaaggacacaacgacatctcctcctacccttgaagacttccgaaactacctcgcgggccgcgcgatagacaacccacagttcatatccgctgtcaagcgtatggtccatgggttgccaccaaatgctcagcgccagctgtcccagctacttgatcttctaggatcgcggctcggtagctttctcagcagctggtcttggacaaccttatacaaccaatccttgtcgagaagagaaatggtcctccgaaaatggcaaaagtcgtgggtcccgatatggcctacactggccaagtccttcacgctcatggcgaaactatgctgggctcaatcggagcctttattaggggaactcagtggttataaatgctacgatagagagcaatgccaacatgcctcggcacaggacttcaagttcatgcaattccacgaggggcatgaaacggtctttctggacactgacgttgtcattgttggttctggctgtggtggaagtgtctgtgcgaaagtgctggcagaagccggacacaaggtcctcgtggttgataaaggctactatgtgccaccttcctag

SEQ ID NO: 11729 - protein, 257 aa, Muscodor strobelii
  misc_feature: SGI Peptide ID NO. 563778
  misc_feature (221)..(251): Pfam Id: PF01266 Pfam Desc: FAD dependent oxidoreductase
  misc_feature (221)..(254): Pfam Id: PF00890 Pfam Desc: FAD binding domain
  misc_feature (219)..(250): Pfam Id: PF01494 Pfam Desc: FAD binding domain
  misc_feature (221)..(251): Pfam Id: PF07992 Pfam Desc: Pyridine nucleotide-disulphide oxidoreductase
  misc_feature (16)..(257): NCBI GI: 85091650 Blast Desc: NCU08977 [Neurospora crassa OR74A] gi|28920401|gb|EAA29769.1| [Neurospora crassa OR74A]
  misc_feature (18)..(255): NCBI GI: 255957169 Blast Desc: Pc21g23700 [Penicillium chrysogenum Wisconsin 54-1255] gi|211591048|emb|CAP97267.1| Pc21g23700 [Penicillium chrysogenum Wisconsin 54-1255]
  misc_feature (19)..(257): NCBI GI: 154309784 Blast Desc: BC1G_07362 [Botryotinia fuckeliana B05.10] gi|150851823|gb|EDN27016.1| BC1G_07362 [Botryotinia fuckeliana B05.10]
  misc_feature (19)..(257): NCBI GI: 156052058 Blast Desc: SS1G_07437 [Sclerotinia sclerotiorum 1980] gi|154705214|gb|EDO04953.1| SS1G_07437 [Sclerotinia sclerotiorum 1980]
  misc_feature (16)..(257): NCBI GI: 242778904 Blast Desc: long chain fatty alcohol oxidase, [Talaromyces stipitatus ATCC 10500] gi|218722952|gb|EED22370.1| long chain fatty alcohol oxidase, [Talaromyces stipitatus ATCC 10500]
  misc_feature (14)..(257): NCBI GI: 256732696 Blast Desc: NECHADRAFT_37686 [Nectria haematococca mpVI 77-13-4]
  misc_feature (20)..(255): NCBI GI: 70996648 Blast Desc: long chain fatty alcohol oxidase [Aspergillus fumigatus Af293] gi|66850714|gb|EAL91041.1| long chain fatty alcohol oxidase, [Aspergillus fumigatus Af293] long chain fatty
  misc_feature (20)..(257): NCBI GI: 212533793 Blast Desc: long chain fatty alcohol oxidase, [Penicillium marneffei ATCC 18224] gi|210072417|gb|EEA26506.1| long chain fatty alcohol oxidase, [Penicillium marneffei ATCC 18224]
  misc_feature (20)..(255): NCBI GI: 119494301 Blast Desc: long chain fatty alcohol oxidase, [Neosartorya fischeri NRRL 181] gi|119412208|gb|EAW22149.1| long chain fatty alcohol oxidase, [Neosartorya fischeri NRRL 181]
  misc_feature (20)..(255): NCBI GI: 121700595 Blast Desc: long chain fatty alcohol oxidase, [Aspergillus clavatus NRRL 1] gi|119396705|gb|EAW07136.1| long chain fatty alcohol oxidase, [Aspergillus clavatus NRRL 1]
MSISYGTSLRPRVLGHNTWFSESQWQKLLALLDAVTPRIVVGASIDDDHDINKLIISELEFLKAYGDIKDTTTSPPTLEDFRNYLAGRAIDNPQFISAVKRMVHGLPPNAQRQLSQLLDLLGSRLGSFLSSWSWTTLYNQSLSRREMVLRKWQKSWVPIWPTLAKSFTLMAKLCWAQSEPLLGELSGYKCYDREQCQHASAQDFKFMQFHEGHETVFLDTDVVIVGSGCGGSVCAKVLAEAGHKVLVVDKGYYVPPS

SEQ ID NO: 11730 - DNA, 1575 bp, Muscodor strobelii
  misc_feature: SGI cDNA ID NO. 563779
  misc_feature: Encodes the peptide sequence at SEQ ID NO 11731
atgtccaaggaccccaagcccgatgctacctcgccgagtgctcttacgtctggctcatcacggcctctttccagtcttgtttcttgggttgcaatgatcgccaccgctctgctaaccgtcgtactggccctccaatatagtcccgtaagctcaacgtctcctgtcgcaatggccccctctgccgcttgcaccgagctccacgcgcgtctcggctccgtaataatcatgccatctgccgcaaattacaccagtctgagcgaagagaactggtcgcagacgtcgtggcacgagccggcctgcattgccctgcccgttaccacctccgatgttagttcgttggtcacttctcttgtccaagctcaggtgcaatttgccgtgcggtctggcggccactcgcctaacccctttgatgcatctatcgacaacggtgttctcatatcactagacaatctcgaccaaatttcctacgatgcgaataccgaactaattaccttaggacctggggcccggtggaatcccgtgtttgatgcacttgatcagtttgagagaaccatggtcgggggcagggtctctggtgttggcgtcggtgggctgagtcttgggtcgggtctgtcgtacttgacagacttgtacgggctgggttgtgacaacattgtcgaatacgaggtggtattggccgacggacgcgtagtggaagccagtacggcgtcgaaccaagacctgttctgggctctgaaagggggcacaaacaactttggcatcgtcactaagcttgttgctaagacatacccgattcacaacgcttggggtggtgtcctgcttttctccagcgaccaattgcccgcactcctacaggcactgtatgagtatgagacgcagccggacaaggacccatacgccaacatgatcataaacctggtgccgactaacgcgacaaacctcctcacgctcatatacctaaagcccgtggagaaaccggcggcatacgccccgttcttctctctggcgccaatcttcgagcagacaggcttcgcgacgctgcaccaactcatgaacatgttcccgccaacggacgcgccacgctggacctggttcacacagacgttcgagcctgacgccgggctctacggtggaatcgcggagctatacgccacggcccccgaactcaaagccatcgcctcgttgcccggagcgtcgctcatcgccgcggtgcagccgatcgccgcaagtgccgtggtagctggtcgcgacagcaatgccggcacgggcaacgcgctcggcctcgcggccgtgaaccaggtgtggtggaccgtgacagtggcgtggtcgagtgcggccaacgatacggccgtgtacgcagctgctgcatcattccacgacaagatcacggctctcgcgagcgcgcgcaacgtgactctcgactacatctttatgaacgaagccaacatcgagcagtccgtcatcgcgtcgtacggcgacgctagcttgcagcggctgcggtctgttcaggccgtgtatgacccggacttcgtgtttcagagactagtacccgggggccaaaagatacccgggtag

SEQ ID NO: 11731 - protein, 524 aa, Muscodor strobelii
  misc_feature: SGI Peptide ID NO. 563779
  misc_feature (98)..(234): Pfam Id: PF01565 Pfam Desc: FAD binding domain
  misc_feature (32)..(523): NCBI GI: 46138193 Blast Desc: FG10611.1 [Gibberella zeae PH-1]
  misc_feature (53)..(481): NCBI GI: 116201119 Blast Desc: CHGG_08444 [Chaetomium globosum CBS 148.51] gi|88176962|gb|EAQ84430.1| CHGG_08444 [Chaetomium globosum CBS 148.51]
  misc_feature (61)..(522): NCBI GI: 242821307 Blast Desc: FAD-binding oxidoreductase, [Talaromyces stipitatus ATCC 10500] gi|218712574|gb|EED11999.1| FAD-binding oxidoreductase, [Talaromyces stipitatus ATCC 10500]
  misc_feature (62)..(519): NCBI GI: 242821331 Blast Desc: 6-hydroxy-D-nicotine oxidase, [Talaromyces stipitatus ATCC 10500] gi|218712579|gb|EED12004.1| 6-hydroxy-D-nicotine oxidase, [Talaromyces stipitatus ATCC 10500]
  misc_feature (60)..(522): NCBI GI: 46110302 Blast Desc: FG02033.1 [Gibberella zeae PH-1]
  misc_feature (68)..(522): NCBI GI: 171678393 Blast Desc: protein product [Podospora anserina] gi|170937266|emb|CAP61923.1| protein product [Podospora anserina]
  misc_feature (36)..(522): NCBI GI: 261357103 Blast Desc: FAD binding domain-containing protein [Verticillium albo-atrum VaMs.102]
  misc_feature (60)..(522): NCBI GI: 145233117 Blast Desc: An02g07980 [Aspergillus niger] gi|134056856|emb|CAK37761.1| protein product [Aspergillus niger]
  misc_feature (90)..(519): NCBI GI: 85090595 Blast Desc: NCU09273 [Neurospora crassa OR74A] gi|28919859|gb|EAA29256.1| conserved [Neurospora crassa OR74A]
  misc_feature (24)..(523): NCBI GI: 261361254 Blast Desc: FAD binding domain-containing protein [Verticillium albo-atrum VaMs.102]
MSKDPKPDATSPSALTSGSSRPLSSLVSWVAMIATALLTVVLALQYSPVSSTSPVAMAPSAACTELHARLGSVIIMPSAANYTSLSEENWSQTSWHEPACIALPVTTSDVSSLVTSLVQAQVQFAVRSGGHSPNPFDASIDNGVLISLDNLDQISYDANTELITLGPGARWNPVFDALDQFERTMVGGRVSGVGVGGLSLGSGLSYLTDLYGLGCDNIVEYEVVLADGRVVEASTASNQDLFWALKGGTNNFGIVTKLVAKTYPIHNAWGGVLLFSSDQLPALLQALYEYETQPDKDPYANMIINLVPTNATNLLTLIYLKPVEKPAAYAPFFSLAPIFEQTGFATLHQLMNMFPPTDAPRWTWFTQTFEPDAGLYGGIAELYATAPELKAIASLPGASLIAAVQPIAASAVVAGRDSNAGTGNALGLAAVNQVWWTVTVAWSSAANDTAVYAAAASFHDKITALASARNVTLDYIFMNEANIEQSVIASYGDASLQRLRSVQAVYDPDFVFQRLVPGGQKIPG

SEQ ID NO: 11732 - DNA, 290 bp, Muscodor strobelii
  misc_feature: SGI EST ID NO. CUFF.27845.0
  misc_feature: Variant of the nucleotide sequence at SEQ ID NO 11730
acaactttggcatcgtcactaagcttgttgctaagacatacccgattcacaacgcttggggtggtgtcctgcttttctccagcgaccaattgcccgcactcctacaggcactgtatgagtatgagacgcagccggacaaggacccatacgccaacatgatcataaacctggtgccgactaacgcgacaaacctcctcacgctcatatacctaaagcccgtggagaaaccggcggcatacgccccgttcttctctctggcgccaatcttcgagcagacaggcttcgcgacg

SEQ ID NO: 11733 - DNA, 597 bp, Muscodor strobelii
  misc_feature: SGI cDNA ID NO. 563780
  misc_feature: Encodes the peptide sequence at SEQ ID NO 11734
atgcgctctgccctctatcttgctcttctcctcggcaccgcctgtgcttcggtgaagcccccatcacagcgcgactttagtcgcagacctgctggagcaaccctcactgcatcatccggccccagggcgcctgtcagcatcgacggccagggctttctccaggatctgggtcgtctggatgccatcgaactttccagccacggtagatttgctggcctcgggcccggggcaacttggggcgacgtctatgggtctcttgacgcccggcgagccgttgtgccgggcggacggcacccctcaatcgccttcggccttgtcgcagacaacgtcagagccttggaggttgtcctcgcgaacgggtctgtagttgaggccagtctggtatcacactctaatctcttctgggccctcaaagttagagggcccaacttcggcatcgaaccggatgtgctggtcactctctccgcctggcagccaaagggggcagatgattccctatctaacattaaggtcaatattgcccttggttcgatcgccgtcgttatgatctatgccgagtcttcagccgagcctccggcggcgttcgcttcattgtga

SEQ ID NO: 11734 - protein, 198 aa, Muscodor strobelii
  misc_feature: SGI Peptide ID NO. 563780
  misc_feature (100)..(126): Pfam Id: PF01565 Pfam Desc: FAD binding domain
  misc_feature (46)..(195): NCBI GI: 46138189 Blast Desc: FG10609.1 [Gibberella zeae PH-1]
  misc_feature (46)..(196): NCBI GI: 242821331 Blast Desc: 6-hydroxy-D-nicotine oxidase, [Talaromyces stipitatus ATCC 10500] gi|218712579|gb|EED12004.1| 6-hydroxy-D-nicotine oxidase, [Talaromyces stipitatus ATCC 10500]
  misc_feature (46)..(198): NCBI GI: 116201111 Blast Desc: CHGG_08440 [Chaetomium globosum CBS 148.51] gi|88176958|gb|EAQ84426.1| CHGG_08440 [Chaetomium globosum CBS 148.51]
  misc_feature (46)..(146): NCBI GI: 156040545 Blast Desc: SS1G_12289 [Sclerotinia sclerotiorum 1980] gi|154696345|gb|EDN96083.1| SS1G_12289 [Sclerotinia sclerotiorum 1980]
  misc_feature (46)..(193): NCBI GI: 116201119 Blast Desc: CHGG_08444 [Chaetomium globosum CBS 148.51] gi|88176962|gb|EAQ84430.1| CHGG_08444 [Chaetomium globosum CBS 148.51]
  misc_feature (55)..(191): NCBI GI: 169619690 Blast Desc: SNOG_13043 [Phaeosphaeria nodorum SN15] gi|160703877|gb|EAT79370.2| SNOG_13043 [Phaeosphaeria nodorum SN15]
  misc_feature (51)..(146): NCBI GI: 240278798 Blast Desc: FAD binding domain-containing protein [Ajellomyces capsulatus H143]
  misc_feature (51)..(196): NCBI GI: 46138193 Blast Desc: FG10611.1 [Gibberella zeae PH-1]
  misc_feature (51)..(146): NCBI GI: 154287954 Blast Desc: [Ajellomyces capsulatus NAm1] gi|150408413|gb|EDN03954.1| [Ajellomyces capsulatus NAm1]
  misc_feature (51)..(146): NCBI GI: 226291344 Blast Desc: FAD binding domain-containing protein [Paracoccidioides brasiliensis Pb18]
MRSALYLALLLGTACASVKPPSQRDFSRRPAGATLTASSGPRAPVSIDGQGFLQDLGRLDAIELSSHGRFAGLGPGATWGDVYGSLDARRAVVPGGRHPSIAFGLVADNVRALEVVLANGSVVEASLVSHSNLFWALKVRGPNFGIEPDVLVTLSAWQPKGADDSLSNIKVNIALGSIAVVMIYAESSAEPPAAFASL

SEQ ID NO: 11735 - DNA, 2901 bp, Muscodor strobelii
  misc_feature: SGI EST ID NO. CUFF.27879.2
  misc_feature: Variant of the nucleotide sequence at SEQ ID NO 11733
aattaatgtagttatatataatataagtcgtaggggtaacgcggtacgcggtggtccgtaagggggtggcccgtggggggtgtgagaaccttaggcattatacgcatcaatgggcactatccagcactcttgcaaggagttggatttcggactcttaaacatggctcagttcttccagcacagttaatggattgtagaaagagaactcgctcataagttcgtcccatagctgttttgacgtcctatttccttcccccgagtatatgactggggggaggctgcagcgacagtgcgggtcaggacaagtacttctatccaatgctacgcaaatcgccaaatgaacaggcaacaggaccgggcagggatggcatgcacttacggcaccagcttctgaaaagacaagaactgtccatgagtctcttcaccgtggcgcacggccgcgtcggtgatcatacgcgcaccaacagcggacgagcaagcctctaagcgttgaatcctcttgatgagaccaaaacccagtgtgccctcaaaatcgcgattgaactgcgagtcgtggatggcgccgggcgacgccccgttgacaacggctactgttgcgggcacactctttgcgactgccgacaagaagtattgacccaggagcttcgatacgaacatgcggtcccgggtgttgtcggccgccttgccgggacggtccagcgctgggagaatcggcacatcgttgccgatggggaactgcgcccatgcacctacctcggacaatgtgagagtaattcgcgtaggctgcggctggtggccgcgaaaagccttggccgcgggcgagaggaggagcaccaggagcgcagtggacaggtagttgacctgaataatctcgtcgtggcccgtcgtcgagttgagcgcgcgcttggctgggcagatgccggcgttgaggacggcgatgtcgagacgcgtcagtgtcttggcgacgcggtctgcgaatgcaaccacggagtcatagctgtcaagatcgagcctccaggcctcaatggtgcctgcctggaggtctttgagatcagcagcaagactggccgccgccgctctgcccttttcctcgtcgcgaacggccaatatcagcttgctgacccccagatggagtagttgacggctggtctcgagcccgacgccacaattcgaccctgtcaccagtgccgtcttgccgctcaggtctacatcgctgaccggctgcggcttggctgtgatttggctgtatagatatcgaggaaagcttgcttgcttttccggggaaatgtcaaaagcgggagatgtcatagccgtctaaaacgtcacaagggccgtgcgacgactgtagataatgccaacgacccagggaatgcgcgggggctgaacaacgtcgacagaactgcctgggaaaggaacttcaacggcagagtgttcctagaacaaagagagacgagctcgggttcctttctgttggcttgctatattctgctctactgcgtgccctttgcttggtgtggggcgacaagccacccaacagaagcactcattgcggatcagtctcggtgcatggaatacccgcatcgtaccaccccagctcacgtcaagtatgcaagatatcttgcctttacatgtcatgcaagcaggtacatgggccttaggtgcctccttcgttcttccttttccctccgcgggatctcactctttatcattagggtgaccgcttctcgtgccatgcagtggtctgattccggcctcggcagctcactgcccgagccagagtcaacatgcgctctgccctctatcttgctcttctcctcggcaccgcctgtgcttcggtgaagcccccatcacagcgcgactttagtctcctaggccgaacacttggcctggcgccttctgcagtccattgacttgaaaagagatacgccccggcgtcaacagacaccaacagggtcgcagccgcctgtctgactgcccgaactgcccttggcgaagcccaggtcgagatatggccgctaccaaacgagagcatcgtctaggagaattggtcgcagacctgctggagcaaccctcactgcatcatccggccccagggcgcctgtcaggtagcgactgcactgtaaatcggcgttttctactctgtccgttttgccgtccgtagcgggggccactcgcccaacccccgctagtccagcatcgacggccagggctttctccaggatctgggtcgtctggatgccatcgaactttccagccacggtagatttgctggcctcgggcccggggcaacttggggcgacgtctatgggtctcttgacgcccggcgagccgttgtgccgggcggacggcacccctcaatcgccgtgggaggactaatactcggtggcagcatgttgcacgtctcaaactagttcggccttgtcgcagacaacgtcagagccttggaggttgtcctcgcgaacgggtctgtagttgaggccagtctggtatcacactctaatctcttctgggccctcaaagttagagggcccaacttcggcatcgtcacccgctacgacgtttatacgtcacccgcgcatgaggtctgggttcagatcaatgtttatgccgcgagcaggaaccggatgtgctggtcactctctccgcctggcagccaaagggggcagatgattccctatctaacattaaggtcaatattgcccttggttcgatcgccgtcgttatgatctatgccgagtcttcagccgagcctccggcggcgttcgcttcattccaccgccatatcgtctgctcctacccggtgcgttccactactgtacagcagtcgcattctaccaaattcgctatatctacactatttgcccttacgtacttcagcaactagatgttgttgtgatcgcc

SEQ ID NO: 11736 - DNA, 1053 bp, Muscodor strobelii
  misc_feature: SGI cDNA ID NO. 563781
  misc_feature: Elevated expression when VOC is produced
  misc_feature: Encodes the peptide sequence at SEQ ID NO 11737
atgacatctcccgcttttgacatttccccggaaaagcaagcaagctttcctcgatatctatacagccaaatcacagccaagccgcagccggtcagcgatgtagacctgagcggcaagacggcactggtgacagggtcgaattgtggcgtcgggctcgagaccagccgtcaactactccatctgggggtcagcaagctgatattggccgttcgcgacgaggaaaagggcagagcggcggcggccagtcttgctgctgatctcaaagacctccaggcaggcaccattgaggcctggaggctcgatcttgacagctatgactccgtggttgcattcgcagaccgcgtcgccaagacactgacgcgtctcgacatcgccgtcctcaacgccggcatctgcccagccaagcgcgcgctcaactcgacgacgggccacgacgagattattcaggtcaactacctgtccactgcgctcctggtgctcctcctctcgcccgcggccaaggcttttcgcggccaccagccgcagcctacgcgaattactctcacattgtccgaggtaggtgcatgggcgcagttccccatcggcaacgatgtgccgattctcccagcgctggaccgtcccggcaaggcggccgacaacacccgggaccgcatgttcgtatcgaagctcctgggtcaatacttcttgtcggcagtcgcaaagagtgtgcccgcaacagtagccgttgtcaacggggcgtcgcccggcgccatccacgactcgcagttcaatcgcgattttgagggcacactgggttttggtctcatcaagaggattcaacgcttagaggcttgctcgtccgctgttggtgcgcgtatgatcaccgacgcggccgtgcgccacggtgaagagactcatggacagttcttgtcttttcagaagctggtgcccctccccccagtcatatactcgggggaaggaaataggacgtcaaaacagctatgggacgaacttatgagcgagttctctttctacaatccattaactgtgctggaagaactgagccatgtttaa

SEQ ID NO: 11737 - protein, 350 aa, Muscodor strobelii
  misc_feature: SGI Peptide ID NO. 563781
  misc_feature (39)..(188): Pfam Id: PF00106 Pfam Desc: short chain dehydrogenase
  misc_feature (39)..(131): Pfam Id: PF00106 Pfam Desc: short chain dehydrogenase
  misc_feature (1)..(348): NCBI GI: 46138187 Blast Desc: FG10608.1 [Gibberella zeae PH-1]
  misc_feature (3)..(310): NCBI GI: 85110131 Blast Desc: NCU08406 [Neurospora crassa OR74A] gi|164423984|ref|XP_001728105.1| NCU10650 [Neurospora crassa OR74A] gi|28924952|gb|EAA34042.1| conserved [Neurospora crassa
  misc_feature (11)..(350): NCBI GI: 238844730 Blast Desc: retinol dehydrogenase 12 [Microsporum canis CBS 113480]
  misc_feature (1)..(337): NCBI GI: 242773397 Blast Desc: short-chain dehydrogenase, [Talaromyces stipitatus ATCC 10500] gi|218721851|gb|EED21269.1| short-chain dehydrogenase, [Talaromyces stipitatus ATCC 10500]
  misc_feature (6)..(347): NCBI GI: 256728146 Blast Desc: NECHADRAFT_54058 [Nectria haematococca mpVI 77-13-4]
  misc_feature (3)..(347): NCBI GI: 256720619 Blast Desc: NECHADRAFT_50449 [Nectria haematococca mpVI 77-13-4]
  misc_feature (7)..(347): NCBI GI: 145233707 Blast Desc: An02g10970 [Aspergillus niger] gi|134057159|emb|CAK48762.1| protein product [Aspergillus niger]
  misc_feature (18)..(339): NCBI GI: 46103007 Blast Desc: FG00073.1 [Gibberella zeae PH-1]
  misc_feature (19)..(349): NCBI GI: 238505799 Blast Desc: short-chain dehydrogenase/reductase family protein, [Aspergillus flavus NRRL3357] gi|220690218|gb|EED46568.1| short-chain dehydrogenase/reductase family protein, [Aspergillus
  misc_feature (28)..(345): NCBI GI: 256725584 Blast Desc: NECHADRAFT_94266 [Nectria haematococca mpVI 77-13-4]
  misc_feature: Useful for introducing or modulating the production of volatile compounds
MTSPAFDISPEKQASFPRYLYSQITAKPQPVSDVDLSGKTALVTGSNCGVGLETSRQLLHLGVSKLILAVRDEEKGRAAAASLAADLKDLQAGTIEAWRLDLDSYDSVVAFADRVAKTLTRLDIAVLNAGICPAKRALNSTTGHDEIIQVNYLSTALLVLLLSPAAKAFRGHQPQPTRITLTLSEVGAWAQFPIGNDVPILPALDRPGKAADNTRDRMFVSKLLGQYFLSAVAKSVPATVAVVNGASPGAIHDSQFNRDFEGTLGFGLIKRIQRLEACSSAVGARMITDAAVRHGEETHGQFLSFQKLVPLPPVIYSGEGNRTSKQLWDELMSEFSFYNPLTVLEELSHV

SEQ ID NO: 11738 - DNA, 1813 bp, Muscodor strobelii
  misc_feature: SGI EST ID NO. CUFF.27878.3
  misc_feature: Variant of the nucleotide sequence at SEQ ID NO 11736
gggcgtatctcttttcaagtcaatggactgcagaaggcgccaggccaagtgttcggcctaggagactaaagtcgcgctgtgatgggggcttcaccgaagcacaggcggtgccgaggagaagagcaagatagagggcagagcgcatgttgactctggctcgggcagtgagctgccgaggccggaatcagaccactgcatggcacgagaagcggtcaccctaatgataaagagtgagatcccgcggagggaaaaggaagaacgaaggaggcacctaaggcccatgtacctgcttgcatgacatgtaaaggcaagatatcttgcatacttgacgtgagctggggtggtacgatgcgggtattccatgcaccgagactgatccgcaatgagtgcttctgttgggtggcttgtcgccccacaccaagcaaagggcacgcagtagagcagaatatagcaagccaacagaaaggaacccgagctcgtctctctttgttctaggaacactctgccgttgaagttcctttcccaggcagttctgtcgacgttgttcagcccccgcgcattccctgggtcgttggcattatctacagtcgtcgcacggcccttgtgacgttttagacggctatgacatctcccgcttttgacatttccccggaaaagcaagcaagctttcctcgatatctatacagccaaatcacagccaagccgcagccggtcagcgatgtagacctgagcggcaagacggcactggtgacagggtcgaattgtggcgtcgggctcgagaccagccgtcaactactccatctgggggtcagcaagctgatattggccgttcgcgacgaggaaaagggcagagcggcggcggccagtcttgctgctgatctcaaagacctccaggcaggcaccattgaggcctggaggctcgatcttgacagctatgactccgtggttgcattcgcagaccgcgtcgccaagacactgacgcgtctcgacatcgccgtcctcaacgccggcatctgcccagccaagcgcgcgctcaactcgacgacgggccacgacgagattattcaggtcaactacctgtccactgcgctcctggtgctcctcctctcgcccgcggccaaggcttttcgcggccaccagccgcagcctacgcgaattactctcacattgtccgaggtaggtgcatgggcgcagttccccatcggcaacgatgtgccgattctcccagcgctggaccgtcccggcaaggcggccgacaacacccgggaccgcatgttcgtatcgaagctcctgggtcaatacttcttgtcggcagtcgcaaagagtgtgcccgcaacagtagccgttgtcaacggggcgtcgcccggcgccatccacgactcgcagttcaatcgcgattttgagggcacactgggttttggtctcatcaagaggattcaacgcttagaggcttgctcgtccgctgttggtgcgcgtatgatcaccgacgcggccgtgcgccacggtgaagagactcatggacagttcttgtcttttcagaagctggtgcccctccccccagtcatatactcgggggaaggaaataggacgtcaaaacagctatgggacgaacttatgagcgagttctctttctacaatccattaactgtgctggaagaactgagccatgtttaagagtccgaaatccaactccttgcaagagtgctggatagtgcccattgatgcgtataatgcctaaggttctcacaccccccacgggccacccccttacggaccaccgcgtaccgcgttacccctacgacttatattatat

SEQ ID NO: 11739 - DNA, 903 bp, Muscodor strobelii
  misc_feature: SGI cDNA ID NO. 563782
  misc_feature: Encodes the peptide sequence at SEQ ID NO 11740
atggcagaatctgagttcaacgtccctgctgccgctagcttcgagcttgtcgggcctaagcctactatcctcatcctagctaacgtgaaatgggacgacttccacggtgtccaccgcgacttttttgctatcatggcagcccaagcattcgttcagcacgttgacctcaacaagcctgaccaggcttatgtcactgtatcacagaacccctccgcaaaggcaatctgtgtctcctctcaactgatcctggacaacaaacataaggacctgtcgaccctgttggtcacctacacgaagaagggcggtagggtgatctgcacgggaggtgaattttcgtgctggatgggccgtcccttcgactcctggatggcgaattactggggtcttccttggaatgcatcggtatatacccgtgccgatgtgaaccttcaaaccgcccatgttgggcctggtgacgatgatgcctggagagctggcctgcccgatcaacacaaccagaaggcgcatttcattgagggtgtagcccgctgtgactgtctctactcgccttcacaacgagcccttgataaagctccagctttcttcaaccctaagaaccggaacttcaacgagggagatctggctgctgttgcctttgccaagtatggggaaggttggtttggctacgtcggtgatgtaaatatggagcctggtagcacggaggacacgattcttgccatgctcggcttgaagttcgatccgagtcgacgccgcttccaaggctacgtcagctacaccattctccccgacggaagccgcaaggccactgtccacgagcactgccacccactttcgggtctaacccgcgaaggctctatggacggcccagagatgactagacggtacaatgatagtcagagatga

SEQ ID NO: 11740 - protein, 300 aa, Muscodor strobelii
  misc_feature: SGI Peptide ID NO. 563782
  misc_feature (19)..(243): NCBI GI: 116179140 Blast Desc: CHGG_00198 [Chaetomium globosum CBS 148.51] gi|88184495|gb|EAQ91963.1| CHGG_00198 [Chaetomium globosum CBS 148.51]
  misc_feature (37)..(243): NCBI GI: 261361602 Blast Desc: conserved [Verticillium albo-atrum VaMs.102]
  misc_feature (58)..(243): NCBI GI: 238488175 Blast Desc: conserved [Aspergillus flavus NRRL3357] gi|220697713|gb|EED54053.1| conserved [Aspergillus flavus NRRL3357]
  misc_feature (23)..(243): NCBI GI: 170093766 Blast Desc: [Laccaria bicolor S238N-H82] gi|164646558|gb|EDR10803.1| [Laccaria bicolor S238N-H82]
  misc_feature (20)..(229): NCBI GI: 238843578 Blast Desc: conserved [Microsporum canis CBS 113480]
  misc_feature (58)..(229): NCBI GI: 169762402 Blast Desc: [Aspergillus oryzae RIB40] gi|83770129|dbj|BAE60262.1| protein product [Aspergillus oryzae]
  misc_feature (38)..(243): NCBI GI: 116203765 Blast Desc: CHGG_09766 [Chaetomium globosum CBS 148.51] gi|88175894|gb|EAQ83362.1| CHGG_09766 [Chaetomium globosum CBS 148.51]
  misc_feature (59)..(243): NCBI GI: 256725157 Blast Desc: NECHADRAFT_55208 [Nectria haematococca mpVI 77-13-4]
  misc_feature (20)..(244): NCBI GI: 242814093 Blast Desc: transcription factor Rba50, [Talaromyces stipitatus ATCC 10500] gi|218714640|gb|EED14063.1| transcription factor Rba50, [Talaromyces stipitatus ATCC 10500]
  misc_feature (20)..(243): NCBI GI: 70988733 Blast Desc: conserved [Aspergillus fumigatus Af293] gi|66846853|gb|EAL87184.1| conserved [Aspergillus fumigatus Af293] gi|159128636|gb|EDP53750.1| conserved [Aspergillus A1163]
MAESEFNVPAAASFELVGPKPTILILANVKWDDFHGVHRDFFAIMAAQAFVQHVDLNKPDQAYVTVSQNPSAKAICVSSQLILDNKHKDLSTLLVTYTKKGGRVICTGGEFSCWMGRPFDSWMANYWGLPWNASVYTRADVNLQTAHVGPGDDDAWRAGLPDQHNQKAHFIEGVARCDCLYSPSQRALDKAPAFFNPKNRNFNEGDLAAVAFAKYGEGWFGYVGDVNMEPGSTEDTILAMLGLKFDPSRRRFQGYVSYTILPDGSRKATVHEHCHPLSGLTREGSMDGPEMTRRYNDSQR

SEQ ID NO: 11741 - DNA, 645 bp, Muscodor strobelii
  misc_feature: SGI cDNA ID NO. 563783
  misc_feature: Encodes the peptide sequence at SEQ ID NO 11742
atgcctcacttgaaaactgagatcaccactgttggctcgaatggtcttatccagatgggtcgtgggcgtgttacatcggtcgcttttgcccctaatggcacaagctggtttattcgatacgacaccaaagtgtgcctatggggtccacatctttccacatttccctcgacatggaggtcaatcatcgatgacctcgagaagaatcatccgaggaaagatgaatgcatcgattttgtcgcgttcggtccacatgagcttctactcctcagattcgagaatggcaattctctgatggtggtgccggataacccggcactgcaaaatcagatatcgtcagagctaatcaaagagatcgaagaacgtctagctgccggttggacattcggtaatcgtacaacgctctgcgcatttgataccaaccgctggttcatggaatggagacgtggcagcgatgcagtgttcaagtatagtatgggactcggggataaaagccacgaagatcttgcgcgcgttcaaaaggtgttgtccggcgttggaaatgatcctgcggccgttgcaaacaacgagactgcgcagcttatcgcagccaacggtcgctttcaaacagcgttgcacctcaataatgcgttgtttggcagatattaa

SEQ ID NO: 11742 - protein, 214 aa, Muscodor strobelii
  misc_feature: SGI Peptide ID NO. 563783
MPHLKTEITTVGSNGLIQMGRGRVTSVAFAPNGTSWFIRYDTKVCLWGPHLSTFPSTWRSIIDDLEKNHPRKDECIDFVAFGPHELLLLRFENGNSLMVVPDNPALQNQISSELIKEIEERLAAGWTFGNRTTLCAFDTNRWFMEWRRGSDAVFKYSMGLGDKSHEDLARVQKVLSGVGNDPAAVANNETAQLIAANGRFQTALHLNNALFGRY

SEQ ID NO: 11743 - DNA, 1240 bp, Muscodor strobelii
  misc_feature: SGI EST ID NO. CUFF.27873.0
  misc_feature: Variant of the nucleotide sequence at SEQ ID NO 11741
ctcatccataattagcaggaaagatggcggcgattttcgggtttggcaatgcacccaactctttcattgtggcaaacggatctgtccttgactatcaagaactgcctcccgagtatgagggtcaattcaaaacatatgcgtggaatgccatgcaactcaaagcttttacaacaggtccaaatgggtatcattgggcaatcaaacacgcgggtgattggtcggctcggggcccgtccgacatgatgcctcacttgaaaactgagatcaccactgttggctcgaatggtcttatccagatgggtcgtgggcgtgttacatcggtcgcttttgcccctaatggcacaagctggtttattcgatacgacaccaaagtgtgcctatggggtccacatctttccacatttccctcgacatggaggtcaatcatcgatgacctcgagaagaatcatccgaggaaagatgaatgcatcgattttgtcgcgttcggtccacatgagcttctactcctcagattcgagaatggcaattctctgatggtggtgccggataacccggcactgcaaaatcagatatcgtcagagctaatcaaagagatcgaagaacgtctagctgccggttggacattcggtaatcgtacaacgctctgcgcatttgataccaaccgctggttcatggaatggagacgtggcagcgatgcagtgttcaagtatagtatgggactcggggataaaagccacgaagatcttgcgcgcgttcaaaaggtgttgtccggcgttggaaatgatcctgcggccgttgcaaacaacgagactgcgcagcttatcgcagccaacggtcgctttcaaacagcgttgcacctcaataatgcgttgtttggcagatattaaggtcttttcgagtatagcatttctacaggaatatgtcacagagcgcgttcgacaatgcatcacttatcgttcggtcacaaaccgtccacatgcccatacaaaagtggagattgccttagatgacagttcatgatgatggcagcgattccagcagacagtaaacggtcagcttgagtctatactgacacttcaatatctccccatcatccatcttgtatattttcgtactgttgaaaaccttatattgttgacggtgcatctgcgtacgcagatagaggcgaccaccacatccatcttgtatggaatccagacttactatagcttgtcttggcaacaatcccatcacgattccg

SEQ ID NO: 11744 - DNA, 2100 bp, Muscodor strobelii
  misc_feature: SGI cDNA ID NO. 563784
  misc_feature: Encodes the peptide sequence at SEQ ID NO 11745
atgcgaacgatctcatcgacgccaagtttcttagacgcgttgaaaagccgtgacgatatccccgaagctgagcaaccggccgcaatccggtccatgatgaaagtacaccagaaaaaggcgctagctttcatgttacaacgggagcgtggatggatgttcagtaaagagagcccagatatatgggagacttacggcgctggcgaagaaaccttcttcgtgaatagagtttctaatgtgtgtcagaaggaggaacctccagagttccgtggcgggatcattgcagatacaatgggactgggcaaaaccctcacgatgattgctttagtagcaacagatctagcctcaccaagagcgacattcttccatacaatcggtcaatcaccgactattacaaccgtcaatgctactctggtcatcattcccccaccacttttgtctacttgggaagaacagctagacgagcatgtttttaagggttgcctggaatggtgtcgacatcatgggaaaagcaggataggcaatgtcaacgagatatatgccaagaatgtggtgctcactacgtaccatacagtttcagcagaatggaaggcatataaggacaaccgtcgatctatcctcttctccattcgttggaagcgactgatcctagacgaagcccatttcatccgtaattcaacttcgcggatggccaaggcttgcaatgccttagaggcaaccgctcgatgggctgtctcaggcactccaatccagaaccgattatccgatcttgcatctctactcaaattcatccaagccagcccatattccgatactaaacagttcgattcggatatatcacaattgtggaagtctggtgaggatgaagaagcttcaaggcgactccaatttttgtctacctgtttgatcctccgtcgttgcaagggagcgattgatttacccaataggacagatcaatttttgatggtaaacttcacaccagacgaacaggatcagtatgagacactcaaacagcaagcaattatgagcatcgatgcagcattctcggggcaacaaggaagttcacggcccagtatgtacgcgaacgcactacaacgaatcgagtcattacgtctgttctgtgatcttggccttcaatatcatggtagacatatgatacaagccgatgacgactggtcgagaaccgcacagctgactttcaattcaaaacgaggactagatcttctgttctgtatgaattgttctctgctcctagatttaacggagtcactcttgggcgactcggggcaggtaaccaccttgccactgttttccagatgtatgaagtttatttgcagcgattgcgtgcgcaaagcagcctgcgatcgtcgcgccgccgactgtggccataaacccgcctgcgccatggcgcctgtttcaataagtggtgatgtgcttgaagagactttaggcgtactttccgctgcacctgtccctgctccagggctatcatccaaagtccaggcactgatatcagaccttaagaaagtatctcagagtactaaatgtgtcgtcttctccacctggagacttacactcgatctagtgcaagcaggccttgataaaaattcaatctgcagtattcgatttgatggaaaagtacctcagagtgagagggggaatgtcgttaatcaatttcgctccgatccgcaaattcgagtcatgttactcaccctgtcatgtggtgctgtgggtcttactctaactgccgcctcacgcgcatatctgatggaaccacactggaatccgactcttgaagagcaggctctcgctcgaatccatcgcatcggccagaccaaagaagtgacgaccattcgacttttcatacgagactcgtttgaagaggtgcgtcgtgacctttatcagcgtaaacacattgtaatgacacacgaacagcaggtgattaagcttcagagctcgaagaagaacctcgcgaacgtcgtcttggcgcctcacgagaatcggccggctggcgatgaagtagcgacactacaagtaagatttcccgtattcgcatgccgacaagattctaatggcggccagtcacttcgagcacttttatag

SEQ ID NO: 11745 - protein, 699 aa, Muscodor strobelii
  misc_feature: SGI Peptide ID NO. 563784
  misc_feature (531)..(609): Pfam Id: PF00271 Pfam Desc: Helicase conserved C-terminal domain
  misc_feature (36)..(379): Pfam Id: PF00176 Pfam Desc: SNF2 family N-terminal domain
  misc_feature (36)..(275): Pfam Id: PF00176 Pfam Desc: SNF2 family N-terminal domain
  misc_feature (36)..(678): NCBI GI: 256722511 Blast Desc: NECHADRAFT_77238 [Nectria haematococca mpVI 77-13-4]
  misc_feature (10)..(683): NCBI GI: 46126713 Blast Desc: FG07734.1 [Gibberella zeae PH-1]
  misc_feature (10)..(671): NCBI GI: 212539075 Blast Desc: alpha-1,6-mannosyltransferase subunit, [Penicillium marneffei ATCC 18224] gi|210069435|gb|EEA23526.1| alpha-1,6-mannosyltransferase subunit, [Penicillium marneffei
  misc_feature (4)..(677): NCBI GI: 256730479 Blast Desc: NECHADRAFT_74036 [Nectria haematococca mpVI 77-13-4]
  misc_feature (1)..(519): NCBI GI: 116194320 Blast Desc: CHGG_03758 [Chaetomium globosum CBS 148.51] gi|88179671|gb|EAQ87139.1| CHGG_03758 [Chaetomium globosum CBS 148.51]
  misc_feature (7)..(677): NCBI GI: 85119219 Blast Desc: NCU02913 [Neurospora crassa OR74A] gi|28927406|gb|EAA36359.1| [Neurospora crassa OR74A]
  misc_feature (226)..(677): NCBI GI: 46139439 Blast Desc: FG11234.1 [Gibberella zeae PH-1]
  misc_feature (5)..(637): NCBI GI: 226280728 Blast Desc: conserved [Paracoccidioides brasiliensis Pb01]
  misc_feature (231)..(646): NCBI GI: 189208001 Blast Desc: DNA repair protein rad5 [Pyrenophora tritici-repentis Pt-1C-BFP] gi|187976427|gb|EDU43053.1| DNA repair protein rad5 [Pyrenophora tritici-repentis Pt-1C-BFP]
  misc_feature (5)..(637): NCBI GI: 225684822 Blast Desc: DNA repair protein RAD5 [Paracoccidioides brasiliensis Pb03]
MRTISSTPSFLDALKSRDDIPEAEQPAAIRSMMKVHQKKALAFMLQRERGWMFSKESPDIWETYGAGEETFFVNRVSNVCQKEEPPEFRGGIIADTMGLGKTLTMIALVATDLASPRATFFHTIGQSPTITTVNATLVIIPPPLLSTWEEQLDEHVFKGCLEWCRHHGKSRIGNVNEIYAKNVVLTTYHTVSAEWKAYKDNRRSILFSIRWKRLILDEAHFIRNSTSRMAKACNALEATARWAVSGTPIQNRLSDLASLLKFIQASPYSDTKQFDSDISQLWKSGEDEEASRRLQFLSTCLILRRCKGAIDLPNRTDQFLMVNFTPDEQDQYETLKQQAIMSIDAAFSGQQGSSRPSMYANALQRIESLRLFCDLGLQYHGRHMIQADDDWSRTAQLTFNSKRGLDLLFCMNCSLLLDLTESLLGDSGQVTTLPLFSRCMKFICSDCVRKAACDRRAADCGHKPACAMAPVSISGDVLEETLGVLSAAPVPAPGLSSKVQALISDLKKVSQSTKCVVFSTWRLTLDLVQAGLDKNSICSIRFDGKVPQSERGNVVNQFRSDPQIRVMLLTLSCGAVGLTLTAASRAYLMEPHWNPTLEEQALARIHRIGQTKEVTTIRLFIRDSFEEVRRDLYQRKHIVMTHEQQVIKLQSSKKNLANVVLAPHENRPAGDEVATLQVRFPVFACRQDSNGGQSLRALL

SEQ ID NO: 11746 - DNA, 3810 bp, Muscodor strobelii
  misc_feature: SGI EST ID NO. CUFF.27916.2
  misc_feature: Variant of the nucleotide sequence at SEQ ID NO 11744
cttgggtggcttattcagaaattcttcattcaaaatagtaccccgaagaccaattctatgtaattataggtgctcgtgacagtgccaagattttgcacagtcattcgaccgctacgaaactctgcaaccgtcattagacttcatttgtgaaaggctttgctatccgactatggatcaacatgagcgctccgctaaacgcgcacgaatttgcagtagaactgatgccccagacttgacggtcgggtgttcttcttatgcgcaacctccctgtccaccactacagacggaagcgacgcagcgatctggacagcattacgggctggactcgtttccgatcgcattacaactccagcaaaacaacagtacggccgatgttctttacaatgcattcccacccactcagccgaattctcgcgaatgggccacatatcccgtatttcagacgcagagcttaccaaatgttccacgagattgtgctcgtaccgccatttaccgcacagaggactcctacacataccagtactcacgttatccggtagttgcattaccactttcccaaaacttggatccttgctacacatcgcagacggagagaatgtattgctacgaagatagtctcgtatcagattctcagcgcttggagcgcactgtcatccctacgacggagcccgggacgctgggttattgcgagacagtggtcccgttggtaagtcatacgacaatgaactcgggtgcgatcccgagaattgtacttccggaggtacaggttgagacaatatgctatggcatgatttcggaacttttaggaacgtgcgacgtgggcgacgtagatttatctgcggagatcgatgtggaagttaaaccatctggccagttccgatcggccggtattagatttattaatgggacgctggacgctgatgcaagccggctcatatacggtcttcaacaagaggaaagcctacagatttttgcgacttgcttcgtacatcggcaggcaagtaccaaaaagcagatacggaatcgcatatcacgttgcacagttgagatcaccgtttatggtccccgggacctatttgaagagattggagactggtttcaagagcaggattattatcttcaggacccaaggacgtgccagctagacgtcagatactgcaatccacacaagctttctacgacccagcttgaattctgcgctttactatctgatgtaatatccagaaagacactcccagtcgaaatgcgaacgatctcatcgacgccaagtttcttagacgcgttgaaaagccgtgacgatatccccgaagctgagcaaccggccgcaatccggtccatgatgaaagtacaccagaaaaaggcgctagctttcatgttacaacgggagcgtggatggatgttcagtaaagagagcccagatatatgggagacttacggcgctggcgaagaaaccttcttcgtgaatagagtttctaatgtgtgtcagaaggaggaacctccagagttccgtggcgggatcattgcagatacaatgggactgggcaaaaccctcacgatgattgctttagtagcaacagatctagcctcaccaagagcgacattcttccatacaatcggtcaatcaccgactattacaaccgtcaatgctactctggtcatcattcccccaccacttttgtctacttgggaagaacagctagacgagcatgtttttaagggttgcctggaatggtgtcgacatcatgggaaaagcaggataggcaatgtcaacgagatatatgccaagaatgtggtgctcactacgtaccatacagtttcagcagaatggaaggcatataaggacaaccgtcgatctatcctcttctccattcgttggaagcgactgatcctagacgaagcccatttcatccgtaattcaacttcgcggatggccaaggcttgcaatgccttagaggcaaccgctcgatgggctgtctcaggcactccaatccagaaccgattatccgatcttgcatctctactcaaattcatccaagccagcccatattccgatactaaacagttcgattcggatatatcacaattgtggaagtctggtgaggatgaagaagcttcaaggcgactccaatttttgtctacctgtttgatcctccgtcgttgcaagggagcgattgatttacccaataggacagatcaatttttgatggtaaacttcacaccagacgaacaggatcagtatgagacactcaaacagcaagcaattatgagcatcgatgcagcattctcggggcaacaaggaagttcacggcccagtatgtacgcgaacgcactacaacgaatcgagtcattacgtctgttctgtgatcttggccttcaatatcatggtagacatatgatacaagccgatgacgactggtcgagaaccgcacagctgactttcaattcaaaacgaggactagatcttctgttctgtatgaattgttctctgctcctagatttaacggagtcactcttgggcgactcggggcaggtaaccaccttgccactgttttccagatgtatgaagtttatttgcagcgattgcgtgcgcaaagcagcctgcgatcgtcgcgccgccgactgtggccataaacccgcctgcgccatggcgcctgtttcaataagtggtgatgtgcttgaagagactttaggcgtactttccgctgcacctgtccctgctccagggctatcatccaaagtccaggcactgatatcagaccttaagaaagtatctcagagtactaaatgtgtcgtcttctccacctggagacttacactcgatctagtgcaagcaggccttgataaaaattcaatctgcagtattcgatttgatggaaaagtacctcagagtgagagggggaatgtcgttaatcaatttcgctccgatccgcaaattcgagtcatgttactcaccctgtcatgtggtgctgtgggtcttactctaactgccgcctcacgcgcatatctgatggaaccacactggaatccgactcttgaagagcaggctctcgctcgaatccatcgcatcggccagaccaaagaagtgacgaccattcgacttttcatacgagactcgtttgaagagcaggtgattaagcttcagagctcgaagaagaacctcgcgaacgtcgtcttggcgcctcacgagaatcggccggctggcgatgaagtagcgacactacaatcacttcgagcacttttatagtattttatcacctggaatttattttgagctgcgacgaagccaggtcaacatgcatatcagtttgcgcctcccactagacttatttcaagtgctaataacaaataataatcgctaggcaccttctgcctcgaaacctatgcactctgatatcggctcgcttgagactgagcgggctcccctaagtgataggatctcacgaaggtgagaatggtaatcgtggaaacttacgggggggtgagataactttctaactatcttccgaataaaccggcgaatagcgctggtgcatctatacatctagaccttggattatgttctatagagcgtgccgtattgcctcctgtagtgacctgaaataagcgagccacttcgtcgcataggaattgaactttctcaccgagatttgcaagtgaagcggctggcaaactatcctaaaagaccatcatcagacactgaagttacttgatgacagggccatgatgcccatccagcttagatacttatccactacatgattctaatcttctttccaggtcacggatgaagacgtgactgtatatcgatgc

SEQ ID NO: 11747 - DNA, 2001 bp, Muscodor strobelii
  misc_feature: SGI cDNA ID NO. 563785
  misc_feature: Elevated expression when VOC is produced
  misc_feature: Encodes the peptide sequence at SEQ ID NO 11748
atgcgaacgatctcatcgacgccaagtttcttagacgcgttgaaaagccgtgacgatatccccgaagctgagcaaccggccgcaatccggtccatgatgaaagtacaccagaaaaaggcgctagctttcatgttacaacgggagcgtggatggatgttcagtaaagagagcccagatatatgggagacttacggcgctggcgaagaaaccttcttcgtgaatagagtttctaatgtgtgtcagaaggaggaacctccagagttccgtggcgggatcattgcagatacaatgggactgggcaaaaccctcacgatgattgctttagtagcaacagatctagcctcaccaagagcgacattcttccatacaatcggtcaatcaccgactattacaaccgtcaatgctactctggtcatcattcccccaccacttttgtctacttgggaagaacagctagacgagcatgtttttaagggttgcctggaatggtgtcgacatcatgggaaaagcaggataggcaatgtcaacgagatatatgccaagaatgtggtgctcactacgtaccatacagtttcagcagaatggaaggcatataaggacaaccgtcgatctatcctcttctccattcgttggaagcgactgatcctagacgaagcccatttcatccgtaattcaacttcgcggatggccaaggcttgcaatgccttagaggcaaccgctcgatgggctgtctcaggcactccaatccagaaccgattatccgatcttgcatctctactcaaattcatccaagccagcccatattccgatactaaacagttcgattcggatatatcacaattgtggaagtctggtgaggatgaagaagcttcaaggcgactccaatttttgtctacctgtttgatcctccgtcgttgcaagggagcgattgatttacccaataggacagatcaatttttgatggtaaacttcacaccagacgaacaggatcagtatgagacactcaaacagcaagcaattatgagcatcgatgcagcattctcggggcaacaaggaagttcacggcccagtatgtacgcgaacgcactacaacgaatcgagtcattacgtctgttctgtgatcttggccttcaatatcatggtagacatatgatacaagccgatgacgactggtcgagaaccgcacagctgactttcaattcaaaacgaggactagatcttctgttctgtatgaattgttctctgctcctagatttaacggagtcactcttgggcgactcggggcaggtaaccaccttgccactgttttccagatgtatgaagtttatttgcagcgattgcgtgcgcaaagcagcctgcgatcgtcgcgccgccgactgtggccataaacccgcctgcgccatggcgcctgtttcaataagtggtgatgtgcttgaagagactttaggcgtactttccgctgcacctgtccctgctccagggctatcatccaaagtccaggcactgatatcagaccttaagaaagtatctcagagtactaaatgtgtcgtcttctccacctggagacttacactcgatctagtgcaagcaggccttgataaaaattcaatctgcagtattcgatttgatggaaaagtacctcagagtgagagggggaatgtcgttaatcaatttcgctccgatccgcaaattcgagtcatgttactcaccctgtcatgtggtgctgtgggtcttactctaactgccgcctcacgcgcatatctgatggaaccacactggaatccgactcttgaagagcaggctctcgctcgaatccatcgcatcggccagaccaaagaagtgacgaccattcgacttttcatacgagactcgtttgaagagcaggtgattaagcttcagagctcgaagaagaacctcgcgaacgtcgtcttggcgcctcacgagaatcggccggctggcgatgaagtagcgacactacaatcacttcgagcacttttatag

SEQ ID NO: 11748 - protein, 666 aa, Muscodor strobelii
  misc_feature: SGI Peptide ID NO. 563785
  misc_feature (531)..(609): Pfam Id: PF00271 Pfam Desc: Helicase conserved C-terminal domain
  misc_feature (36)..(379): Pfam Id: PF00176 Pfam Desc: SNF2 family N-terminal domain
  misc_feature (36)..(275): Pfam Id: PF00176 Pfam Desc: SNF2 family N-terminal domain
  misc_feature (36)..(666): NCBI GI: 256722511 Blast Desc: NECHADRAFT_77238 [Nectria haematococca mpVI 77-13-4]
  misc_feature (10)..(666): NCBI GI: 46126713 Blast Desc: FG07734.1 [Gibberella zeae PH-1]
  misc_feature (10)..(654): NCBI GI: 212539075 Blast Desc: alpha-1,6-mannosyltransferase subunit, [Penicillium marneffei ATCC 18224] gi|210069435|gb|EEA23526.1| alpha-1,6-mannosyltransferase subunit, [Penicillium marneffei
  misc_feature (4)..(666): NCBI GI: 256730479 Blast Desc: NECHADRAFT_74036 [Nectria haematococca mpVI 77-13-4]
  misc_feature (1)..(519): NCBI GI: 116194320 Blast Desc: CHGG_03758 [Chaetomium globosum CBS 148.51] gi|88179671|gb|EAQ87139.1| CHGG_03758 [Chaetomium globosum CBS 148.51]
  misc_feature (7)..(660): NCBI GI: 85119219 Blast Desc: NCU02913 [Neurospora crassa OR74A] gi|28927406|gb|EAA36359.1| [Neurospora crassa OR74A]
  misc_feature (226)..(666): NCBI GI: 46139439 Blast Desc: FG11234.1 [Gibberella zeae PH-1]
  misc_feature (231)..(666): NCBI GI: 189208001 Blast Desc: DNA repair protein rad5 [Pyrenophora tritici-repentis Pt-1C-BFP] gi|187976427|gb|EDU43053.1| DNA repair protein rad5 [Pyrenophora tritici-repentis Pt-1C-BFP]
  misc_feature (5)..(644): NCBI GI: 226280728 Blast Desc: conserved [Paracoccidioides brasiliensis Pb01]
  misc_feature (5)..(644): NCBI GI: 226286603 Blast Desc: DNA repair protein RAD16 [Paracoccidioides brasiliensis Pb18]
  misc_feature: Useful for introducing or modulating the production of volatile compounds
MRTISSTPSFLDALKSRDDIPEAEQPAAIRSMMKVHQKKALAFMLQRERGWMFSKESPDIWETYGAGEETFFVNRVSNVCQKEEPPEFRGGIIADTMGLGKTLTMIALVATDLASPRATFFHTIGQSPTITTVNATLVIIPPPLLSTWEEQLDEHVFKGCLEWCRHHGKSRIGNVNEIYAKNVVLTTYHTVSAEWKAYKDNRRSILFSIRWKRLILDEAHFIRNSTSRMAKACNALEATARWAVSGTPIQNRLSDLASLLKFIQASPYSDTKQFDSDISQLWKSGEDEEASRRLQFLSTCLILRRCKGAIDLPNRTDQFLMVNFTPDEQDQYETLKQQAIMSIDAAFSGQQGSSRPSMYANALQRIESLRLFCDLGLQYHGRHMIQADDDWSRTAQLTFNSKRGLDLLFCMNCSLLLDLTESLLGDSGQVTTLPLFSRCMKFICSDCVRKAACDRRAADCGHKPACAMAPVSISGDVLEETLGVLSAAPVPAPGLSSKVQALISDLKKVSQSTKCVVFSTWRLTLDLVQAGLDKNSICSIRFDGKVPQSERGNVVNQFRSDPQIRVMLLTLSCGAVGLTLTAASRAYLMEPHWNPTLEEQALARIHRIGQTKEVTTIRLFIRDSFEEQVIKLQSSKKNLANVVLAPHENRPAGDEVATLQSLRALL

SEQ ID NO: 11749 - DNA, 3810 bp, Muscodor strobelii; identical to SEQ ID NO: 11746
  misc_feature: SGI EST ID NO. CUFF.27916.2
  misc_feature: Variant of the nucleotide sequence at SEQ ID NO 11747

SEQ ID NO: 11750 - DNA, 2121 bp, Muscodor strobelii
  misc_feature: SGI cDNA ID NO. 563786
  misc_feature: Elevated expression when VOC is produced
  misc_feature: Encodes the peptide sequence at SEQ ID NO 11751
atgcgaacgatctcatcgacgccaagtttcttagacgcgttgaaaagccgtgacgatatccccgaagctgagcaaccggccgcaatccggtccatgatgaaagtacaccagaaaaaggcgctagctttcatgttacaacgggagcgtggatggatgttcagtaaagagagcccagatatatgggagacttacggcgctggcgaagaaaccttcttcgtgaatagagtttctaatgtgtgtcagaaggaggaacctccagagttccgtggcgggatcattgcagatacaatgggactgggcaaaaccctcacgatgattgctttagtagcaacagatctagcctcaccaagagcgacattcttccatacaatcggtcaatcaccgactattacaaccgtcaatgctactctggtcatcattcccccaccacttttgtctacttgggaagaacagctagacgagcatgtttttaagggttgcctggaatggtgtcgacatcatgggaaaagcaggataggcaatgtcaacgagatatatgccaagaatgtggtgctcactacgtaccatacagtttcagcagaatggaaggcatataaggacaaccgtcgatctatcctcttctccattcgttggaagcgactgatcctagacgaagcccatttcatccgtaattcaacttcgcggatggccaaggcttgcaatgccttagaggcaaccgctcgatgggctgtctcaggcactccaatccagaaccgattatccgatcttgcatctctactcaaattcatccaagccagcccatattccgatactaaacagttcgattcggatatatcacaattgtggaagtctggtgaggatgaagaagcttcaaggcgactccaatttttgtctacctgtttgatcctccgtcgttgcaagggagcgattgatttacccaataggacagatcaatttttgatggtaaacttcacaccagacgaacaggatcagtatgagacactcaaacagcaagcaattatgagcatcgatgcagcattctcggggcaacaaggaagttcacggcccagtatgtacgcgaacgcactacaacgaatcgagtcattacgtctgttctgtgatcttggccttcaatatcatggtagacatatgatacaagccgatgacgactggtcgagaaccgcacagctgactttcaattcaaaacgaggactagatcttctgttctgtatgaattgttctctgctcctagatttaacggagtcactcttgggcgactcggggcaggtaaccaccttgccactgttttccagatgtatgaagtttatttgcagcgattgcgtgcgcaaagcagcctgcgatcgtcgcgccgccgactgtggccataaacccgcctgcgccatggcgcctgtttcaataagtggtgatgtgcttgaagagactttaggcgtactttccgctgcacctgtccctgctccagggctatcatccaaagtccaggcactgatatcagaccttaagaaagtatctcagagtactaaatgtgtcgtcttctccacctggagacttacactcgatctagtgcaagcaggccttgataaaaattcaatctgcagtattcgatttgatggaaaagtacctcagagtgagagggggaatgtcgttaatcaatttcgctccgatccgcaaattcgagtcatgttactcaccctgtcatgtggtgctgtgggtcttactctaactgccgcctcacgcgcatatctgatggaaccacactggaatccgactcttgaagagcaggctctcgctcgaatccatcgcatcggccagaccaaagaagtgacgaccattcgacttttcatacgagactcgtttgaagaggtgcgtcgtgacctttatcagcgtaaacacattgtaatgacacacgaacagcaggtgattaagcttcagagctcgaagaagaacctcgcgaacgtcgtcttggcgcctcacgagaatcggccggctggcgatgaagtagcgacactacaagcaccttctgcctcgaaacctatgcactctgatatcggctcgcttgagactgagcgggctcccctaagtgataggatctcacgaaggtga

SEQ ID NO: 11751 - protein, 706 aa, Muscodor strobelii
  misc_feature: SGI Peptide ID NO. 563786
  misc_feature (531)..(609): Pfam Id: PF00271 Pfam Desc: Helicase conserved C-terminal domain
  misc_feature (36)..(379): Pfam Id: PF00176 Pfam Desc: SNF2 family N-terminal domain
  misc_feature (36)..(275): Pfam Id: PF00176 Pfam Desc: SNF2 family N-terminal domain
  misc_feature (36)..(677): NCBI GI: 256722511 Blast Desc: NECHADRAFT_77238 [Nectria haematococca mpVI 77-13-4]
  misc_feature (10)..(678): NCBI GI: 46126713 Blast Desc: FG07734.1 [Gibberella zeae PH-1]
  misc_feature (10)..(671): NCBI GI: 212539075 Blast Desc: alpha-1,6-mannosyltransferase subunit, [Penicillium marneffei ATCC 18224] gi|210069435|gb|EEA23526.1| alpha-1,6-mannosyltransferase subunit, [Penicillium marneffei
  misc_feature (4)..(678): NCBI GI: 256730479 Blast Desc: NECHADRAFT_74036 [Nectria haematococca mpVI 77-13-4]
  misc_feature (1)..(519): NCBI GI: 116194320 Blast Desc: CHGG_03758 [Chaetomium globosum CBS 148.51] gi|88179671|gb|EAQ87139.1| CHGG_03758 [Chaetomium globosum CBS 148.51]
  misc_feature (7)..(677): NCBI GI: 85119219 Blast Desc: NCU02913 [Neurospora crassa OR74A] gi|28927406|gb|EAA36359.1| [Neurospora crassa OR74A]
  misc_feature (226)..(677): NCBI GI: 46139439 Blast Desc: FG11234.1 [Gibberella zeae PH-1]
  misc_feature (5)..(637): NCBI GI: 226280728 Blast Desc: conserved [Paracoccidioides brasiliensis Pb01]
  misc_feature (231)..(646): NCBI GI: 189208001 Blast Desc: DNA repair protein rad5 [Pyrenophora tritici-repentis Pt-1C-BFP] gi|187976427|gb|EDU43053.1| DNA repair protein rad5 [Pyrenophora tritici-repentis Pt-1C-BFP]
  misc_feature (5)..(637): NCBI GI: 226286603 Blast Desc: DNA repair protein RAD16 [Paracoccidioides brasiliensis Pb18]
  misc_feature: Useful for introducing or modulating the production of volatile compounds
MRTISSTPSFLDALKSRDDIPEAEQPAAIRSMMKVHQKKALAFMLQRERGWMFSKESPDIWETYGAGEETFFVNRVSNVCQKEEPPEFRGGIIADTMGLGKTLTMIALVATDLASPRATFFHTIGQSPTITTVNATLVIIPPPLLSTWEEQLDEHVFKGCLEWCRHHGKSRIGNVNEIYAKNVVLTTYHTVSAEWKAYKDNRRSILFSIRWKRLILDEAHFIRNSTSRMAKACNALEATARWAVSGTPIQNRLSDLASLLKFIQASPYSDTKQFDSDISQLWKSGEDEEASRRLQFLSTCLILRRCKGAIDLPNRTDQFLMVNFTPDEQDQYETLKQQAIMSIDAAFSGQQGSSRPSMYANALQRIESLRLFCDLGLQYHGRHMIQADDDWSRTAQLTFNSKRGLDLLFCMNCSLLLDLTESLLGDSGQVTTLPLFSRCMKFICSDCVRKAACDRRAADCGHKPACAMAPVSISGDVLEETLGVLSAAPVPAPGLSSKVQALISDLKKVSQSTKCVVFSTWRLTLDLVQAGLDKNSICSIRFDGKVPQSERGNVVNQFRSDPQIRVMLLTLSCGAVGLTLTAASRAYLMEPHWNPTLEEQALARIHRIGQTKEVTTIRLFIRDSFEEVRRDLYQRKHIVMTHEQQVIKLQSSKKNLANVVLAPHENRPAGDEVATLQAPSASKPMHSDIGSLETERAPLSDRISRR

SEQ ID NO: 11752 - DNA, 3810 bp, Muscodor strobelii; identical to SEQ ID NO: 11746
  misc_feature: SGI EST ID NO. CUFF.27916.2
  misc_feature: Variant of the nucleotide sequence at SEQ ID NO 11750

SEQ ID NO: 11753 - DNA, 3171 bp, Muscodor strobelii
  misc_feature: SGI cDNA ID NO. 563787
  misc_feature: Elevated expression when VOC is produced
  misc_feature: Encodes the peptide sequence at SEQ ID NO 11754
atgcctctcgcgcaacttggttcctctgcagctcaacaaacaatcaaagttgcttatgatagtctgcgcaagatagtcaaaccgagcgattcgcgaaattttgcggagataacacttcaggatgcaagaaacgaagcaattcggatcgaagagggccttgctgcaagaagagcactacggaacatgaaaaggctagatccccttctcaggggactagaacattactccaaagccatcgatatcttatgtaacgggaccccataccttgcttggatgctaacggcacattgctcaatcgttagttgggctcctataaccttgatactcaaaattgcctcggactacgtagaagcattcgaaaagattatcaatgcctactctaggatagcagattgtctccagcgatttgagttcctagacagagcattcggtcgtgacagagatttccaacaaacgctagctgttttttatgcagacatattagactttcatcaacatgcatacaaattcttgacaagaaatggctggaagttactttttatcacctcatggggccgtttccagagacgattcgatggcaagctcgaaaacatgaagcggcacgagaagttgattgacaaggacgcatatgctcgtaacatcgccgaagaacatgcgatgcgtcaagagatccgggcatggcatcaagacaatttagagagaattgcaagagaagacgacgaggaaggggaaaaacagtatcaatcaatcacatcctggttgaaagtcaacgattccgagcaggaggaaattcacggagccttgagttccgaagcacaggctcatccgggtacctgcgactgggctttgaaaattaaaaggatgcagcagttcctccaggcaagaccatctacgcaaattctttggctgcacgggattcccgggtccggaaagagtgtcttggctgcccagctcgttaattttgcgcaaaccgcaggctatgatacaatcaagttcttctgcagtcggctgtatcgttcgaatctctatgagaacattctcaagtccctatttatacagctaattcggagggacaaagaactgatagctaatatctatagacaatccgtcatcggaaatccacccccatctgggcctgctctggaaaccctgtttcataagatgctattaaattgtcgcaactccgatcacggcgatagctatctattcattttcattgatgggctgacggagtgtgatgcaatgaaccaagctaaagtggtgagcttaattaagctgatgacatccaatagcactcgctcgaatggacttatatgcaagatcttcctttcagggcgagcctcagaggtcgtgtctcggcaactgcgcaaacatgaaacgctttctctgacagatgagaaacacacattgtctaaggctatcatgacttatacatcgcaaagacttgagacgttgcacgacagactcaagcagctgcacttgactacggttgagataaaaagcatcgaggaatccatcacaacaaagtctgacggcatgtttttatacgctcgactgattctcgactatcttgcccacaacatcttcatacacggagacgaagttattcgggccgtcaacgatctccccgaaaaactatccgatttctatgctcagacactgtcgcaaattgttgcccatcttaatccacaatcagttgagcatgtgaagaccatgtttgggataattgcgtttgcgaaaaggccactaaagcgaattgaatttctctctgcgatggctttcagtggaggcaaccatgctgttgggagtgtcgctccaaagttcatcattgaagtctgtaacactctcgtcgaagagaagaatgacgggactctatcattcatacacgcttctgtccaagagttcgtcgtatctataacacaaataggcataaatctaaccaagaccgtttgcagattcatggagtcaccagcttgtagtcttggcattgacgaacggcgggccactgaggagattgcaattgcgagcgtcacttgtttgctttcaggcctacaagcctttaccaagccgcatgatgacccgtctagaaatcttcaggtagcaagaggcttacacgcatttcatatctatgctaccgatcactggggtgatgctctactacgacatactgaaataacaggtccgggcaccggggcaaagaaagcagtggatctggcagatcatttctgtcgttgtctcgaaagatacatgagcgttacccataacatcacgaacgaaggcgaagcctcgggcgacttacgattgcaccttctagatggtcacccgacaataaggcggcaagttgacattgccattgcggcccggtctttggagcgtttggagatgcacactagacagctagcctctgtctcagctgttagcgaaaataaatctagatcacgaacagcattggaagacatcttgacttcataccaagacacaatcgcctttctactaagccaggaggaatatccaggattatcacaacaagaacttgaggaatttaagcgcgaattcaaatcgtcggtgtatacttgtagatacaatggttgctcccgtgctatgcagggatttggatcaagtggggaatgtcatgaacatgaggtcacacaccttcgtcgttgggcttgttcggtggctggatgtcaatatccacccttcgtttcgtccaaagccttgaacgatcacaggagaaaacaccacgatcctatcacggtgcaacgacccattcggaggatcaagacggcggataagccggactatgagatgctcccatcgacatatactcaggccgcaaaattacgtgaaggtccagcgaacagaatatggccctttggatatcctgactatcttatcgaacccttcggacaagccacagaacagcaacaaggcgtggaatgggccgcacctaaaccgttcttccgggacgattcgagcgaagtaagggcgcaggctccatcgcctcccagtagagtgaccggttctcgcgctcggaatgttacagacataaaccgcagagttgaggccagagccaacagggaatctttggtcgaacaaaaatgggcgaatgcatctaccaatgcctggctcaagcaccacggactcgtcggcgacgtggccgatgggttttga

SEQ ID NO: 11754 - protein, 1056 aa, Muscodor strobelii
  misc_feature: SGI Peptide ID NO. 563787
  misc_feature (8)..(925): NCBI GI: 46126715 Blast Desc: FG07735.1 [Gibberella zeae PH-1]
  misc_feature (1)..(936): NCBI GI: 212539077 Blast Desc: NACHT domain protein [Penicillium marneffei ATCC 18224] gi|210069436|gb|EEA23527.1| NACHT domain protein [Penicillium marneffei ATCC 18224]
  misc_feature (1)..(893): NCBI GI: 85119215 Blast Desc: NCU02912 [Neurospora crassa OR74A] gi|28927405|gb|EAA36358.1| [Neurospora crassa OR74A]
  misc_feature (2)..(890): NCBI GI: 256730685 Blast Desc: NECHADRAFT_30503 [Nectria haematococca mpVI 77-13-4]
  misc_feature (1)..(409): NCBI GI: 256722459 Blast Desc: NECHADRAFT_20921 [Nectria haematococca mpVI 77-13-4]
  misc_feature (1)..(377): NCBI GI: 46139441 Blast Desc: FG11235.1 [Gibberella zeae PH-1]
  misc_feature (1)..(338): NCBI GI: 116194322 Blast Desc: CHGG_03759 [Chaetomium globosum CBS 148.51] gi|88179672|gb|EAQ87140.1| CHGG_03759 [Chaetomium globosum CBS 148.51]
  misc_feature (513)..(942): NCBI GI: 46139441 Blast Desc: FG11235.1 [Gibberella zeae PH-1]
  misc_feature (513)..(925): NCBI GI: 256722459 Blast Desc: NECHADRAFT_20921 [Nectria haematococca mpVI 77-13-4]
  misc_feature (11)..(254): NCBI GI: 189208003 Blast Desc: conserved [Pyrenophora tritici-repentis Pt-1C-BFP] gi|187976428|gb|EDU43054.1| conserved [Pyrenophora tritici-repentis Pt-1C-BFP]
  misc_feature: Useful for introducing or modulating the production of volatile compounds
MPLAQLGSSAAQQTIKVAYDSLRKIVKPSDSRNFAEITLQDARNEAIRIEEGLAARRALRNMKRLDPLLRGLEHYSKAIDILCNGTPYLAWMLTAHCSIVSWAPITLILKIASDYVEAFEKIINAYSRIADCLQRFEFLDRAFGRDRDFQQTLAVFYADILDFHQHAYKFLTRNGWKLLFITSWGRFQRRFDGKLENMKRHEKLIDKDAYARNIAEEHAMRQEIRAWHQDNLERIAREDDEEGEKQYQSITSWLKVNDSEQEEIHGALSSEAQAHPGTCDWALKIKRMQQFLQARPSTQILWLHGIPGSGKSVLAAQLVNFAQTAGYDTIKFFCSRLYRSNLYENILKSLFIQLIRRDKELIANIYRQSVIGNPPPSGPALETLFHKMLLNCRNSDHGDSYLFIFIDGLTECDAMNQAKVVSLIKLMTSNSTRSNGLICKIFLSGRASEVVSRQLRKHETLSLTDEKHTLSKAIMTYTSQRLETLHDRLKQLHLTTVEIKSIEESITTKSDGMFLYARLILDYLAHNIFIHGDEVIRAVNDLPEKLSDFYAQTLSQIVAHLNPQSVEHVKTMFGIIAFAKRPLKRIEFLSAMAFSGGNHAVGSVAPKFIIEVCNTLVEEKNDGTLSFIHASVQEFVVSITQIGINLTKTVCRFMESPACSLGIDERRATEEIAIASVTCLLSGLQAFTKPHDDPSRNLQVARGLHAFHIYATDHWGDALLRHTEITGPGTGAKKAVDLADHFCRCLERYMSVTHNITNEGEASGDLRLHLLDGHPTIRRQVDIAIAARSLERLEMHTRQLASVSAVSENKSRSRTALEDILTSYQDTIAFLLSQEEYPGLSQQELEEFKREFKSSVYTCRYNGCSRAMQGFGSSGECHEHEVTHLRRWACSVAGCQYPPFVSSKALNDHRRKHHDPITVQRPIRRIKTADKPDYEMLPSTYTQAAKLREGPANRIWPFGYPDYLIEPFGQATEQQQGVEWAAPKPFFRDDSSEVRAQAPSPPSRVTGSRARNVTDINRRVEARANRESLVEQKWANASTNAWLKHHGLVGDVADGF

SEQ ID NO: 11755 - DNA, 3905 bp, Muscodor strobelii
  misc_feature: SGI EST ID NO. CUFF.27909.0
  misc_feature: Variant of the nucleotide sequence at SEQ ID NO 11753
ctttgatgcatcgcctgcatgattaggcggaattggaaaccggtgaacagtattacgtgcgggaatagcctttcccaaacttttacgacccttcgcgcctctgtaaactttctttgccatgaatttcgagacatccttcgcgccaaattgccagcatgcctctcgcgcaacttggttcctctgcagctcaacaaacaatcaaagttgcttatgatagtctgcgcaagatagtcaaaccgagcgattcgcgaaattttgcggagataacacttcaggatgcaagaaacgaagcaattcggatcgaagagggccttgctgcaagaagagcactacggaacatgaaaaggctagatccccttctcaggggactagaacattactccaaagccatcgatatcttatgtaacgggaccccataccttgcttggatgtgagttagcaactaaccggtcaaatggaatccaaaattcacggattaaacgctcttcttattttctgtaccgcatctcgtatctcacgagcgtagctaacggcacattgctcaatcgttagttgggctcctataaccttgatactcaaaattgcctcggactacgtagaagcattcgaaaagattatcaatgcctactctaggatagcagattgtctccagcgatttgagttcctagacagagcattcggtcgtgacagagatttccaacaaacgctagctgttttttatgcagacatattagactttcatcaacatgcatacaaattcttgacaagaaatggctggaagttactttttatcacctcatggggccgtttccagagacgattcgatggcaagctcgaaaacatgaagcggcacgagaagttgattgacaaggacgcatatgctcgtaacatcgccgaagaacatgcgatgcgtcaagagatccgggcatggcatcaagacaatttagagagaattgcaagagaagacgacgaggaaggggaaaaacagtatcaatcaatcacatcctggttgaaagtcaacgattccgagcaggaggaaattcacggagccttgagttccgaagcacaggctcatccgggtacctgcgactgggctttgaaaattaaaaggatgcagcagttcctccaggcaagaccatctacgcaaattctttggctgcacgggattcccgggtccggaaagagtgtcttggctgcccagctcgttaattttgcgcaaaccgcaggctatgatacaatcaagttcttctgcagtcggctgtatcgttcgaatctctatgagaacattctcaagtccctatttatacagctaattcggagggacaaagaactgatagctaatatctatagacaatccgtcatcggaaatccacccccatctgggcctgctctggaaaccctgtttcataagatgctattaaattgtcgcaactccgatcacggcgatagctatctattcattttcattgatgggctgacggagtgtgatgcaatgaaccaagctaaagtggtgagcttaattaagctgatgacatccaatagcactcgctcgaatggacttatatgcaagatcttcctttcagggcgagcctcagaggtcgtgtctcggcaactgcgcaaacatgaaacgctttctctgacagatgagaaacacacattgtctaaggctatcatgacttatacatcgcaaagacttgagacgttgcacgacagactcaagcagctgcacttgactacggttgagataaaaagcatcgaggaatccatcacaacaaagtctgacggcatgtttttatacgctcgactgattctcgactatcttgcccacaacatcttcatacacggagacgaagttattcgggccgtcaacgatctccccgaaaaactatccgatttctatgctcagacactgtcgcaaattgttgcccatcttaatccacaatcagttgagcatgtgaagaccatgtttgggataattgcgtttgcgaaaaggccactaaagcgaattgaatttctctctgcgatggctttcagtggaggcaaccatgctgttgggagtgtcgctccaaagttcatcattgaagtctgtaacactctcgtcgaagagaagaatgacgggactctatcattcatacacgcttctgtccaagaattcatggagtcaccagcttgtagtcttggcattgacgaacggcgggccactgaggagattgcaattgcgagcgtcacttgtttgctttcaggcctacaagcctttaccaagccgcatgatgacccgtctagaaatcttcaggtagcaagaggcttacacgcatttcatatctatgctaccgatcactggggtgatgctctactacgacatactgaaataacaggtccgggcaccggggcaaagaaagcagtggatctggcagatcatttctgtcgttgtctcgaaagatacatgagcgttacccataacatcacgaacgaaggcgaagcctcgggcgacttacgattgcaccttctagatggtcacccgacaataaggcggcaagttgacattgccattgcggcccggtctttggagcgtttggagatgcacactagacagctagcctctgtctcagctgttagcgaaaataaatctagatcacgaacagcattggaagacatcttgacttcataccaagacacaatcgcctttctactaagccaggaggaatatccaggattatcacaacaagaacttgaggaatttaagcgcgaattcaaatcgtcggtgtatacttgtagatacaatggttgctcccgtgctatgcagggatttggatcaagtggggaatgtcatgaacatgaggtcacacaccttcgtcgttgggcttgttcggtggctggatgtcaatatccacccttcgtttcgtccaaagccttgaacgatcacaggagaaaacaccacgatcctatcacggtgcaacgacccattcggaggatcaagacggcggataagccggactatgagatgctcccatcgacatatactcaggccgcaaaattacgtgaaggtccagcgaacagaatatggccctttggatatcctgactatcttatcgaacccttcggacaagccacagaacagcaacaaggcgtggaatgggccgcacctaaaccgttcttccgggacgattcgagcgaagtaagggcgcaggctccatcgcctcccagtagagtgaccggttctcgcgctcggaatgttacagacataaaccgcaggtccgtgcaggaacccaaaaataacataaataacctagagagcacatcttttccagcacaacatcatgcaaacaatccttcaaggcagtcgttcgtaaccgccggttcattccagagttcgcacaaagcctacgccagtatcccgatggagagggagaggacagagaatcatgatcccatatcaactacaacgacttcaccggcaaccacggtagagttgaggccagagccaacagggaatctttggtcgaacaaaaatgggcgaatgcatctaccaatgcctggctcaagcaccacggactcgtcggcgacgtggccgatgggttttgatgcacatcaccccgttacaagcgagacaggcgaaaagccacaggagcatactaagatccctaatctcgagcctctgtcgaattacgagggccctatgcatgtgtatggaaaggtatttaataacgatgatggaacgatgtacgacagtgattatagttgggcacgcgccggaacgcgctgaacagtagacggcgatcgataggacaatgaagaatcaacgagtacaatccaagctttagagcctgccggacacaattgtcacggaacgaggtcgacgatacagggattaggtggcgcataggccacgatacgatgtatatagc

SEQ ID NO: 11756 - DNA, 1809 bp, Muscodor strobelii
  misc_feature: SGI cDNA ID NO. 563788
  misc_feature: Encodes the peptide sequence at SEQ ID NO 11757
atggctgtctcatctcctgagacgacggtcgattctacgcctgatttcgtcgataattctagcctcgcatacttcataccacgcgccactgattatcagctttctaacatcttcacccatgatgtcccattctctaatcacacattggactccgtagaaaagcgtgaattcttgttctttgatgaatctgtcgacgtcgtgcttgtcctcaccacaccctataccaagcacgatgacgatactctccaggccacattgaagagcctgaatatcacacttgatgcgcaaattgtcaacggcaacgaagccgaccatgacagctctacggcctgcgaaaccatctattcagctgccatagatggctctgaggtttctcctctgttggtgcatcgttcagagcccagctcgtctggtggaagtccagagaccgatgagcttacttatgtagtatggaagctctctgtctttttgagtcggccccgaatgcgcctgcagagccctcgtgtcatcttcagcgcgaatgctggcttaaaggctgcccatggtcctattgccagtcgtgctgatggcgaatacatgtcaagtggcgtcgcctccagtttcaacctactcgatgcttttggaaacgatcttgccctaggcggagctaaaccacgactgtccgctgtccgtgtctcgcgtgtagctcccatcactcaacaggccagccagcgtgcccgacctatcaagaccttgtccggaccgtctctgcgtgtgcatcctgcggttcactcccgcgtgcgatttacacaccccaataccgcgcctccaaccgcggctgtcattgctatgcttgaaattgatttcactccttttttcgactgtgaaatcgttatcaatgaaatttcactcggaatctcagaggccaaagttgaaaacctcacgagtggaagcggcctggctctgcctttatcatgtgtggcacatgaccatgttacattcatgtatcgcatatccccgatggaaacagacattctgtcgagaaatggcttacgagacctcgacatcaagatcttagcgactgccttgataagcgagcaaaccacgccccgcctccagatggcttggacagcaaatgttgactttactatccccgtcaatccaggatacggctctactatgcaaccgattcaacgtgcccaccgcccgagtcagctgtccatcgggggcgaaagtactacctccttgaccgctccttctgtggcacgacctgatgctttgccgtctctggaagcatctgccgttccaaccgagacagccatgccagagttaggtatcactgtaacattcacacctcctccgtcttctcaaaagatttccgtgggcgatgaattttcctggagtgttttcgtcaataatcagtcttcaaacatgtcaagtgcacccaggaagctcgctctagtcgtccttccaaagcgcagacggaatgaattgcgggtaaccagaccaccttcaatatctcgaatgtccgaaattatacacaagcattccaaattttcgtctgaccagaatgtgggggacgccattctcgacgataatgtagttcacgcgatgcagcgtagtagcatcgttgataatgctgagcttgtgtgcctgagtgcagatgttagaatcgggccactcgcaccgggggcatgtcattcaaccgagctcaaatttgttgcgctgaaagagggcttagcaagcgtagatgccatccgaattatcgacttggggagcaacgaacatgtggatatccgacagttaccaaatgtcacggtgcatcggtag

SEQ ID NO: 11757 - protein, 602 aa, Muscodor strobelii
  misc_feature: SGI Peptide ID NO. 563788
  misc_feature (15)..(601): NCBI GI: 261355901 Blast Desc: conserved [Verticillium albo-atrum VaMs.102]
  misc_feature (11)..(601): NCBI GI: 256733076 Blast Desc: NECHADRAFT_100052 [Nectria haematococca mpVI 77-13-4]
  misc_feature (11)..(601): NCBI GI: 46125443 Blast Desc: FG07099.1 [Gibberella zeae PH-1]
  misc_feature (1)..(600): NCBI GI: 154315184 Blast Desc: BC1G_04631 [Botryotinia fuckeliana B05.10] gi|150847594|gb|EDN22787.1| BC1G_04631 [Botryotinia fuckeliana B05.10]
  misc_feature (8)..(601): NCBI GI: 39945238 Blast Desc: MGG_04601 [Magnaporthe grisea 70-15] gi|145021458|gb|EDK05587.1| MGG_04601 [Magnaporthe grisea 70-15]
  misc_feature (11)..(602): NCBI GI: 171687877 Blast Desc: protein product [Podospora anserina] gi|170943900|emb|CAP69552.1| protein product [Podospora anserina]
  misc_feature (95)..(600): NCBI GI: 156052895 Blast Desc: SS1G_06615 [Sclerotinia sclerotiorum 1980] gi|154704393|gb|EDO04132.1| SS1G_06615 [Sclerotinia sclerotiorum 1980]
  misc_feature (16)..(487): NCBI GI: 116180358 Blast Desc: CHGG_00807 [Chaetomium globosum CBS 148.51] gi|88185104|gb|EAQ92572.1| CHGG_00807 [Chaetomium globosum CBS 148.51]
  misc_feature (61)..(469): NCBI GI: 164427327 Blast Desc: NCU03063 [Neurospora crassa OR74A] gi|157071696|gb|EAA34635.2| conserved [Neurospora crassa OR74A]
  misc_feature (15)..(598): NCBI GI: 226285325 Blast Desc: conserved [Paracoccidioides brasiliensis Pb01]
MAVSSPETTVDSTPDFVDNSSLAYFIPRATDYQLSNIFTHDVPFSNHTLDSVEKREFLFFDESVDVVLVLTTPYTKHDDDTLQATLKSLNITLDAQIVNGNEADHDSSTACETIYSAAIDGSEVSPLLVHRSEPSSSGGSPETDELTYVVWKLSVFLSRPRMRLQSPRVIFSANAGLKAAHGPIASRADGEYMSSGVASSFNLLDAFGNDLALGGAKPRLSAVRVSRVAPITQQASQRARPIKTLSGPSLRVHPAVHSRVRFTHPNTAPPTAAVIAMLEIDFTPFFDCEIVINEISLGISEAKVENLTSGSGLALPLSCVAHDHVTFMYRISPMETDILSRNGLRDLDIKILATALISEQTTPRLQMAWTANVDFTIPVNPGYGSTMQPIQRAHRPSQLSIGGESTTSLTAPSVARPDALPSLEASAVPTETAMPELGITVTFTPPPSSQKISVGDEFSWSVFVNNQSSNMSSAPRKLALVVLPKRRRNELRVTRPPSISRMSEIIHKHSKFSSDQNVGDAILDDNVVHAMQRSSIVDNAELVCLSADVRIGPLAPGACHSTELKFVALKEGLASVDAIRIIDLGSNEHVDIRQLPNVTVHR

SEQ ID NO: 11758 - DNA, 3928 bp, Muscodor strobelii
  misc_feature: SGI EST ID NO. CUFF.27882.0
  misc_feature: Variant of the nucleotide sequence at SEQ ID NO 11756
cacatcgcagcaattgaaaacatcggctccgcactattgatggatttgtgctttgcaccttgtgtagttctgatgagtgccttgtaattggcctcgtcgattacaatggctgtctcatctcctgagacgacggtcgattctacgcctgatttcgtcgataattctagcctcgcatacttcataccacgcgccactgattatcagctttctaacatcttcacccatgatgtcccattctctaatcacacattggactccgtagaaaagcgtgaattcttgttctttgatgaatctgtcgacgtcgtgcttgtcctcaccacaccctataccaagcacgatgacgatactctccaggccacattgaagagcctgaatatcacacttgatgcgcaaattgtcaacggcaacgaagccgaccatgacagctctacggcctgcgaaaccatctattcagctgccatagatggctctgaggtttctcctctgttggtgcatcgttcagagcccagctcgtctggtggaagtccagagaccgatgagcttacttatgtagtatggaagctctctgtctttttgagtcggccccgaatgcgcctgcagagccctcgtgtcatcttcagcgcgaatgctggcttaaaggctgcccatggtcctattgccagtcgtgctgatggcgaatacatgtcaagtggcgtcgcctccagtttcaacctactcgatgcttttggaaacgatcttgccctaggcggagctaaaccacgactgtccgctgtccgtgtctcgcgtgtagctcccatcactcaacaggccagccagcgtgcccgacctatcaagaccttgtccggaccgtctctgcgtgtgcatcctgcggttcactcccgcgtgcgatttacacaccccaataccgcgcctccaaccgcggctgtcattgctatgcttgaaattgatttcactccttttttcgactgtgaaatcgttatcaatgaaatttcactcggaatctcagaggccaaagttgaaaacctcacgagtggaagcggcctggctctgcctttatcatgtgtggcacatgaccatgttacattcatgtatcgcatatccccgatggaaacagacattctgtcgagaaatggcttacgagacctcgacatcaagatcttagcgactgccttgataagcgagcaaaccacgccccgcctccagatggcttggacagcaaatgttgactttactatccccgtcaatccaggatacggctctactatgcaaccgattcaacgtgcccaccgcccgagtcagctgtccatcgggggcgaaagtactacctccttgaccgctccttctgtggcacgacctgatgctttgccgtctctggaagcatctgccgttccaaccgagacagccatgccagagttaggtatcactgtaacattcacacctcctccgtcttctcaaaagatttccgtgggcgatgaattttcctggagtgttttcgtcaataatcagtcttcaaacatgtcaagtgcacccaggaagctcgctctagtcgtccttccaaagcgcagacggaatgaattgcgggtaaccagaccaccttcaatatctcgaatgtccgaaattatacacaagcattccaaattttcgtctgaccagaatgtgggggacgccattctcgacgataatgtagttcacgcgatgcagcgtagtagcatcgttgataatgctgagcttgtgtgcctgagtgcagatgttagaatcgggccactcgcaccgggggcatgtcattcaaccgagctcaaatttgttgcgctgaaagagggcttagcaagcgtagatgccatccgaattatcgacttggggagcaacgaacatgtggatatccgacagttaccaaatgtcacggtgcatcggtagaccgaggacagattttcttctcgtgtatcacgaaaatccacagtgattgtagcatacttcacatggcataagctgccggttctctccctcctcatgtctggcacgacgataccgcagatatacccagactagtcagactggctatcaaaagaattcaatatacttgaaacagtctcgagtcgagaccatagatactcctttggaaattatggtttcgagaacttatgtgtaatattgccgatatgtatattttgtattcgtctttttatctctcgcgatgatctacgtccaagaatgtgacgatacggacgtacagaggacgcgcaactccgagcagtacagtcttgacaagcgcataaaaaaagcaatcctgcagatcgaggagacatgtggctcgaaaccactttcggagtaggattgtccttgagttcggtcggctcgcaaatctgtcgctatctcacgagcaattattcttatcttccaacggtcgatttctcgcgaatatgcacagctcctgtgccggcctgcacactatgtagtagctacaagagactgtatcggcatgcaaattcatggccttagctccggggtggctaatttgcatcacgtaaaagtgatcggcagacaatttttacaaaaatgttccaataactactgcaatgcgacatccaccccgatcagatgagatcaaaaccatgctcttctgaccgtgcaccacattactcgcatgtcaaaagaacgaggatttcgctcgtctaagaaaagagagacgaactgcagagggacttcgtggaaagtactgcatgaaaccacagacgatgcagtggattttaaattgaaacatattaaaccgtcaccgactttaaccggtcagtggctttcaaaacccgcatccaagctaagccttttgcttgtccctttccagaagcttgatcgtcgcctgtttggaagtcgtattgcgatatcccgtgcagcattcacaatacaactctaataagcattattgcatagtgtgacgttacgaagcatggtgaacttgacgatgagcgcttcatgacaagtttgtagccaactcgctatcttcaacgtatcgcttccgaccttttgtcaatatagctcagttgatatcggtcactttagatccctgaggtgacactgccaataacccggtcggggagcaacgtttattcgagtctcaacaaggttcgcaacgactcagaaccgatcaaaaagtcacacctggcatgccacgcgacaggaggggcgtgcagtactgaaccgtgaaatcactgcgaacggctcatgcaaggatttttagtgtctgatatctcgcgagaccaggttgcatcctgatcattccgtgatacaatgccccaggagctagtatgtaagcgagcctagagatcatccataatcagcatatcttgagacatatctaagatatcatccgatgtcaaacataatgagctagccgtgcattcttggtattctagaatattacacaagcagaatgcactcgcccagtgtcgttcccggccaagctcgcctcggggaatagccccgcgtgtgcacagactggcgccgacatctgaaaggccaacgtatggcatggctggcggtgtttaattcggaacttccatctgtcagtttagaaatacttaagtttgattacacataagtctattccaaaatacaaggcaaattcttcaataggcaagccaaaggttgtttaggggctaaggtcgcatccgatatggaattatacgtatgagtaccgcgttgcgtgactcggtttcacggctgttcttagtaatgatggggaaagctaatgttaacggggacctttgtgacttcttaattcagctaagaaacaaaaacttcgaaaagagcaagctcggttcttggttcaggcacagatactgatctgtttgcaagcacagtatctacgatggacccccaaaaattggtctaggcaggacgatcacttgcattgcaaacgatggcgccacgacgg

SEQ ID NO: 11759 - DNA, 1134 bp, Muscodor strobelii
  misc_feature: SGI cDNA ID NO. 563789
  misc_feature: Elevated expression when VOC is produced
  misc_feature: Encodes the peptide sequence at SEQ ID NO 11760
atgtcgtactttggggtggtgttgaacgccgtcaactggacgttgaccgcactggcattggtatttcttgctctgcgtgtgtactgcaagcttgctcggagtcgaggtctgtggtgggatgactaccttttgatagtagcatggataaccactctaattggtgttgctttgatcacatcagggataacacttggtttcgccgacccgaacgctaagattggccctgaggctgcgcgggagcttcaaattcatggtggtgtccaggctgtgatgttctccctggctagcgatctaagcaagacatcattcggcttgacgctcatcagagtggtatctggcaagaccaagacactgattatcgtcgctatggtcctcctgaacattatctacttcttgactattatctttacatttttcaaatgtgaaccggccatttactcctggcttccggcagataaatgctggagtctctggacttatatccagttcacaatcttcgctggagcgtattcggccgcgttcgacttccttttcgcgcttatcccgtggttcttggttaaggatctgcagatgagacgggcggagaagctgggtgttgccgttgccatgagcttcggttcaattgctggtattactgctgtcatcagaaccgccaacctacccttgttggccaaccccaatttttccagtagcgccacaattcttgttatctggtatgtcgctgaaccagctacaacgatcatcgccgcgtcgatccccgttcttcgtgctcttatcaaggacatcaagacatcgagcaacaggtatttcaagagcaagtacggttcggggcatctggagtctggcaccggaggtacttccaaaaacaagagtagccggaatcaaaattccgcacttcactcaagcagagtggtcactactgtgactgggaaacgtaacaaggataagaaagagacggacatgtacggcgacacaagcagcgacaagagcattctcgaagggaatcacggcggcaataaccaaattatgcaaactcaggagattcgattgagctaccacgacagaaacgaaaacgacagcgacagcaacgtaggctacgaaatggaagtaatggggcagcagcgacaaaaatag

SEQ ID NO: 11760 - protein, 377 aa, Muscodor strobelii
  misc_feature: SGI Peptide ID NO. 563789
  misc_feature (4)..(376): NCBI GI: 261354401 Blast Desc: conserved [Verticillium albo-atrum VaMs.102]
  misc_feature (26)..(373): NCBI GI: 256734949 Blast Desc: NECHADRAFT_75721 [Nectria haematococca mpVI 77-13-4]
  misc_feature (5)..(361): NCBI GI: 169624236 Blast Desc: SNOG_15374 [Phaeosphaeria nodorum SN15] gi|111056187|gb|EAT77307.1| SNOG_15374 [Phaeosphaeria nodorum SN15]
  misc_feature (5)..(356): NCBI GI: 171694538 Blast Desc: protein product [Podospora anserina] gi|170947511|emb|CAP59672.1| protein product [Podospora anserina]
  misc_feature (7)..(282): NCBI GI: 85091576 Blast Desc: NCU09022 [Neurospora crassa OR74A] gi|28920363|gb|EAA29733.1| [Neurospora crassa OR74A]
  misc_feature (5)..(377): NCBI GI: 46115692 Blast Desc: FG03688.1 [Gibberella zeae PH-1]
  misc_feature (5)..(303): NCBI GI: 39977265 Blast Desc: MGG_06535 [Magnaporthe grisea 70-15] gi|145016024|gb|EDK00514.1| MGG_06535 [Magnaporthe grisea 70-15]
  misc_feature (5)..(300): NCBI GI: 145604130 Blast Desc: MGG_10747 [Magnaporthe grisea 70-15] gi|145012198|gb|EDJ96854.1| MGG_10747 [Magnaporthe grisea 70-15]
  misc_feature (4)..(330): NCBI GI: 171680068 Blast Desc: protein product [Podospora anserina] gi|170939660|emb|CAP64887.1| protein product [Podospora anserina]
  misc_feature (4)..(359): NCBI GI: 261352438 Blast Desc: conserved [Verticillium albo-atrum VaMs.102]
  misc_feature: Useful for introducing or modulating the production of volatile compounds
MSYFGVVLNAVNWTLTALALVFLALRVYCKLARSRGLWWDDYLLIVAWITTLIGVALITSGITLGFADPNAKIGPEAARELQIHGGVQAVMFSLASDLSKTSFGLTLIRVVSGKTKTLIIVAMVLLNIIYFLTIIFTFFKCEPAIYSWLPADKCWSLWTYIQFTIFAGAYSAAFDFLFALIPWFLVKDLQMRRAEKLGVAVAMSFGSIAGITAVIRTANLPLLANPNFSSSATILVIWYVAEPATTIIAASIPVLRALIKDIKTSSNRYFKSKYGSGHLESGTGGTSKNKSSRNQNSALHSSRVVTTVTGKRNKDKKETDMYGDTSSDKSILEGNHGGNNQIMQTQEIRLSYHDRNENDSDSNVGYEMEVMGQQRQK

SEQ ID NO: 11761 - DNA, 1962 bp, Muscodor strobelii
  misc_feature: SGI EST ID NO. CUFF.27891.0
  misc_feature: Variant of the nucleotide sequence at SEQ ID NO 11759
gttgtatataccagcgcaactattagatacagtaacgtatggtaaggacgacatacctaccatgcgctatgctacatcagtgaggtcctgtgcagcataatgaagccagccagctgaaaaaaagggactaactcgggcccgcgagtatgggaaacaaggcaatacgaatatatgtatacaccagatcgtcccattgctggcacaggatccgctgcgctgggtctctcacctttttgacgaaatatttgttccttctgtgcattctctggttcaccccgacgccacgcacgaaggtggttgtcattacccatatcatcccgtctgttgccgatctggtaaatccgcaaagatgtcgtactttggggtggtgttgaacgccgtcaactggacgttgaccgcactggcattggtatttcttgctctgcgtgtgtactgcaagcttgctcggagtcgaggtctgtggtgggatgactaccttttgatagtagcatggataaccactctaattggtgttgctttgatcacatcagggataacacttggtttcgccgacccgaacgctaagattggccctgaggctgcgcgggagcttcaaattcatggtggtgtccaggctgtgatgttctccctggctagcgatctaagcaagacatcattcggcttgacgctcatcagagtggtatctggcaagaccaagacactgattatcgtcgctatggtcctcctgaacattatctacttcttgactattatctttacatttttcaaatgtgaaccggccatttactcctggcttccggcagataaatgctggagtctctggacttatatccagttcacaatcttcgctggagcgtattcggccgcgttcgacttccttttcgcgcttatcccgtggttcttggttaaggatctgcagatgagacgggcggagaagctgggtgttgccgttgccatgagcttcggttcaattgctggtattactgctgtcatcagaaccgccaacctacccttgttggccaaccccaatttttccagtagcgccacaattcttgttatctggtatgtcgctgaaccagctacaacgatcatcgccgcgtcgatccccgttcttcgtgctcttatcaaggacatcaagacatcgagcaacaggtatttcaagagcaagtacggttcggggcatctggagtctggcaccggaggtacttccaaaaacaagagtagccggaatcaaaattccgcacttcactcaagcagagtggtcactactgtgactgggaaacgtaacaaggataagaaagagacggacatgtacggcgacacaagcagcgacaagagcattctcgaagggaatcacggcggcaataaccaaattatgcaaactcaggagattcgattgagctaccacgacagaaacgaaaacgacagcgacagcaacgtaggctacgaaatggaagtaatggggcagcagcgacaaaaatagttggagttcattatttagacgagatacggaaatcgcatcacctgcggtcaggtgcggccaatcccccatggctgtgatttgtttgcgaccaaagacactggtatacaccagttgtattgtatataagttggcgtcatttggagtccggttgtatatatgtctctcagatctcgggctatggataatgctggcatgagagggcagcctagacctggtatttgacatgatcaaatacccattataccccaatttaacaatcgaacaattatgagttaaactctttcgatggcatactcacaccaacaactaatgtttgcgacatcagggccagccatgacatatttgatgctacattggaagagagatgtatttggaatgtcgatgtcgaagttaatttacagaaataaccttgcaaattacaccatgttgaattctactagatttgttgtaccatacacgcatcttagctaggaccaaca

SEQ ID NO: 11762 - DNA, 1818 bp, Muscodor strobelii
  misc_feature: SGI cDNA ID NO. 563790
  misc_feature: Encodes the peptide sequence at SEQ ID NO 11763
atggcttccaaacttactagaatcgccatcatcaatgatgacaagtgtaaacccaagaaatgtcgtcaggagtgtaagaagtcttgcccagtcgttcgtaccggcaagctctgcatcgaagtcacccccgagtcgcgacttgcatttatttccgagggtctctgcattggatgcggtatctgtcccaagaaatgccccttcggcgctatcaccatcatcaacctgcccaccaatctcgagagccaggtcacccatcgatattctgccaacagcttcaagctccatcgtctacctacgcctaggcccggccaagtccttggtctcgtcgggaccaacggtattggcaagtccacagccttgaaagtcctcagtggcaagctgaagcctaacctgggccgcttcgacaaccctccggactgggaagacgttatcaagtacttccgaggctctgaactacagaactatttcaccaagctcctggaagatgatctcaaggctatcgtcaagcctcaatatgtcgatcaactgccccgtgcggttaagaccccggacaagtctgtcaagtttctactggagagagggtctggcatgggcaacatggatctggttctggatactctcgaacttcgtcatcttctcgaccgtgatgtaaacctgctatccggtggtgagctgcagcgattcgccattggtaccgtctgtgttcaaaaggcagatatttacatgttcgatgaaccttcgtcatatcttgatgtgaagcaacgtctttctgctggtcgaatgattcgctcgcttcttgacgtccaaaactatgtcattgttgttgagcacgatttatcggtccttgattatctctccgattatatctgtgtcctctacggtcaaccagcggtctacggcgtcgtgacgcttccctattcggttcgcgaaggtatcaacatcttcctagacggccatatcccgacagagaatcttcgattccgtgatgaatcattgaccttccgcatatccgagggcgttgatgacttccaggccgacaaagctcgcgccttcagctatcctaaaatggagaagacacttggcaatttcaaacttagcatcgatgccggagacttcaccgattccgaaatcttagtaatgatgggagaaaacggcacaggaaagacatcgttctgtcgtcttctcgctggcgcgctgaagcctgatagtgccaagaaagtaccagaaatgaaagtcagcttcaaaccgcaaacaatcacaccaaaattcgacggcactgtccgacagttgttcttcaagcgtatcaagcaagcgttcttgtcacctcaattccagactgatgtcgtgaagccactcaaattagaggactttattgatcaagaagtcaagaatctttcgggtggtgaactgcaacgtgttgccattgtcatggccttgggtatgcccgcagatatctatctcatcgatgagcctagtgcctacttggattcggaacagcgtatcattgctgctcgcgttataaagcgatttatcatgtctgtcaagaagactgcattcattgtggaacacgatttccttatggccacctacttggcagaccgtgtcattgtctttgatggacagccaggaattgacgcccatgcaaacaagcccgagtcgctgctcaccggttgcaacaagtttctgaagaatctcgacgtcacgttccgacgtgatcccaccaactacaggccccgaatcaacaagcttaacagtcagttggatcaggagcaaaagtccagcggcaactacttcttcctggaggaagatagttcttga

SEQ ID NO: 11763 - protein, 605 aa, Muscodor strobelii
  misc_feature: SGI Peptide ID NO. 563790
  misc_feature (48)..(71): Pfam Id: PF00037 Pfam Desc: 4Fe-4S binding domain
  misc_feature (375)..(541): Pfam Id: PF00005 Pfam Desc: ABC transporter
  misc_feature (103)..(295): Pfam Id: PF00005 Pfam Desc: ABC transporter
  misc_feature (6)..(37): Pfam Id: PF04068 Pfam Desc: metal-binding domain in RNase L inhibitor, RLI
  misc_feature (200)..(295): Pfam Id: PF00005 Pfam Desc: ABC transporter
  misc_feature (1)..(602): NCBI GI: 164427329 Blast Desc: NCU03061 [Neurospora crassa OR74A] gi|157071697|gb|EAA34633.2| NCU03061 [Neurospora crassa OR74A]
  misc_feature (1)..(603): NCBI GI: 46125447 Blast Desc: FG07101.1 [Gibberella zeae PH-1]
  misc_feature (1)..(602): NCBI GI: 145614552 Blast Desc: MGG_11382 [Magnaporthe grisea 70-15] gi|145021461|gb|EDK05590.1| MGG_11382 [Magnaporthe grisea 70-15]
  misc_feature (1)..(604): NCBI GI: 226290257 Blast Desc: translation initiation factor RLI1 [Paracoccidioides brasiliensis Pb18]
  misc_feature (1)..(597): NCBI GI: 226285323 Blast Desc: translation initiation factor RLI1 [Paracoccidioides brasiliensis Pb01]
  misc_feature (1)..(604): NCBI GI: 238841328 Blast Desc: translation initiation factor RLI1 [Microsporum canis CBS 113480]
  misc_feature (20)..(586): NCBI GI: 171687881 Blast Desc: protein product [Podospora anserina] gi|170943902|emb|CAP69554.1| protein product [Podospora anserina]
  misc_feature (1)..(604): NCBI GI: 238498530 Blast Desc: RNase L inhibitor of the ABC superfamily, [Aspergillus flavus NRRL3357] gi|220693774|gb|EED50119.1| RNase L inhibitor of the ABC superfamily, [Aspergillus flavus NRRL3357]
  misc_feature (1)..(604): NCBI GI: 225682813 Blast Desc: aliphatic sulfonates import ATP-binding protein ssuB 1 [Paracoccidioides brasiliensis Pb03]
  misc_feature (1)..(604): NCBI GI: 212542837 Blast Desc: RNase L inhibitor of the ABC superfamily, [Penicillium marneffei ATCC 18224] gi|210066480|gb|EEA20573.1| RNase L inhibitor of the ABC superfamily, [Penicillium marneffei ATCC
MASKLTRIAIINDDKCKPKKCRQECKKSCPVVRTGKLCIEVTPESRLAFISEGLCIGCGICPKKCPFGAITIINLPTNLESQVTHRYSANSFKLHRLPTPRPGQVLGLVGTNGIGKSTALKVLSGKLKPNLGRFDNPPDWEDVIKYFRGSELQNYFTKLLEDDLKAIVKPQYVDQLPRAVKTPDKSVKFLLERGSGMGNMDLVLDTLELRHLLDRDVNLLSGGELQRFAIGTVCVQKADIYMFDEPSSYLDVKQRLSAGRMIRSLLDVQNYVIVVEHDLSVLDYLSDYICVLYGQPAVYGVVTLPYSVREGINIFLDGHIPTENLRFRDESLTFRISEGVDDFQADKARAFSYPKMEKTLGNFKLSIDAGDFTDSEILVMMGENGTGKTSFCRLLAGALKPDSAKKVPEMKVSFKPQTITPKFDGTVRQLFFKRIKQAFLSPQFQTDVVKPLKLEDFIDQEVKNLSGGELQRVAIVMALGMPADIYLIDEPSAYLDSEQRIIAARVIKRFIMSVKKTAFIVEHDFLMATYLADRVIVFDGQPGIDAHANKPESLLTGCNKFLKNLDVTFRRDPTNYRPRINKLNSQLDQEQKSSGNYFFLEEDSS

SEQ ID NO: 11764 - DNA, 2626 bp, Muscodor strobelii
  misc_feature: SGI EST ID NO. CUFF.27913.0
  misc_feature: Variant of the nucleotide sequence at SEQ ID NO 11762
cagaaacacagaaattaattcccaaccacagctcgccgttcttggggatagcatcatccaccgagtcaaaaggttcctgtcgctagtccttggtgtttggctccgctgtcactctgccccctgaatacctacccaggtcaaagccatggcttccaaacttactagaatcgccatcatcaatgatgacaagtgtaaacccaagaaatgtcgtcaggagtgtaagaagtcttgcccagtcgttcgtaccggcaagctctgcatcgaagtcacccccgagtcgcgacttgcatttatttccgagggtctctgcattggatgcggtatctgtcccaagaaatgccccttcggcgctatcaccatcatcaacctgcccaccaatctcgagagccaggtcacccatcgatattctgccaacagcttcaagctccatcgtctacctacgcctaggcccggccaagtccttggtctcgtcgggaccaacggtattggcaagtccacagccttgaaagtcctcagtggcaagctgaagcctaacctgggccgcttcgacaaccctccggactgggaagacgttatcaagtacttccgaggctctgaactacagaactatttcaccaagctcctggaagatgatctcaaggctatcgtcaagcctcaatatgtcgatcaactgccccgtgcggttaagaccccggacaagtctgtcaagtttctactggagagagggtctggcatgggcaacatggatctggttctggatactctcgaacttcgtcatcttctcgaccgtgatgtaaacctgctatccggtggtgagctgcagcgattcgccattggtaccgtctgtgttcaaaaggcagatatttacatgttcgatgaaccttcgtcatatcttgatgtgaagcaacgtctttctgctggtcgaatgattcgctcgcttcttgacgtccaaaactatgtcattgttgttgagcacgatttatcggtccttgattatctctccgattatatctgtgtcctctacggtcaaccagcggtctacggcgtcgtgacgcttccctattcggttcgcgaaggtatcaacatcttcctagacggccatatcccgacagagaatcttcgattccgtgatgaatcattgaccttccgcatatccgagggcgttgatgacttccaggccgacaaagctcgcgccttcagctatcctaaaatggagaagacacttggcaatttcaaacttagcatcgatgccggagacttcaccgattccgaaatcttagtaatgatgggagaaaacggcacaggaaagacatcgttctgtcgtcttctcgctggcgcgctgaagcctgatagtgccaagaaagtaccagaaatgaaagtcagcttcaaaccgcaaacaatcacaccaaaattcgacggcactgtccgacagttgttcttcaagcgtatcaagcaagcgttcttgtcacctcaattccagactgatgtcgtgaagccactcaaattagaggactttattgatcaagaagtcaagaatctttcgggtggtgaactgcaacgtgttgccattgtcatggccttgggtatgcccgcagatatctatctcatcgatgagcctagtgcctacttggattcggaacagcgtatcattgctgctcgcgttataaagcgatttatcatgtctgtcaagaagactgcattcattgtggaacacgatttccttatggccacctacttggcagaccgtgtcattgtctttgatggacagccaggaattgacgcccatgcaaacaagcccgagtcgctgctcaccggttgcaacaagtttctgaagaatctcgacgtcacgttccgacgtgatcccaccaactacaggccccgaatcaacaagcttaacagtcagttggatcaggagcaaaagtccagcggcaactacttcttcctggaggaagatagttcttgagaagaccatcccaaagcatgatggccgaagaaacggccataatgacaggtacggtaaaagtactcccgaagcatcgatccgaggcgttggaggcgttcaaaagaagcaaggtcaaacgggcagcggtgctcatggattactagaagatggcgatgccgaggatagtgacgaccctgacgaccatgatcagagatggtgatctaacccctgttattgtctggtcctgcagagcatagttgctctctatatcttgctagaatgcggcctctaatgggctgacgattagagagcggtcgcctacacttcgtgcgacccgattctgcagattgagggacaaacgggtcaagaggattgttcgccatcatagagtgtgatacaaaaacatactcgcgaaatcattgatgaattatgctagacagacaggtctggctacaaataattgatctatcgttctggaatgactttctttccgtatgcgattaggctcttgctctaggcacatttgcattgagagatttgatccgtctcgcttgcaagagccagtcatgagcttgttggctcgccagattcgtagtctctttcagcagcctaaaagccctgtcagcaaataaataatgggagaaatcagtaaggtggaaggaaaatgaagaggagcgtaccagc

SEQ ID NO: 11765 - DNA, 4884 bp, Muscodor strobelii
  misc_feature: SGI cDNA ID NO. 563791
  misc_feature: Encodes the peptide sequence at SEQ ID NO 11766
atgcgagtcctgccgcgcgaggctgctccgcctggtgctggctggccgtccggcctcgattccatcctccacaaccccatcaccggccctgccatctcctcctcgcctcacgaggttgcgtcgtctgtcaacatgtcgagctcccccgagccagcctcggctggccgtgactcctcggtgcccgctcgacttgatgctgatcctgccttcaacgaccgggcgagcgagagcgacctgtcagacgtcaacgaatcctcagccttgccccgtcctcgctctcccatgtctccccccgctcgtgaatcctcccaagacgccgaagccgaagccgacctggacgatgccgcagagtctagtggagatgatgctcgagcatcaaacgatgcggactacgatatggaagagtcaccggcaccgtcccagagcgatgaccaccgtgatgaccgctcctcctcgcaagaatcccgtcgcgcacccaagcggaaagccgccgtcgaggaggatgactacatcagagaaaaccctgagttgtatggactgaggagaagttctcggcccaccaagcagcccaaaatcatcgaatctgatgaagacgatgattccgattccgatgtaattcccactaaccggagaacgaagaaactccgcacagagcagatctcgcgacaatcttccaaacgaggcacaccgactcgccagacaccagctgaggactctgagtccgaagatacttatggcggtgccaaggcccgctcgttgatcaagaaagttcgccgccaacaagcacagccccaagcttctcatttgtatgcggaaaagcggtggtccaatagacgcgccgcaaacactgtccagacgtatcaagagagcgacatagaagacgacgacgagtcagagcttacgccgaataactggcctggcggagaactggccgaagagacagattacatcgagaaagtcgtgggacaccgcgtcgtagacgatggcgagctgacgaccgatgtgaggaaggaagacttcgagtactatatcaaatggcaaggcaagtcgtacctccacaatacttgggatcccatagagaagctgcgcagctatcgcggccttcgcaagctcgagaattatttcaagaggaccgtggagtacgaggtggatctcaagtttgccggtgatgagattgcgccggaaatccgcgagcagtacatgcttgacaaagagagggaccaggatgctcttgccgactacaccaaagtcgagcgagttgtggctcagcgaagcggtgacgaggggcgcgagtacttcgtcaagtggaaaggcttgacctacgagaactgcacatgggagcttgcctccaccatcaacccgctggcccaagataagatcgatcagtttctcgatagacaatcacggtcctggacatcagacaagaccgagacgaacctcgcaacgcgaagcaagttcctaaagcttgacaaacaacctcactacatcaagaatggggagctcagaagcttccagctcaccggcctgaacttcttagccctaaactggtgcagaggaaacaatgtcattcttgctgacgaaatgggactgggtaagacggttcagactatctcctttctgagttggctgcgcaatgagcggaaacaagagggtccgtttctcgtagtggcgcctcttagcgttatacccgcgtggtgtgacacgttcaatctgtggtctccggatctaaactacgtcgtctacttgggaaatgccgaagcgcgcagcaccattcgcgagcatgaactcatgttcaacggaaaccccaagaaacacaagttcaacgttctcgtcacctcgtatgagtatatcctgacagatgccgagttcctgaggaccatcaaatggcaagctctcgccgtagacgaagctcaccggttgaaaaataaagaggctaagctctatgccgaattgatgagtatgggcgcaccatcacgcgtattgatcaccggtactccaattcagaacaaccttgccgaattgtcttccctccttgactttctgaaccccggcaaagtgcatatcgatgaagacctggagaccctggcctcggcagatgctcaaaccaagctacaggagcttcatagctccattgcaccgttcatcctgcgccggacaaaggagactgtagagtcagacattccaccaaagacggaaaagatcattcgagtcgagttgtctgacattcagttggaatattacaagaacattctcaccagaaactatgcagcattgaacgagcacaacagcggccagaaatcatcactcctgaacattgtgatggaactcaagaaagtgagcaaccatccatacatgtttcctggtgctgaagagaaagttctgaatggtagcacgcggcgtgaagaccaaattaaaggtctgatcactagtagcggcaagatgatgctcctcgatcagttgttggccaagctcaaaagggacaaccaccgcgtcctgattttcagccagatggtcaaggtacttgatatcttgggtgactacttgcgtctccgtggctatcagtttcaacgactggatggtactgttgccgccggtccgagacgccttgctataaaccatttcaatgccgaggatagccaagatttctgcttcctgttgtcgacgcgcgctggaggtcttggtatcaatttgatgaccgccgacactgtcatcatctttgattcagattggaatcctcaagccgatttgcaggccatggcgcgagcccacagaattggacaaaagaagccagtcaccgtctatcgtctcgtttccaaagagacaatcgaagaagaagtcctcgaacgtgcccgcaataagcttctgcttgagtatctggctatccaagctggagtaactgacgatggtaaggccttcaaagaagagttcaagcagaagggcctcagactagatgaggccaagtcagccgatgatatccaatgggtgttgaagatgcgttcgcagaagatgttcgaacagtccggcaaccaagaaagacttgagcagcttgatattgacagcatccttgagaatgccgaggttacaaagacaaagatagacgacaagatgaatctcagtaccggaggtatcgactgggacaacttcatgcaatacacggatgtcaaagtggatgatattaatttggactgggaccagattataccagcagaacaactcgccgccattaaaagcgaagaggagaagagaaaggcagacgactatctagctcgagagctcgaggccagcgcaccgcgtcgggccgcactgaaaaacgccagaaccaatggtgaatccgagcgagctgagcgcattgcaaagaagcgggagcgcgagcaggagaagcaggaacgcctcgaggagcagcgagcctcgctctctgatccgcgacgacctcttaatgagaaggaaacgcgaaaccttatcagggcttttatgcgttatggtttcatggaggatcgtccggaagagcttctgcgtgacgctcgactaagtgatcgagacaggggattcatcaatggcgtgcttcaggatctcgtgaatgcgtctcgcgacgcaatggatcgaaacaccgacgagatccgcgctcaagaacagcaggctaacaaaaagatgaccaagaaggacatcaaagctgtcatgtttgattttggtgaagtcaagaaaatcaatgccgaaaccattcttgaccgtcccccgcagttgcgtcttcttcgcaaaataattcaggatcaggaacctgattttcgggctttccaacttccagaggccaccaagaccgcacattacagttgcgagtggggcctgcgcgaagatggaatgctgcttgtcggcattgaccgatatgggttcggagcttggactcagatccgcgaggacagagaacttggcatggaggacaagttctttttggaagagcatcgcatagcccagaagcaagagcgagaacaagccgaaagcaaaggcgctaaagctcctggcgcggttcatttagtccgtcgcgccgaatacctcttatctgtgctcatgtcagttcactcagacgatctcaacgctcagaagattgttgagaatcatcatcgaaacaacaagaaagcggcgaacggacatcgccggccggaaaaaggaggctcaatttccgcgtcgcccgctcctcatgggtccaagaagttatctcaccgtgagagggaccgagaacgcgatcacgaatcctcccatgtgcggggcgaccatcgctcacggaatagtgtaggagagagcagtactccacgccctgaaagtaaaagaaagcacagtggtgaaatggaggagcgtcgtcatatcaagcatcgtcgcgtagaagagcatcgacgaagtgaacccagtgtgcaggccgccccagacggagaagattacgacgagaggagagacgagccacttatccaacaattgatgcagcccatctggaagaacgtcgagagggttgaatcatgtacgaagaccaacattccggttgctaaggctagagccaaagtcctcaaatccgagatcacgcatattggggatttcatcgagggtttgaaaagaaactcggttgtgaatgaaaagcagtgggaggagctcaaacctaagctctggaaattcatatctaagagaataccgccctctgaaaaatcatccagtaaaccggatgcggaaaaggagaagtcagacaagccttcgtcttctggcggtatgactggtccaaagctggccgcgctgtatcaacaactcaagctacaagcactggaggccaagaatggcaatgcttcaagctctaaacgtccaggtgcttctcttccaaacggtgcatcatcccgcggcgagtaa

SEQ ID NO: 11766 - protein, 1627 aa, Muscodor strobelii
  misc_feature: SGI Peptide ID NO. 563791
  misc_feature (415)..(466): Pfam Id: PF00385 Pfam Desc: 'chromo' (CHRromatin Organisation MOdifier) domain
  misc_feature (315)..(377): Pfam Id: PF00385 Pfam Desc: 'chromo' (CHRromatin Organisation MOdifier) domain
  misc_feature (847)..(926): Pfam Id: PF00271 Pfam Desc: Helicase conserved C-terminal domain
  misc_feature (504)..(786): Pfam Id: PF00176 Pfam Desc: SNF2 family N-terminal domain
  misc_feature (45)..(1559): NCBI GI: 171687883 Blast Desc: protein product [Podospora anserina] gi|170943903|emb|CAP69555.1| protein product [Podospora anserina]
  misc_feature (45)..(1562): NCBI GI: 164427331 Blast Desc: NCU03060 [Neurospora crassa OR74A] gi|157071698|gb|EAA34632.2| NCU03060 [Neurospora crassa OR74A]
  misc_feature (45)..(1610): NCBI GI: 145614554 Blast Desc: MGG_04589 [Magnaporthe grisea 70-15] gi|145021462|gb|EDK05591.1| MGG_04589 [Magnaporthe grisea 70-15]
  misc_feature (45)..(1562): NCBI GI: 116180352 Blast Desc: CHGG_00804 [Chaetomium globosum CBS 148.51] gi|88185101|gb|EAQ92569.1| CHGG_00804 [Chaetomium globosum CBS 148.51]
  misc_feature (72)..(1616): NCBI GI: 256732625 Blast Desc: SNF2 family chromodomain-helicase DNA-binding protein [Nectria haematococca mpVI 77-13-4]
  misc_feature (72)..(1464): NCBI GI: 46125449 Blast Desc: FG07102.1 [Gibberella zeae PH-1]
  misc_feature (85)..(1414): NCBI GI: 261355905 Blast Desc: chromodomain helicase hrp3 [Verticillium albo-atrum VaMs.102]
  misc_feature (34)..(1559): NCBI GI: 156052901 Blast Desc: SS1G_06618 [Sclerotinia sclerotiorum 1980] gi|154704396|gb|EDO04135.1| SS1G_06618 [Sclerotinia sclerotiorum 1980]
  misc_feature (154)..(1622): NCBI GI: 119495934 Blast Desc: chromodomain helicase (Chd1), [Neosartorya fischeri NRRL 181] gi|119412904|gb|EAW22845.1| chromodomain helicase (Chd1), [Neosartorya fischeri NRRL 181]
  misc_feature (99)..(1562): NCBI GI: 145239381 Blast Desc: An08g02200 [Aspergillus niger] gi|134076845|emb|CAK45266.1| protein product [Aspergillus niger]
MRVLPREAAPPGAGWPSGLDSILHNPITGPAISSSPHEVASSVNMSSSPEPASAGRDSSVPARLDADPAFNDRASESDLSDVNESSALPRPRSPMSPPARESSQDAEAEADLDDAAESSGDDARASNDADYDMEESPAPSQSDDHRDDRSSSQESRRAPKRKAAVEEDDYIRENPELYGLRRSSRPTKQPKIIESDEDDDSDSDVIPTNRRTKKLRTEQISRQSSKRGTPTRQTPAEDSESEDTYGGAKARSLIKKVRRQQAQPQASHLYAEKRWSNRRAANTVQTYQESDIEDDDESELTPNNWPGGELAEETDYIEKVVGHRVVDDGELTTDVRKEDFEYYIKWQGKSYLHNTWDPIEKLRSYRGLRKLENYFKRTVEYEVDLKFAGDEIAPEIREQYMLDKERDQDALADYTKVERVVAQRSGDEGREYFVKWKGLTYENCTWELASTINPLAQDKIDQFLDRQSRSWTSDKTETNLATRSKFLKLDKQPHYIKNGELRSFQLTGLNFLALNWCRGNNVILADEMGLGKTVQTISFLSWLRNERKQEGPFLVVAPLSVIPAWCDTFNLWSPDLNYVVYLGNAEARSTIREHELMFNGNPKKHKFNVLVTSYEYILTDAEFLRTIKWQALAVDEAHRLKNKEAKLYAELMSMGAPSRVLITGTPIQNNLAELSSLLDFLNPGKVHIDEDLETLASADAQTKLQELHSSIAPFILRRTKETVESDIPPKTEKIIRVELSDIQLEYYKNILTRNYAALNEHNSGQKSSLLNIVMELKKVSNHPYMFPGAEEKVLNGSTRREDQIKGLITSSGKMMLLDQLLAKLKRDNHRVLIFSQMVKVLDILGDYLRLRGYQFQRLDGTVAAGPRRLAINHFNAEDSQDFCFLLSTRAGGLGINLMTADTVIIFDSDWNPQADLQAMARAHRIGQKKPVTVYRLVSKETIEEEVLERARNKLLLEYLAIQAGVTDDGKAFKEEFKQKGLRLDEAKSADDIQWVLKMRSQKMFEQSGNQERLEQLDIDSILENAEVTKTKIDDKMNLSTGGIDWDNFMQYTDVKVDDINLDWDQIIPAEQLAAIKSEEEKRKADDYLARELEASAPRRAALKNARTNGESERAERIAKKREREQEKQERLEEQRASLSDPRRPLNEKETRNLIRAFMRYGFMEDRPEELLRDARLSDRDRGFINGVLQDLVNASRDAMDRNTDEIRAQEQQANKKMTKKDIKAVMFDFGEVKKINAETILDRPPQLRLLRKIIQDQEPDFRAFQLPEATKTAHYSCEWGLREDGMLLVGIDRYGFGAWTQIREDRELGMEDKFFLEEHRIAQKQEREQAESKGAKAPGAVHLVRRAEYLLSVLMSVHSDDLNAQKIVENHHRNNKKAANGHRRPEKGGSISASPAPHGSKKLSHRERDRERDHESSHVRGDHRSRNSVGESSTPRPESKRKHSGEMEERRHIKHRRVEEHRRSEPSVQAAPDGEDYDERRDEPLIQQLMQPIWKNVERVESCTKTNIPVAKARAKVLKSEITHIGDFIEGLKRNSVVNEKQWEELKPKLWKFISKRIPPSEKSSSKPDAEKEKSDKPSSSGGMTGPKLAALYQQLKLQALEAKNGNASSSKRPGASLPNGASSRGE

SEQ ID NO: 11767 - DNA, 6228 bp, Muscodor strobelii
  misc_feature: SGI EST ID NO. CUFF.28082.0
  misc_feature: Variant of the nucleotide sequence at SEQ ID NO 11765
gggcgctaagcccattctatgaggggattccgcacgagtcacagtgtgcacaagcagcggcagtgactagcggccaacagaacaggcggagataggtacatggacagctggggccacagctgggtgtcggcgcgggccaagcacgcaggtcttttccgctcctcgacgtcccaggtctccttcgattattccgtattccacacagctctcccaacctgcacccattcccacctctcccccatccgcaccgacgcaaccacggggggcccatcgcctcgtgcaccatctgttgccagacacaccctgtcttctgctgtagtccttctctgctcggcattgttgacgacccgtaagtgcccccttccggccccatgcgagtcctgccgcgcgaggctgctccgcctggtgctggctggccgtccggcctcgattccatcctccacaaccccatcaccggccctgccatctcctcctcgcctgtcctgagattgctcgggcttgaatgtatgcatcgctctgcttgctgtcgagccctctgacgcgtccggatcctgccacccccctcgcaatctgccctccgatgcccatcctagcccatcatccatcagcctcgtgcccatcagtccatcacccgacttgcgccagatcccttcctcgcttctgtctcgacctgtattgcttgcaatagtgcccggtctgatcgcccgttctcccgctacccgcccataccaccattgtagccctgacttgccgattgcttgctgaccctgtcgcagcacgaggttgcgtcgtctgtcaacatgtcgagctcccccgagccagcctcggctggccgtgactcctcggtgcccgctcgacttgatgctgatcctgccttcaacgaccgggcgagcgagagcgacctgtcagacgtcaacgaatcctcagccttgccccgtcctcgctctcccatgtctccccccgctcgtgaatcctcccaagacgccgaagccgaagccgacctggacgatgccgcagagtctagtggagatgatgctcgagcatcaaacgatgcggactacgatatggaagagtcaccggcaccgtcccagagcgatgaccaccgtgatgaccgctcctcctcgcaagaatcccgtcgcgcacccaagcggaaagccgccgtcgaggaggatgactacatcagagaaaaccctgagttgtatggactgaggagaagttctcggcccaccaagcagcccaaaatcatcgaatctgatgaagacgatgattccgattccgatgtaattcccactaaccggagaacgaagaaactccgcacagagcagatctcgcgacaatcttccaaacgaggcacaccgactcgccagacaccagctgaggactctgagtccgaagatacttatggcggtgccaaggcccgctcgttgatcaagaaagttcgccgccaacaagcacagccccaagcttctcatttgtatgcggaaaagcggtggtccaatagacgcgccgcaaacactgtccagacgtatcaagagagcgacatagaagacgacgacgagtcagagcttacgccgaataactggcctggcggagaactggccgaagagacagattacatcgagaaagtcgtgggacaccgcgtcgtagacgatggcgagctgacgaccgatgtgaggaaggaagacttcgagtactatatcaaatggcaaggcaagtcgtacctccacaatacttgggatcccatagagaagctgcgcagctatcgcggccttcgcaagctcgagaattatttcaagaggaccgtggagtacgaggtggatctcaagtttgccggtgatgagattgcgccggaaatccgcgagcagtacatgcttgacaaagagagggaccaggatgctcttgccgactacaccaaagtcgagcgagttgtggctcagcgaagcggtgacgaggggcgcgagtacttcgtcaagtggaaaggcttgacctacgagaactgcacatgggagcttgcctccaccatcaacccgctggcccaagataagatcgatcagtttctcgatagacaatcacggtcctggacatcagacaagaccgagacgaacctcgcaacgcgaagcaagttcctaaagcttgacaaacaacctcactacatcaagaatggggagctcagaagcttccagctcaccggcctgaacttcttagccctaaactggtgcagaggaaacaatgtcattcttgctgacgaaatgggactgggtaagacggttcagactatctcctttctgagttggctgcgcaatgagcggaaacaagagggtccgtttctcgtagtggcgcctcttagcgttatacccgcgtggtgtgacacgttcaatctgtggtctccggatctaaactacgtcgtctacttgggaaatgccgaagcgcgcagcaccattcgcgagcatgaactcatgttcaacggaaaccccaagaaacacaagttcaacgttctcgtcacctcgtatgagtatatcctgacagatgccgagttcctgaggaccatcaaatggcaagctctcgccgtagacgaagctcaccggttgaaaaataaagaggctaagctctatgccgaattgatgagtatgggcgcaccatcacgcgtattgatcaccggtactccaattcagaacaaccttgccgaattgtcttccctccttgactttctgaaccccggcaaagtgcatatcgatgaagacctggagaccctggcctcggcagatgctcaaaccaagctacaggagcttcatagctccattgcaccgttcatcctgcgccggacaaaggagactgtagagtcagacattccaccaaagacggaaaagatcattcgagtcgagttgtctgacattcagttggaatattacaagaacattctcaccagaaactatgcagcattgaacgagcacaacagcggccagaaatcatcactcctgaacattgtgatggaactcaagaaagtgagcaaccatccatacatgtttcctggtgctgaagagaaagttctgaatggtagcacgcggcgtgaagaccaaattaaaggtctgatcactagtagcggcaagatgatgctcctcgatcagttgttggccaagctcaaaagggacaaccaccgcgtcctgattttcagccagatggtcaaggtacttgatatcttgggtgactacttgcgtctccgtggctatcagtttcaacgactggatggtactgttgccgccggtccgagacgccttgctataaaccatttcaatgccgaggatagccaagatttctgcttcctgttgtcgacgcgcgctggaggtcttggtatcaatttgatgaccgccgacactgtcatcatctttgattcagattggaatcctcaagccgatttgcaggccatggcgcgagcccacagaattggacaaaagaagccagtcaccgtctatcgtctcgtttccaaagagacaatcgaagaagaagtcctcgaacgtgcccgcaataagcttctgcttgagtatctggctatccaagctggagtaactgacgatggtaaggccttcaaagaagagttcaagcagaagggcctcagactagatgaggccaagtcagccgatgatatccaatgggtgttgaagatgcgttcgcagaagatgttcgaacagtccggcaaccaagaaagacttgagcagcttgatattgacagcatccttgagaatgccgaggttacaaagacaaagatagacgacaagatgaatctcagtaccggaggtatcgactgggacaacttcatgcaatacacggatgtcaaagtggatgatattaatttggactgggaccagattataccagcagaacaactcgccgccattaaaagcgaagaggagaagagaaaggcagacgactatctagctcgagagctcgaggccagcgcaccgcgtcgggccgcactgaaaaacgccagaaccaatggtgaatccgagcgagctgagcgcattgcaaagaagcgggagcgcgagcaggagaagcaggaacgcctcgaggagcagcgagcctcgctctctgatccgcgacgacctcttaatgagaaggaaacgcgaaaccttatcagggcttttatgcgttatggtttcatggaggatcgtccggaagagcttctgcgtgacgctcgactaagtgatcgagacaggggattcatcaatggcgtgcttcaggatctcgtgaatgcgtctcgcgacgcaatggatcgaaacaccgacgagatccgcgctcaagaacagcaggctaacaaaaagatgaccaagaaggacatcaaagctgtcatgtttgattttggtgaagtcaagaaaatcaatgccgaaaccattcttgaccgtcccccgcagttgcgtcttcttcgcaaaataattcaggatcaggaacctgattttcgggctttccaacttccagaggccaccaagaccgcacattacagttgcgagtggggcctgcgcgaagatggaatgctgcttgtcggcattgaccgatatgggttcggagcttggactcagatccgcgaggacagagaacttggcatggaggacaagttctttttggaagagcatcgcatagcccagaagcaagagcgagaacaagccgaaagcaaaggcgctaaagctcctggcgcggttcatttagtccgtcgcgccgaatacctcttatctgtgctcatgtcagttcactcagacgatctcaacgctcagaagattgttgagaatcatcatcgaaacaacaagaaagcggcgaacggacatcgccggccggaaaaaggaggctcaatttccgcgtcgcccgctcctcatgggtccaagaagttatctcaccgtgagagggaccgagaacgcgatcacgaatcctcccatgtgcggggcgaccatcgctcacggaatagtgtaggagagagcagtactccacgccctgaaagtaaaagaaagcacagtggtgaaatggaggagcgtcgtcatatcaagcatcgtcgcgtagaagagcatcgacgaagtgaacccagtgtgcaggccgccccagacggagaagattacgacgagaggagagacgagccacttatccaacaattgatgcagcccatctggaagaacgtcgagagggttgaatcatgtacgaagaccaacattccggttgctaaggctagagccaaagtcctcaaatccgagatcacgcatattggggatttcatcgagggtttgaaaagaaactcggttgtgaatgaaaagcagtgggaggagctcaaacctaagctctggaaattcatatctaagagaataccgccctctgaaaaatcatccagtaaaccggatgcggaaaaggagaagtcagacaagccttcgtcttctggcggtatgactggtccaaagctggccgcgctgtatcaacaactcaagctacaagcactggaggccaagaatggcaatgcttcaagctctaaacgtccaggtgcttctcttccaaacggtgcatcatcccgcggcgagtaatttgactcgactatgtcatgggctctcctgttgagaggtcgacaacagcggtactggcttctcatgacgttttatatttcacaatgcattctacggagttccggatcggcatcattagactgcgagatattctgcggacttctcgtcatcatcatacccgaccaaaagcatactgctttataggcccatcggcgttcacacggtgaagtttttctgggcgatatattctagcccatgtcttttcattgcctcattcacaggcagatggcgaaaagaggggacataaggcgtctccaagtcgtcgtctatagcgaaacatgattcctcctgtataggcgtatgtacccaacatgttttctttcccgctgggtaggcctacgaccaggccccatggcagcgtactgtacttggccgacattggtgaaggccgtcaaaaacaggactggggctgcttggtggtctgtggggttgttaccgaaagaaaaaaggtagataatagaggtgaagcattttacgatccgggcggacgtgatgatgagggcatgaatgggaatactaggggcacagctagcatctagtatgattctacagccctgtgctactgctacctaatggtctatgtgctctacactcgggtcgggctgctattgacctacaaagaaatcaaagaaaaatt

SEQ ID NO: 11768 - DNA, 1923 bp, Muscodor strobelii
  misc_feature: SGI cDNA ID NO. 563792
  misc_feature: Reduced expression when VOC is produced
  misc_feature: Encodes the peptide sequence at SEQ ID NO 11769
atgatggacgcttctccggcctcgtcatcgctctccgatctttcagatcccccatcctccgacccgccctcgtcgccgctctccgtgctcacgaggtcgccctccatctcgccgcgcgcctctctctccctccaccagagccgcctgccctcgcccccctcgtcctccatctactccggcagcgcgtcgcccgccaagtcctccgacccggccgagctggagatccacgtcaaccccgatggccccccgccagccaagcgccgccgtgtcgagcgcaagcccaggaccacccagaccgtcgatctgaccgccggctaccgccagagcgccgccgatgacgagctgatcgaccacctgacccgcgccctgcgcaaaaagaagaagattgtcgtcatcgccggtgctggcatctctgtatcggctggaattccggacttccgctcctcctcgggcctcttcgcgaccttgcccaaggagtacaagctcaagggctctggcaaagatctcttcgacgcctccgtctacaaacacgacgcctccacctcagacttccacgacatggtccgccagctgtccaacctggtcagcaatgcccagcccactccattccaccactttcttgcctcgctcgccaccgagggccgcttgctgcgactctacacccagaatgtcgacgggctcgacacctccatggaccccctcggcaccgctgttcccctgccccccaagggcccctggcctcaaaccatccagctgcacggctgtctggccaagatggtctgctccaagtgtcacgaaatcagccagttcgacgcctctctgttcgagggcccccaggctccgctgtgcaagggctgcgaggagacagacaatgttcgaacgtcgcacgccggaaagcgcagccacggcattggaagactccgtccgcgcatggtgctctacaatgagtacaaccccgatcaggagtctattgacaacgtggttcgcgccgacatacgctcgcgaccggacgctgtcgtcgtcgtgggcacaactctgaagattcccggcgtcaagaacatggtcaaggacatgtgcaagaaaacgagagagcgacgagacggcatcaccatgtggatcaacctggagcccgaacccagcggcgaactgaagaactgctgggacttgattgtcaggggcaaatgtgacgatgtcgcttcccttgtacagctcccacacttcgatgagagtattgagcagggcgtcgagaccattgtcgacgacgccaagtacgagagtgatgtgcgccgtgtaaaagttgaagttgagatccgcagcactgcttctgagtccggtgaggagtcaggccagctttcctctacagaggcgaaattacagtctatcgagaaagtccagggtttccctactccctctgctagtcccaagatacgcactgctctacccactaagccgagatcgaaagctaagcagactcgcatttccttcggtggtcacacagcttcttctgcgcctaccaaagcctcgaaggaacccaggaagacgacacaaagtaggaagaaatacactaagaagcccgagtcgaagcccaaggctaccatcaacacggcattcaagatgtcgaaaacaaacataccaacatcttcaaagaccaaatctaacaaacgtccgttggacctcgaaactagctctagtgatgaggctagggagctctataacagcgacttttcacttcggcctaggaggccaaaacctgcgcaggacagtttcgtctctcagaaaaatacggagacccccatcaagcaagaactctcaaatccacgcccatgtacccctgagctgcaaaagcggccttcgttctccatgcatgacactaccgtgtcgcccccttcaaaaccacgtggaatgggaagtttaatcgattga

SEQ ID NO: 11769 - protein, 640 aa, Muscodor strobelii
  misc_feature: SGI Peptide ID NO. 563792
  misc_feature (134)..(349): Pfam Id: PF02146 Pfam Desc: Sir2 family
  misc_feature (197)..(227): Pfam Id: PF02146 Pfam Desc: Sir2 family
  misc_feature (134)..(159): Pfam Id: PF02146 Pfam Desc: Sir2 family
  misc_feature (68)..(640): NCBI GI: 164427333 Blast Desc: NCU03059 [Neurospora crassa OR74A] gi|157071699|gb|EAA34475.2| conserved [Neurospora crassa OR74A]
  misc_feature (19)..(640): NCBI GI: 171687885 Blast Desc: protein product [Podospora anserina] gi|170943904|emb|CAP69556.1| protein product [Podospora anserina]
  misc_feature (24)..(534): NCBI GI: 46107154 Blast Desc: FG00460.1 [Gibberella zeae PH-1]
  misc_feature (8)..(545): NCBI GI: 256734556 Blast Desc: NECHADRAFT_103157 [Nectria haematococca mpVI 77-13-4]
  misc_feature (81)..(640): NCBI GI: 116180350 Blast Desc: CHGG_00803 [Chaetomium globosum CBS 148.51] gi|88185100|gb|EAQ92568.1| CHGG_00803 [Chaetomium globosum CBS 148.51]
  misc_feature (23)..(640): NCBI GI: 145614556 Blast Desc: MGG_04588 [Magnaporthe grisea 70-15] gi|145021463|gb|EDK05592.1| MGG_04588 [Magnaporthe grisea 70-15]
  misc_feature (82)..(552): NCBI GI: 240279390 Blast Desc: Sir2 family histone deacetylase Hst4 [Ajellomyces capsulatus H143]
  misc_feature (82)..(552): NCBI GI: 225559647 Blast Desc: Sir2 family histone deacetylase Hst4 [Ajellomyces capsulatus G186AR]
  misc_feature (83)..(552): NCBI GI: 239613348 Blast Desc: SIR2 family histone deacetylase [Ajellomyces dermatitidis ER-3]
  misc_feature (83)..(552): NCBI GI: 261194865 Blast Desc: SIR2 family histone deacetylase [Ajellomyces dermatitidis SLH14081] gi|239588375|gb|EEQ71018.1| SIR2 family histone deacetylase [Ajellomyces dermatitidis SLH14081]
  misc_feature: Useful for introducing or modulating the production of volatile compounds
MMDASPASSSLSDLSDPPSSDPPSSPLSVLTRSPSISPRASLSLHQSRLPSPPSSSIYSGSASPAKSSDPAELEIHVNPDGPPPAKRRRVERKPRTTQTVDLTAGYRQSAADDELIDHLTRALRKKKKIVVIAGAGISVSAGIPDFRSSSGLFATLPKEYKLKGSGKDLFDASVYKHDASTSDFHDMVRQLSNLVSNAQPTPFHHFLASLATEGRLLRLYTQNVDGLDTSMDPLGTAVPLPPKGPWPQTIQLHGCLAKMVCSKCHEISQFDASLFEGPQAPLCKGCEETDNVRTSHAGKRSHGIGRLRPRMVLYNEYNPDQESIDNVVRADIRSRPDAVVVVGTTLKIPGVKNMVKDMCKKTRERRDGITMWINLEPEPSGELKNCWDLIVRGKCDDVASLVQLPHFDESIEQGVETIVDDAKYESDVRRVKVEVEIRSTASESGEESGQLSSTEAKLQSIEKVQGFPTPSASPKIRTALPTKPRSKAKQTRISFGGHTASSAPTKASKEPRKTTQSRKKYTKKPESKPKATINTAFKMSKTNIPTSSKTKSNKRPLDLETSSSDEARELYNSDFSLRPRRPKPAQDSFVSQKNTETPIKQELSNPRPCTPELQKRPSFSMHDTTVSPPSKPRGMGSLID

SEQ ID NO: 11770 - DNA, 3557 bp, Muscodor strobelii
  misc_feature: SGI EST ID NO. CUFF.28056.1
  misc_feature: Variant of the nucleotide sequence at SEQ ID NO 11768
ataatccatacagggcaggacaagagccgtgggcgccacgtggacaacaaccttcttgggtgtggaaaagtgacattgaatatgtataaggtgacctgttgactacaagattgcattaacaagctgatgcacatactatatgtacccgtagatcaaatggagtcagagtccagacacaacaagacaaaggaacaaccttattagacattaactgaagactggaaaagagaggggacgacgcatcggttgggagatggaaatgcatactggcaaccttcaatgagtttagcgcaaggaatgaggtagtttatccaggcccgttgctggcgaatgttcttcggtgtccaatcaaatcgtcaagcgtccacttagactcaaactcctttcgcccatgccgcccaagttccgacatcaacaacaccgactacattgcccttttacagcccagcaatgactgtatttcaatctcacgtcacacgcgcgtaactaacaggctcaagaaagaggtagaagaaggagaaggagaagaagagagagggataaggacatctgaagaagcccgtatgccggcgcaatcagacagactcagcagcagcacaatcggccattgtcccgcgcttgcattgttctcgcccaactcgacaccgccctgtatcaacaacccgccgcccacgcctatgcccacgccaacaccatggtttagttcgtctcttctagcgccagcaaattccccattctgccatttctggctcctgtctctggcttctgtgggatcgactcctccctcgaaaaacaccacaaatacacacacgcacacacctacgccgtcgaatcgtctgttcaaggtgctagaggttgcgctcattcgcaacacctcgcaacgcctgacatgatggacgcttctccggcctcgtcatcgctctccgatctttcagatcccccatcctccgacccgccctcgtcgccgctctccgtgctcacgaggtcgccctccatctcgccgcgcgcctctctctccctccaccagagccgcctgccctcgcccccctcgtcctccatctactccggcagcgcgtcgcccgccaagtcctccgacccggccgagctggagatccacgtcaaccccgatggccccccgccagccaagcgccgccgtgtcgagcgcaagcccaggaccacccagaccgtcgatctgaccgccggctaccgccagagcgccgccgatgacgagctgatcgaccacctgacccgcgccctgcgcaaaaagaagaagattgtcgtcatcgccggtgctggcatctctgtatcggctggaattccggacttccgctcctcctcgggcctcttcgcgaccttgcccaaggagtacaagctcaagggctctggcaaagatctcttcgacgcctccgtctacaaacacgacgcctccacctcagacttccacgacatggtccgccagctgtccaacctggtcagcaatgcccagcccactccattccaccactttcttgcctcgctcgccaccgagggccgcttgctgcgactctacacccagaatgtcgacgggctcgacacctccatggaccccctcggcaccgctgttcccctgccccccaagggcccctggcctcaaaccatccagctgcacggctgtctggccaagatggtctgctccaagtgtcacgaaatcagccagttcgacgcctctctgttcgagggcccccaggctccgctgtgcaagggctgcgaggagacagacaatgttcgaacgtcgcacgccggaaagcgcagccacggcattggaagactccgtccgcgcatggtgctctacaatgagtacaaccccgatcaggagtctattgacaacgtggttcgcgccgacatacgctcgcgaccggacgctgtcgtcgtcgtgggcacaactctgaagattcccggcgtcaagaacatggtcaaggacatgtgcaagaaaacgagagagcgacgagacggcatcaccatgtggatcaacctggagcccgaacccagcggcgaactgaagaactgctgggacttgattgtcaggggcaaatgtgacgatgtcgcttcccttgtacagctcccacacttcgatgagagtattgagcagggcgtcgagaccattgtcgacgacgccaagtacgagagtgatgtgcgccgtgtaaaagttgaagttgagatccgcagcactgcttctgagtccggtgaggagtcaggccagctttcctctacagaggcgaaattacagtctatcgagaaagtccagggtttccctactccctctgctagtcccaagatacgcactgctctacccactaagccgagatcgaaagctaagcagactcgcatttccttcggtggtcacacagcttcttctgcgcctaccaaagcctcgaaggaacccaggaagacgacacaaagtaggaagaaatacactaagaagcccgagtcgaagcccaaggctaccatcaacacggcattcaagatgtcgaaaacaaacataccaacatcttcaaagaccaaatctaacaaacgtccgttggacctcgaaactagctctagtgatgaggctagggagctctataacagcgacttttcacttcggcctaggaggccaaaacctgcgcaggacagtttcgtctctcagaaaaatacggagacccccatcaagcaagaactctcaaatccacgcccatgtacccctgagctgcaaaagcggccttcgttctccatgcatgacactaccgtgtcgcccccttcaaaaccacgtggaatgggaagtttaatcgattgattataacgacttccagaagtccttaccacagcgggattaatatcgtgaccagacacactctacggcactaatgtctctccgttgcacatacccagcgcttttcttctgtactgtacatatcaccatactgccatgacatcacaaggcgaccaccaaatatccctcccggcatcaccgagtctgttccaatggatccctttccaatggaatccatggctccgaaacaatagcctacgaacagaatcaccgaattcggaacaaagaccaacctccgcgtacatatctacaaaattcgaggagttcatatatgattatgtttattcttcaaaccccacatggtacttgctagcagagttgaagtgggaattactcttgcttagctgatggttgtgtatatgtcttgaatgggggcagaagagacatttgggcgagtggcaagtacgggaaatctgggttggcttgcttgggttgggtcaggctttagagctgccggtgaaaggagagcaacgaccatacgttctctagtaattagctaaagacatgattcttgggcattagatgtgtctcataaggatcataaagaaacttgtcgatttctcaccattacttgtttgacatgacaaacgaatgtacgagtgaatgtatcacgttgaaatctctttgttcagcacatggcctgtgtaaatagagaccttgttcgtagactatgcatgtactttatgcacattgaatctatcttcaatcc

SEQ ID NO: 11771 - DNA, 2913 bp, Muscodor strobelii
  misc_feature: SGI cDNA ID NO. 563793
  misc_feature: Encodes the peptide sequence at SEQ ID NO 11772
atggctgataatgctatacctcttcttcttgacgattccatgcctggtatcgaacaggccaatatgcacgtcgatctaaacgatgtagacgacctctttggcgacgccgttcccttgacactgcccacgcaggaaccaagcggacgtttgagattcaggctcgatgagatgcgaggccgaggatgctgccaaggtctagcatggtccaagggtggctcaattgcctccatcgcacctgacggacgttccttagaactcaggtatcttcgtgccgatccaaatgatggcacatggggtttgagcgaacccaagcccgtccagctctgggaaaacaatctggccggaggtcccattgtccacctctcatggggtcccgcccctcaaagccatgaacttgctgtcatagatgccgtgggaagggtctgcatgttgagcttcaatgctgatatcaaccgccctaccattctgcgacgatgggatggtgacgttgtggatgatctacatgctgtggtaggcacatactggctgaatccgctcgtatcaaatgcacggttctaccctcattatacaccacacaagagtggaagtggcaacggttatgtttttgaacagtctggtactcccattatgggcccaagccatccgagtgttggtaaatctgcattcatctgcataaccacaaatggtctcctgaagatgttttggacccaaaccaaccataaactcgaggagacaaaactggagttggagagtactacatctgcagacgatctcattacccatgccgcggcctgtgcagacaaaactaagtgtatatatatcgccatggccactgcatctaaacagcttcgtgttgtacaagtatcaataactttcaaatctgaaaatccacagaatacccccccaacagctcaaccgaatcaaccgttatcccctaaccttggaaagaagcatgtggctgtgacaagctggtttcaaacgggtatggccgactcgcctttcgatgcctcaatgacaaaagtatctcatatagagatgttacctaatcacttcaacattcaaaccaaagaattatcgccaatcatcatcctcaccgtccgatcttttatcccaggaccgaactcaccctacgggcatgaggtccaaagcattattgacaggtgggagcttcttaccgagcaaaagcagacaattcatcctgcgttcgagcgacttgctgctaaaagaggtaaaactggaaacacacctccgactgcctcacgattgaagaagctgccttcgacaatcgtcaacaagattgtcatgggcgtcaaggtcctcccttcggcaagaattctcgcattctgctataacgatggcactatagagtacagagatcgtttcacaatgaccgaaatgtatcgagagataaatctcgaacgaatcgattcgattctgcaggctggcttcagtcaagcaggagagccatcatgcttgcaaatggccttctctcctgccggatattcgcttgtacaaatgtatgaagatggccagattaaatggcacaacctggtatacacgttgggcgatccacttacaatctcagacgctaatctgaacgctgttgttgcttcttgtgccgcctcgaccgctgttgcaacggggaataacagtaacattgacgatatcttcgctgttgcaaggaactttaatcacaaagatcagctcgccatgaaatgggtcaccgacttagtgcagataattcgtttcagccttgattactcagacgattcgcctcctcttgagcaactcatgagaaatcagcatttccagctttgcttgaccatcttcaatcacctcggttggaatggagagtttcacacacagcattatcgacgcagaatcgcttcgttagttcttagtatccggaatatcatcattctcattagtctttcaaatagtccacaacccggtagagcatcatccagcccgcttgatgaaccagaagtcgttgatgctctggctggctgcgccaaatggtcaatggattttttgggatggttattcaatcatttgtttgcccttgttgacgacgtgaaattcatgggatttttacaattaaatcaacctcagcagctagtccctatgacacagtacctcctcgccaaaaacgagatcgcactgcatcttattctctgttcctctacacggcttctcatctcctcgttgtgccgcagaataggtcttctagagagttgggccagccgcgcaattgcctggtacatgggccggacagatatcactgacactaactcgcctcgacatgcacttctgcgcgccgcttatcagaaggctcacggatacatttcgtcagcgttaatcgaccctgaagaggtggagaaattgctagccacattatctacagacgtacgtctagcatacagcacagctcttccacaactggcagaaaaggcggcaagaaatcaatccagtcagaaccccaatgccccgaagccggactttgtaaaggaagctcgtcaacattgcgaactgaatctgttcttggttcaaccacctaatagtacaatttttggagccatcgcgaagctgtttcgcagtcacttgccggaattgctgccgcgtgtggacaccgcaaatctacagtttcaaaattatcatatccttgagatcacaaatggccccgaagccatagcatcgaggcggaggaggggaactaggatcgatatgttcaaacgagtcccaatcagtcgcaaagacggtgcagcttggaggcaatgcacccgttgcggcactgtgatggaggatctcgcacacttctctagtaagcccggattagcattcttggctgcacagcaacgaccttgttgttgtggtggtcgttttgctatttcgtctaatgcagcgctgtcttag

SEQ ID NO: 11772 - protein, 970 aa, Muscodor strobelii
  misc_feature: SGI Peptide ID NO. 563793
  misc_feature (22)..(970): NCBI GI: 261355908 Blast Desc: mediator of RNA polymerase II transcription subunit 16 [Verticillium albo-atrum VaMs.102]
  misc_feature (14)..(915): NCBI GI: 171687887 Blast Desc: protein product [Podospora anserina] gi|170943905|emb|CAP69557.1| protein product [Podospora anserina]
  misc_feature (12)..(915): NCBI GI: 85110959 Blast Desc: NCU03058 [Neurospora crassa OR74A] gi|28925426|gb|EAA34474.1| [Neurospora crassa OR74A]
  misc_feature (24)..(963): NCBI GI: 39945210 Blast Desc: MGG_04587 [Magnaporthe grisea 70-15] gi|145021464|gb|EDK05593.1| MGG_04587 [Magnaporthe grisea 70-15]
  misc_feature (21)..(913): NCBI GI: 154318513 Blast Desc: BC1G_03424 [Botryotinia fuckeliana B05.10] gi|150842947|gb|EDN18140.1| BC1G_03424 [Botryotinia fuckeliana B05.10]
  misc_feature (198)..(963): NCBI GI: 46107468 Blast Desc: FG00617.1 [Gibberella zeae PH-1]
  misc_feature (197)..(963): NCBI GI: 256735196 Blast Desc: NECHADRAFT_90069 [Nectria haematococca mpVI 77-13-4]
  misc_feature (21)..(913): NCBI GI: 156052909 Blast Desc: SS1G_06622 [Sclerotinia sclerotiorum 1980] gi|154704400|gb|EDO04139.1| SS1G_06622 [Sclerotinia sclerotiorum 1980]
  misc_feature (279)..(804): NCBI GI: 116180348 Blast Desc: CHGG_00802 [Chaetomium globosum CBS 148.51] gi|88185099|gb|EAQ92567.1| CHGG_00802 [Chaetomium globosum CBS 148.51]
  misc_feature (6)..(915): NCBI GI: 121701891 Blast Desc: ACLA_025000 [Aspergillus clavatus NRRL 1] gi|160012261|sp|A1CQ63.1|MED16_ASPCL RecName: Full=Mediator of RNA polymerase II transcription subunit 16; AltName: complex 16
MADNAIPLLLDDSMPGIEQANMHVDLNDVDDLFGDAVPLTLPTQEPSGRLRFRLDEMRGRGCCQGLAWSKGGSIASIAPDGRSLELRYLRADPNDGTWGLSEPKPVQLWENNLAGGPIVHLSWGPAPQSHELAVIDAVGRVCMLSFNADINRPTILRRWDGDVVDDLHAVVGTYWLNPLVSNARFYPHYTPHKSGSGNGYVFEQSGTPIMGPSHPSVGKSAFICITTNGLLKMFWTQTNHKLEETKLELESTTSADDLITHAAACADKTKCIYIAMATASKQLRVVQVSITFKSENPQNTPPTAQPNQPLSPNLGKKHVAVTSWFQTGMADSPFDASMTKVSHIEMLPNHFNIQTKELSPIIILTVRSFIPGPNSPYGHEVQSIIDRWELLTEQKQTIHPAFERLAAKRGKTGNTPPTASRLKKLPSTIVNKIVMGVKVLPSARILAFCYNDGTIEYRDRFTMTEMYREINLERIDSILQAGFSQAGEPSCLQMAFSPAGYSLVQMYEDGQIKWHNLVYTLGDPLTISDANLNAVVASCAASTAVATGNNSNIDDIFAVARNFNHKDQLAMKWVTDLVQIIRFSLDYSDDSPPLEQLMRNQHFQLCLTIFNHLGWNGEFHTQHYRRRIASLVLSIRNIIILISLSNSPQPGRASSSPLDEPEVVDALAGCAKWSMDFLGWLFNHLFALVDDVKFMGFLQLNQPQQLVPMTQYLLAKNEIALHLILCSSTRLLISSLCRRIGLLESWASRAIAWYMGRTDITDTNSPRHALLRAAYQKAHGYISSALIDPEEVEKLLATLSTDVRLAYSTALPQLAEKAARNQSSQNPNAPKPDFVKEARQHCELNLFLVQPPNSTIFGAIAKLFRSHLPELLPRVDTANLQFQNYHILEITNGPEAIASRRRRGTRIDMFKRVPISRKDGAAWRQCTRCGTVMEDLAHFSSKPGLAFLAAQQRPCCCGGRFAISSNAALS

SEQ ID NO: 11773 - DNA, 3247 bp, Muscodor strobelii
  misc_feature: SGI EST ID NO. CUFF.27921.0
  misc_feature: Variant of the nucleotide sequence at SEQ ID NO 11771
gccgaggatgctgccaaggtctagcatggtccaagggtggctcaattgcctccatcgcacctgacggacgttccttagaactcaggtatcttcgtgccgatccaaatgatggcacatggggtttgagcgaacccaagcccgtccagctctgggaaaacaatctggccggaggtcccattgtccacctctcatggggtcccgcccctcaaagccatgaacttgctgtcatagatgccgtgggaagggtctgcatgttgagcttcaatgctgatatcaaccgccctaccattctgcgacgatgggatggtgacgttgtggatgatctacatgctgtggtaggcacatactggctgaatccgctcgtatcaaatgcacggttctaccctcattatacaccacacaagagtggaagtggcaacggttatgtttttgaacagtctggtactcccattatgggcccaagccatccgagtgttggtaaatctgcattcatctgcataaccacaaatggtctcctgaagatgttttggacccaaaccaaccataaactcgaggagacaaaactggagttggagagtactacatctgcagacgatctcattacccatgccgcggcctgtgcagacaaaactaagtgtatatatatcgccatggccactgcatctaaacagcttcgtgttgtacaagtatcaataactttcaaatctgaaaatccacagaatacccccccaacagctcaaccgaatcaaccgttatcccctaaccttggaaagaagcatgtggctgtgacaagctggtttcaaacgggtatggccgactcgcctttcgatgcctcaatgacaaaagtatctcatatagagatgttacctaatcacttcaacattcaaaccaaagaattatcgccaatcatcatcctcaccgtccgatcttttatcccaggaccgaactcaccctacgggcatgaggtccaaagcattattgacaggtgggagcttcttaccgagcaaaagcagacaattcatcctgcgttcgagcgacttgctgctaaaagaggtaaaactggaaacacacctccgactgcctcacgattgaagaagctgccttcgacaatcgtcaacaagattgtcatgggcgtcaaggtcctcccttcggcaagaattctcgcattctgctataacgatggcactatagagtacagagatcgtttcacaatgaccgaaatgtatcgagagataaatctcgaacgaatcgattcgattctgcaggctggcttcagtcaagcaggagagccatcatgcttgcaaatggccttctctcctgccggatattcgcttgtacaaatgtatgaagatggccagattaaatggcacaacctggtatacacgttgggcgatccacttacaatctcagacgctaatctgaacgctgttgttgcttcttgtgccgcctcgaccgctgttgcaacggggaataacagtaacattgacgatatcttcgctgttgcaaggaactttaatcacaaagatcagctcgccatgaaatgggtcaccgacttagtgcagataattcgtttcagccttgattactcagacgattcgcctcctcttgagcaactcatgagaaatcagcatttccagctttgcttgaccatcttcaatcacctcggttggaatggagagtttcacacacagcattatcgacgcagaatcgcttcgttagttcttagtatccggaatatcatcattctcattagtctttcaaatagtccacaacccggtagagcatcatccagcccgcttgatgaaccagaagtcgttgatgctctggctggctgcgccaaatggtcaatggattttttgggatggttattcaatcatttgtttgcccttgttgacgacgtgaaattcatgggatttttacaattaaatcaacctcagcagctagtccctatgacacagtacctcctcgccaaaaacgagatcgcactgcatcttattctctgttcctctacacggcttctcatctcctcgttgtgccgcagaataggtcttctagagagttgggccagccgcgcaattgcctggtacatgggccggacagatatcactgacactaactcgcctcgacatgcacttctgcgcgccgcttatcagaaggctcacggatacatttcgtcagcgttaatcgaccctgaagaggtggagaaattgctagccacattatctacagacgtacgtctagcatacagcacagctcttccacaactggcagaaaaggcggcaagaaatcaatccagtcagaaccccaatgccccgaagccggactttgtaaaggaagctcgtcaacattgcgaactgaatctgttcttggttcaaccacctaatagtacaatttttggagccatcgcgaagctgtttcgcagtcacttgccggaattgctgccgcgtgtggacaccgcaaatctacagtttcaaaattatcatatccttgagatcacaaatggccccgaagccatagcatcgaggcggaggaggggaactaggatcgatatgttcaaacgagtcccaatcagtcgcaaagacggtgcagcttggaggcaatgcacccgttgcggcactgtgatggaggatctcgcacacttctctagtaagcccggattagcattcttggctgcacagcaacgaccttgttgttgtggtggtcgttttgctatttcgtctaatgcagcgctgtcttaggacgacttgcaagatgatgttgtcattgggattgtgtcccacaagactcatgacggctcacccgaaatggatgagcagcaggaatcagcacagagacggagtgaagatgatgagaagtccgaggagttgacaatcagcttattgataaattggtagctatcttaaggccaaaattcgtagcaaattgccgggcacatgtacattgtattaccgtgcacagcgtacttctatcgagtattgctctcgtgttgtgccgaccttggccaaatactaaagagactatactccatcgacaaaaggtctgactcagatccttgatgttcgtgaaaggttacactgctgatgattgatggatcgttaccgcgagcggcacttgctgacatgcgtattgcctacaagggttatatgtctgcagatttcactggccgctgccaagtgatttttgctgtaacgcatatgtctgagagatcttttgggctcggattcaccgttttgactcgggtctgagg

SEQ ID NO: 11774 - DNA, 1050 bp, Muscodor strobelii
  misc_feature: SGI cDNA ID NO. 563794
  misc_feature: Encodes the peptide sequence at SEQ ID NO 11775
atgcatatcgtcaatgagagactgttcttggctcagaggctctcaggccaaagactatcaatccctgacataaaacctatcatggcacactggccaagtggggagcacgaagactatcagttggtcaaaactgctgttgaaaagagattctcacgagtcccaagcgaagaggcccgaaaagccatcaatgatgccgatccagctcttctagctgcaaggtggtggcctaatgcttcaacaaaagactaccgcatcatgaccgatctcgtgatctggttcggcatgtgggacgatttggtcgagaaactaggcgatgacataacagctgcagagaacctcagaatagccacgaaagactttgtgcggtgttcttttggtcttgcaaatgaggacagtgtattggatcagacaaatccgataatatcgagttttcggcctattgcggaccaagtttgtgctttctatgatatggatcagaggagaacactcttaggtcactttgaccagtatatcgatgctacgaggctagaagaagaagcggaacggagcacaactataccaactctgaaaaagtactgggaggtacggattctgacaagtggaatggggacattacttggactttcagaacttgctgtccaagctcatctaccagtcaactttgtcaaatcggaggcttacagtactctttgggtgacaaccgttgtcatcaactcgatcataaacgacctcctatcgctcaaaaaggaaatgaaagcgaaaagcgttctaagttccgtggcgatcttattccaccaatacggggatctagacacagcagtcgatatgtcccttgatcacgcacgacagctcgtcgagctttttgatcgcacggccgaggacgtgttgtcgaaccccaagcttagtgctaaggacagggacgcgataagcaaaatcgtcgatttgatgaggactgttaatactgggaatttaacttggagtcttcaagcaaagcgatatggcgttgcggagtacattttggagtctggggatattgagttggtgttgtga

SEQ ID NO: 11775 - protein, 349 aa, Muscodor strobelii
  misc_feature: SGI Peptide ID NO. 563794
  misc_feature (10)..(336): NCBI GI: 145247728 Blast Desc: An12g10670 [Aspergillus niger] gi|134080856|emb|CAK41414.1| protein product [Aspergillus niger]
  misc_feature (21)..(337): NCBI GI: 110629309 Blast Desc: cyclase [Hypocrea virens]
  misc_feature (3)..(327): NCBI GI: 121712513 Blast Desc: conserved [Aspergillus clavatus NRRL 1] gi|119402020|gb|EAW12442.1| conserved [Aspergillus clavatus NRRL 1]
  misc_feature (10)..(327): NCBI GI: 46107136 Blast Desc: FG00451.1 [Gibberella zeae PH-1]
  misc_feature (14)..(349): NCBI GI: 256735271 Blast Desc: NECHADRAFT_74943 [Nectria haematococca mpVI 77-13-4]
  misc_feature (10)..(327): NCBI GI: 145601642 Blast Desc: MGG_10516 [Magnaporthe grisea 70-15] gi|145010135|gb|EDJ94791.1| [Magnaporthe grisea 70-15]
  misc_feature (4)..(240): NCBI GI: 169775815 Blast Desc: [Aspergillus oryzae RIB40] gi|238502467|ref|XP_002382467.1| conserved [Aspergillus flavus NRRL3357] gi|83771109|dbj|BAE61241.1| protein product oryzae]
  misc_feature (3)..(209): NCBI GI: 238492925 Blast Desc: conserved [Aspergillus flavus NRRL3357] gi|220696193|gb|EED52535.1| conserved [Aspergillus flavus NRRL3357]
  misc_feature (10)..(349): NCBI GI: 261357544 Blast Desc: conserved [Verticillium albo-atrum VaMs.102]
  misc_feature (10)..(349): NCBI GI: 145613455 Blast Desc: MGG_01628 [Magnaporthe grisea 70-15] gi|145020524|gb|EDK04653.1| MGG_01628 [Magnaporthe grisea 70-15]
  misc_feature (70)..(343): SWISSPROT Homolog: EC 4.2.3.7 Pentalenene synthase
MHIVNERLFLAQRLSGQRLSIPDIKPIMAHWPSGEHEDYQLVKTAVEKRFSRVPSEEARKAINDADPALLAARWWPNASTKDYRIMTDLVIWFGMWDDLVEKLGDDITAAENLRIATKDFVRCSFGLANEDSVLDQTNPIISSFRPIADQVCAFYDMDQRRTLLGHFDQYIDATRLEEEAERSTTIPTLKKYWEVRILTSGMGTLLGLSELAVQAHLPVNFVKSEAYSTLWVTTVVINSIINDLLSLKKEMKAKSVLSSVAILFHQYGDLDTAVDMSLDHARQLVELFDRTAEDVLSNPKLSAKDRDAISKIVDLMRTVNTGNLTWSLQAKRYGVAEYILESGDIELVL

SEQ ID NO: 11776 - DNA, 1088 bp, Muscodor strobelii
  misc_feature: SGI EST ID NO. CUFF.27933.0
  misc_feature: Variant of the nucleotide sequence at SEQ ID NO 11774
cgatttggtcgagaaactaggcgatgacataacagctgcagagaacctcagaatagccacgaaagactttgtgcggtgttcttttggtcttgcaaatgaggacagtgtattggatcagacaaatccgataatatcgagttttcggcctattgcggaccaagtttgtgctttctatgatatggatcagaggagaacactcttaggtcactttgaccagtatatcgatgctacgaggctagaagaagaagcggaacggagcacaactataccaactctgaaaaagtactgggaggtacggattctgacaagtggaatggggacattacttggactttcagaacttgctgtccaagctcatctaccagtcaactttgtcaaatcggaggcttacagtactctttgggtgacaaccgttgtcatcaactcgatcataaacgacctcctatcgctcaaaaaggaaatgaaagcgaaaagcgttctaagttccgtggcgatcttattccaccaatacggggatctagacacagcagtcgatatgtcccttgatcacgcacgacagctcgtcgagctttttgatcgcacggccgaggacgtgttgtcgaaccccaagcttagtgctaaggacagggacgcgataagcaaaatcgtcgatttgatgaggactgttaatactgggaatttaacttggagtcttcaagcaaagcgatatggcgttgcggagtacattttggagtctggggatattgagttggtgttgtgatttggacctgattttttaatgggagttttggtgggctgcattgattttgggcatacgaattccagagcgcggtttgacactgacttggacaagagcatgcacggttctggaaatatattgacaggttgagcttggtgttcggagtatggtgcatatagataagatagagcgaatgtctccccgaaacgataccatacgatctaagcattgatgtacacaaagttatcggagaaaatttgaagttttgcgttaggtggttctttgtcatggggacggccttggtgtaacgatgttggcacgctgtacctccttctgccttcgagtgacg

SEQ ID NO: 11777 - DNA, 969 bp, Muscodor strobelii
  misc_feature: SGI cDNA ID NO. 563795
  misc_feature: Reduced expression when VOC is produced
  misc_feature: Encodes the peptide sequence at SEQ ID NO 11778
atggcacactggccaagtggggagcacgaagactatcagttggtcaaaactgctgttgaaaagagattctcacgagtcccaagcgaagaggcccgaaaagccatcaatgatgccgatccagctcttctagctgcaaggtggtggcctaatgcttcaacaaaagactaccgcatcatgaccgatctcgtgatctggttcggcatgtgggacgatttggtcgagaaactaggcgatgacataacagctgcagagaacctcagaatagccacgaaagactttgtgcggtgttcttttggtcttgcaaatgaggacagtgtattggatcagacaaatccgataatatcgagttttcggcctattgcggaccaagtttgtgctttctatgatatggatcagaggagaacactcttaggtcactttgaccagtatatcgatgctacgaggctagaagaagaagcggaacggagcacaactataccaactctgaaaaagtactgggaggtacggattctgacaagtggaatggggacattacttggactttcagaacttgctgtccaagctcatctaccagtcaactttgtcaaatcggaggcttacagtactctttgggtgacaaccgttgtcatcaactcgatcataaacgacctcctatcgctcaaaaaggaaatgaaagcgaaaagcgttctaagttccgtggcgatcttattccaccaatacggggatctagacacagcagtcgatatgtcccttgatcacgcacgacagctcgtcgagctttttgatcgcacggccgaggacgtgttgtcgaaccccaagcttagtgctaaggacagggacgcgataagcaaaatcgtcgatttgatgaggactgttaatactgggaatttaacttggagtcttcaagcaaagcgatatggcgttgcggagtacattttggagtctggggatattgagttggtgttgtga

SEQ ID NO: 11778 - protein, 322 aa, Muscodor strobelii
  misc_feature: SGI Peptide ID NO. 563795
  misc_feature (11)..(309): NCBI GI: 145247728 Blast Desc: An12g10670 [Aspergillus niger] gi|134080856|emb|CAK41414.1| protein product [Aspergillus niger]
  misc_feature (4)..(310): NCBI GI: 110629309 Blast Desc: cyclase [Hypocrea virens]
  misc_feature (4)..(300): NCBI GI: 121712513 Blast Desc: conserved [Aspergillus clavatus NRRL 1] gi|119402020|gb|EAW12442.1| conserved [Aspergillus clavatus NRRL 1]
  misc_feature (4)..(300): NCBI GI: 46107136 Blast Desc: FG00451.1 [Gibberella zeae PH-1]
  misc_feature (43)..(322): NCBI GI: 256735271 Blast Desc: NECHADRAFT_74943 [Nectria haematococca mpVI 77-13-4]
  misc_feature (1)..(300): NCBI GI: 145601642 Blast Desc: MGG_10516 [Magnaporthe grisea 70-15] gi|145010135|gb|EDJ94791.1| [Magnaporthe grisea 70-15]
  misc_feature (3)..(322): NCBI GI: 261357544 Blast Desc: conserved [Verticillium albo-atrum VaMs.102]
  misc_feature (4)..(213): NCBI GI: 169775815 Blast Desc: [Aspergillus oryzae RIB40] gi|238502467|ref|XP_002382467.1| conserved [Aspergillus flavus NRRL3357] gi|83771109|dbj|BAE61241.1| protein product oryzae]
  misc_feature (70)..(299): NCBI GI: 242779369 Blast Desc: conserved [Talaromyces stipitatus ATCC 10500] gi|218723048|gb|EED22466.1| conserved [Talaromyces stipitatus ATCC 10500]
  misc_feature (4)..(182): NCBI GI: 238492925 Blast Desc: conserved [Aspergillus flavus NRRL3357] gi|220696193|gb|EED52535.1| conserved [Aspergillus flavus NRRL3357]
  misc_feature (43)..(316): SWISSPROT Homolog: EC 4.2.3.7 Pentalenene synthase
  misc_feature: Useful for introducing or modulating the production of volatile compounds
MAHWPSGEHEDYQLVKTAVEKRFSRVPSEEARKAINDADPALLAARWWPNASTKDYRIMTDLVIWFGMWDDLVEKLGDDITAAENLRIATKDFVRCSFGLANEDSVLDQTNPIISSFRPIADQVCAFYDMDQRRTLLGHFDQYIDATRLEEEAERSTTIPTLKKYWEVRILTSGMGTLLGLSELAVQAHLPVNFVKSEAYSTLWVTTVVINSIINDLLSLKKEMKAKSVLSSVAILFHQYGDLDTAVDMSLDHARQLVELFDRTAEDVLSNPKLSAKDRDAISKIVDLMRTVNTGNLTWSLQAKRYGVAEYILESGDIELVL

SEQ ID NO: 11779 - DNA, 1088 bp, Muscodor strobelii; identical to SEQ ID NO: 11776
  misc_feature: SGI EST ID NO. CUFF.27933.0
  misc_feature: Variant of the nucleotide sequence at SEQ ID NO 11777

SEQ ID NO: 11780 - DNA, 1179 bp, Muscodor strobelii
  misc_feature: SGI cDNA ID NO. 563796
  misc_feature: Elevated expression when VOC is produced
  misc_feature: Encodes the peptide sequence at SEQ ID NO 11781
atgcaactgtctgtcctcaaagccgcggccatcgcggcctttcttcaaaccacctcggctgtgccgttcagcactcgaggtgacggcctggaagtagttgatacaacaacaacacctgagggtcaagtgattgactgggttgttccggaatcacagctcagcggcaatatcgccagtccacctccgtctccgcccaagacgaagcgtaccgtccttcctagcgagccgctattgaggaaagtcttagccgaccagggaaagcaaggacctaatggtaccgtcccgatccctcgaacgaacggtgtcaccaaggccaaaaagcggcttccaaccaaagcagaccatgagtcaactgccaaaacagccgccgcccaagatggatatgctggcacgcactggtatgccagctccggccaaaatgtgaacaaccacggtggcaagggtacatttagtctattcaaggcctacactcagagcggcgccgacttctcgctcctgcagacagctgttatccgcaacagcgcggcccacgccggtactggtgctgtcagccagacagtagaggcaggatggatcaactatcctaaccaggtctcagcgcctcatctgttcagctacttcacaaccaacggatacagtgccgatggcgataacgttggcggttggaaccgtgaccatgctggctgggttcagaccgactcgaccatctatcccggcattgcatttgcgccgttgtctgttgacggcggggctcagtacgagctggatatcggttactatctgtaccaaggaaactggtggttgtactgcctcgaccggtacatcggctactatcctggctcgctcttctctcagggcgtcaacgcggccgacactctcgccgaccactccgacatcatcgacttttatggtgagatatacaactctgagactgctatgaccactacagatatgggtagtggcgagtttcccaacacgggtttcggcaagtctgcctacatccacaacatcgaatacatcaactacgacagtgtctatgttccctataatggccaaaaccagctggttattagtgataccagccgctacaatcttctcgctacgtggaactcgggtggtgactggggtagctatttttacttgggcggccctggcgccggtggtcgcattaatgcttag

SEQ ID NO: 11781 - protein, 392 aa, Muscodor strobelii
  misc_feature: SGI Peptide ID NO. 563796
  misc_feature (143)..(346): Pfam Id: PF03080 Pfam Desc: Arabidopsis proteins of function
  misc_feature (2)..(391): NCBI GI: 15238835 Blast Desc: [Arabidopsis thaliana] gi|21537066|gb|AAM61407.1| [Arabidopsis thaliana] gi|109946601|gb|ABG48479.1| At5g18460 [Arabidopsis thaliana] gi|110736745|dbj|BAF00335.1| [Arabidopsis
  misc_feature (33)..(390): NCBI GI: 225430627 Blast Desc: isoform 1 [Vitis vinifera]
  misc_feature (83)..(385): NCBI GI: 242051929 Blast Desc: SORBIDRAFT_03g004510 [Sorghum bicolor] gi|241927085|gb|EES00230.1| SORBIDRAFT_03g004510 [Sorghum bicolor]
  misc_feature (33)..(390): NCBI GI: 225430629 Blast Desc: isoform 2 [Vitis vinifera]
  misc_feature (27)..(385): NCBI GI: 226496771 Blast Desc: LOC100281702 [Zea mays] gi|195615744|gb|ACG29702.1| carboxyl-terminal proteinase [Zea mays]
  misc_feature (33)..(390): NCBI GI: 270241428 Blast Desc: protein product [Vitis vinifera]
  misc_feature (2)..(385): NCBI GI: 255562015 Blast Desc: conserved [Ricinus communis] gi|223538820|gb|EEF40420.1| conserved [Ricinus communis]
  misc_feature (2)..(386): NCBI GI: 224125768 Blast Desc: [Populus trichocarpa] gi|222858046|gb|EEE95593.1| [Populus trichocarpa]
  misc_feature (33)..(390): NCBI GI: 224145866 Blast Desc: [Populus trichocarpa] gi|222862667|gb|EEF00174.1| [Populus trichocarpa]
  misc_feature (33)..(390): NCBI GI: 226496201 Blast Desc: carboxyl-terminal proteinase [Zea mays] gi|194705584|gb|ACF86876.1| [Zea mays] gi|195647704|gb|ACG43320.1| carboxyl-terminal proteinase [Zea
  misc_feature: Useful for introducing or modulating the production of volatile compounds
MQLSVLKAAAIAAFLQTTSAVPFSTRGDGLEVVDTTTTPEGQVIDWVVPESQLSGNIASPPPSPPKTKRTVLPSEPLLRKVLADQGKQGPNGTVPIPRTNGVTKAKKRLPTKADHESTAKTAAAQDGYAGTHWYASSGQNVNNHGGKGTFSLFKAYTQSGADFSLLQTAVIRNSAAHAGTGAVSQTVEAGWINYPNQVSAPHLFSYFTTNGYSADGDNVGGWNRDHAGWVQTDSTIYPGIAFAPLSVDGGAQYELDIGYYLYQGNWWLYCLDRYIGYYPGSLFSQGVNAADTLADHSDIIDFYGEIYNSETAMTTTDMGSGEFPNTGFGKSAYIHNIEYINYDSVYVPYNGQNQLVISDTSRYNLLATWNSGGDWGSYFYLGGPGAGGRINA

SEQ ID NO: 11782 - DNA, 1485 bp, Muscodor strobelii
  misc_feature: SGI cDNA ID NO. 563797
  misc_feature: Encodes the peptide sequence at SEQ ID NO 11783
atgacttcaattgctttagaagagctaacgattgaggaggtgcacataaactatatccggggtgtctacaccgcggaggcattgactgcagcatatcaacaacgcatccaatgcctcgaccgtaatgaggatggccctcatctcaacgcaacagtcgcctggaatccagaagccttgaacgatgcgaagaaactggacgatgcattcaaggcggcgggaaagtttgttggtccgttgcatggcattccgatcatgataaaagaaactgtccaggtgaaggggctggtgacgacttttggctccgctttagctaaagactttatctctgcggaggattcaagtgttgtcaagcgattgagagatgccggggctgtcattctcgctaagacatcaatgccagacttcggcacagattacttctctacgtctaccctcaacggtcgagtgcgcaatccatatgctctagatagagacactggagcatctagtagtggcacagctgctgccgttgccgcgaatttgactgtcgttggtttgggaggcgattctggcggctctatccgtattccggcatctatgtgcaacctagttggtcttcgaccaacggtaggattaatcagcgcatctgggattctttctgggatcttcggtcaggcaacgctcggacctatgacacgcaccgttcgagatgctgcgattatgatggatgctatcattgactttgatttggttgactccaaattgagtgttcaaagtcaaatgaatctacctacaggaggcagctttgccgcgctgctggcctcgcagaagatacctggtctgagattaggagtcatcaggacgttctttggagatgacaacgacacagaacagcacgcggtcaatgaagttgtcaacaaaactttggaagcgctccagtctgccgggtgcgaattagttgatatggacatgcctgacttgaacaatcaactccaatcagccaacgtgatgcttgcacgtgcgaaatccgacctcaacaacttccttataccgacgctaggtataagcattgacgagattgttgaaaaggggaaatttcctaaagaaaatgtgatgctaccctacgtcgccgcacaaggacccatgagcccttacgactctctcgagtatggtcagcaagtcgatatgcgcgagaaattacagttcttcatctcatcagagatacgcaaagcgaacgtttctgcaattgttttcccgacgaacaagctcccggcaccaaagtacagcgatattgatcgggtaatgcgagcatacttccccactaacacgggattagcaagtattttgcgatttcctgccgtgactgttccagtaggcttcactgctacgtcagatctgcctgttggcctagagattgtcggattgccattatgggatcaacgcctgctgaacatagcatatgctgtagagcagcttgtgaagggacgccgtgcaccgaatctatga

SEQ ID NO: 11783 - protein, 494 aa, Muscodor strobelii
  misc_feature: SGI Peptide ID NO. 563797
  misc_feature (27)..(476): Pfam Id: PF01425 Pfam Desc: Amidase
  misc_feature (27)..(325): Pfam Id: PF01425 Pfam Desc: Amidase
  misc_feature (408)..(476): Pfam Id: PF01425 Pfam Desc: Amidase
  misc_feature (1)..(494): NCBI GI: 145236912 Blast Desc: An07g00100 [Aspergillus niger] gi|134075568|emb|CAK39234.1| protein product [Aspergillus niger]
  misc_feature (3)..(493): NCBI GI: 269929389 Blast Desc: Amidase [Sphaerobacter thermophilus DSM 20745] gi|269788746|gb|ACZ40888.1| Amidase [Sphaerobacter thermophilus DSM 20745]
  misc_feature (6)..(494): NCBI GI: 212531007 Blast Desc: amidase family protein, [Penicillium marneffei ATCC 18224] gi|210071024|gb|EEA25113.1| amidase family protein, [Penicillium marneffei ATCC 18224]
  misc_feature (3)..(494): NCBI GI: 118467846 Blast Desc: glutamyl-tRNA(Gln) amidotransferase subunit A [Mycobacterium smegmatis str. MC2 155] gi|118169133|gb|ABK70029.1| glutamyl-tRNA(Gln) amidotransferase A
  misc_feature (4)..(492): NCBI GI: 256722538 Blast Desc: NECHADRAFT_85292 [Nectria haematococca mpVI 77-13-4]
  misc_feature (6)..(492): NCBI GI: 284038224 Blast Desc: Amidase [Spirosoma linguale DSM 74] gi|283817517|gb|ADB39355.1| Amidase [Spirosoma linguale DSM 74]
  misc_feature (8)..(493): NCBI GI: 116695117 Blast Desc: amidase [Ralstonia eutropha H16] gi|113529616|emb|CAJ95963.1| Amidase [Ralstonia eutropha H16]
  misc_feature (8)..(493): NCBI GI: 194291831 Blast Desc: Amidase [Cupriavidus taiwanensis] gi|193225735|emb|CAQ71681.1| Amidase [Cupriavidus taiwanensis]
  misc_feature (6)..(492): NCBI GI: 116623437 Blast Desc: amidase [Solibacter usitatus Ellin6076] gi|116226599|gb|ABJ85308.1| Amidase [Candidatus Solibacter usitatus Ellin6076]
  misc_feature (8)..(492): NCBI GI: 73538967 Blast Desc: amidase [Ralstonia eutropha JMP134] gi|72122304|gb|AAZ64490.1| Amidase [Ralstonia eutropha JMP134]
  misc_feature (37)..(494): SWISSPROT Homolog: EC 3.5.1.4 Amidase
MTSIALEELTIEEVHINYIRGVYTAEALTAAYQQRIQCLDRNEDGPHLNATVAWNPEALNDAKKLDDAFKAAGKFVGPLHGIPIMIKETVQVKGLVTTFGSALAKDFISAEDSSVVKRLRDAGAVILAKTSMPDFGTDYFSTSTLNGRVRNPYALDRDTGASSSGTAAAVAANLTVVGLGGDSGGSIRIPASMCNLVGLRPTVGLISASGILSGIFGQATLGPMTRTVRDAAIMMDAIIDFDLVDSKLSVQSQMNLPTGGSFAALLASQKIPGLRLGVIRTFFGDDNDTEQHAVNEVVNKTLEALQSAGCELVDMDMPDLNNQLQSANVMLARAKSDLNNFLIPTLGISIDEIVEKGKFPKENVMLPYVAAQGPMSPYDSLEYGQQVDMREKLQFFISSEIRKANVSAIVFPTNKLPAPKYSDIDRVMRAYFPTNTGLASILRFPAVTVPVGFTATSDLPVGLEIVGLPLWDQRLLNIAYAVEQLVKGRRAPNL

SEQ ID NO: 11784 - DNA, 1469 bp, Muscodor strobelii
  misc_feature: SGI EST ID NO. CUFF.27943.0
  misc_feature: Variant of the nucleotide sequence at SEQ ID NO 11782
cctcattctccgaaatttttacagccacattacccagtagcaatatgttcttcgtagtttgacgtgaggcaagatgataatcacgctggataacctagttcccgtcttccgccttcagatgcctgatagtacgtgtgtcccggcgtgtttgttactccggcttaattgcgcggtccccagcttcatgtataaagtcgcatcgcccagagcagagcacagcatgggagagagttgagataataaagcagacagaatataatacgtgtctttcaaacatccttcatctctatcagtcaaaatgacttcaattgctttagaagagctaacgattgaggaggtgcacataaactatatccggggtgtctacaccgcggaggcattgactgcagcatatcaacaacgcatccaatgcctcgaccgtaatgaggatggccctcatctcaacgcaacagtcgcctggaatccagaagccttgaacgatgcgaagaaactggacgatgcattcaaggcggcgggaaagtttgttggtccgttgcatggcattccgatcatgataaaagaaactgtccaggtgaaggggctggtgacgacttttggctccgctttagctaaagactttatctctgcggaggattcaagtgttgtcaagcgattgagagatgccggggctgtcattctcgctaagacatcaatgccagacttcggcacagattacttctctacgtctaccctcaacggtcgagtgcgcaatccatatgctctagatagagacactggagcatctagtagtggcacagctgctgccgttgccgcgaatttgactgtcgttggtttgggaggcgattctggcggctctatccgtattccggcatctatgtgcaacctagttggtcttcgaccaacggtaggattaatcagcgcatctgggattctttctgggatcttcggtcaggcaacgctcggacctatgacacgcaccgttcgagatgctgcgattatgatggatgctatcattgactttgatttggttgactccaaattgagtgttcaaagtcaaatgaatctacctacaggaggcagctttgccgcgctgctggcctcgcagaagatacctggtctgagattaggagtcatcaggacgttctttggagatgacaacgacacagaacagcacgcggtcaatgaagttgtcaacaaaactttggaagcgctccagtctgccgggtgcgaattagttgatatggacatgcctgacttgaacaatcaactccaatcagccaacgtgatgcttgcacgtgcgaaatccgacctcaacaacttccttataccgacgctaggtataagcattgacgagattgttgaaaaggggaaatttcctaaagaaaatgtgatgctaccctacgtcgccgcacaaggacccatgagcccttacgactctctcgagtatggtcagcaagtcgatatgcgcg

SEQ ID NO: 11785 - DNA, 801 bp, Muscodor strobelii
  misc_feature: SGI cDNA ID NO. 563798
  misc_feature: Encodes the peptide sequence at SEQ ID NO 11786
atgcgcgatctgaaagttacgatgggttctggacaggggaggcagacctttggcatagaaacggacgaaacagtacttgagaatcttggccaaaatcttgttccgtatgcattcgatgcggaacagatgacacaagttgtatcccatttccagaccgagatatatggcggctttcccagagtgaagcttgcgtatgtcgaaaacgcttacgccgcgtgccaaagagaagactgggccggtaagattcatgggcggcccccgactaaggaagactggaaatccaagaaagacagcctctttcgcttggacattccgtcattacaagtactcttccgcgccgctacaggtgtacatgaaggtaacgacgaggagagacggtattacttaccgatctaccagagaacgctttgcctactagcatgttcaattgttcatgagcttggccactgtttctatggattgttattcggcttatggagtcccggcgatcctcttactcccgaccatgtcgtatggcacgagcctcccacatggaacaatgagtttcaaacaggggttggtgaagccgggcataggctcgaaggagaaattttcgggggcgtattgacagcactatcagacctcaactctgacgactacgccgcaggcgagttgtacctcatcgacgaagacggcttatcacgagaagttgatccaagcttcatcgacgagtttgtcaatcgtagtagtaagaatgcagcggatagtttccgtgtttcgttccaattatcagttggcactcagaatgtaaacaaaggctaa

SEQ ID NO: 11786 - protein, 266 aa, Muscodor strobelii
  misc_feature: SGI Peptide ID NO. 563798
  misc_feature (41)..(228): NCBI GI: 261359519 Blast Desc: conserved [Verticillium albo-atrum VaMs.102]
MRDLKVTMGSGQGRQTFGIETDETVLENLGQNLVPYAFDAEQMTQVVSHFQTEIYGGFPRVKLAYVENAYAACQREDWAGKIHGRPPTKEDWKSKKDSLFRLDIPSLQVLFRAATGVHEGNDEERRYYLPIYQRTLCLLACSIVHELGHCFYGLLFGLWSPGDPLTPDHVVWHEPPTWNNEFQTGVGEAGHRLEGEIFGGVLTALSDLNSDDYAAGELYLIDEDGLSREVDPSFIDEFVNRSSKNAADSFRVSFQLSVGTQNVNKG

SEQ ID NO: 11787 - DNA, 2241 bp, Muscodor strobelii
  misc_feature: SGI cDNA ID NO. 563799
  misc_feature: Encodes the peptide sequence at SEQ ID NO 11788
atgctcgctgctcaacctcgatacaacaacactagggagaagcctgggattatgtgcattactatgcccaagaagccgaccacatcgcccccacgtcgacgcctcactttcaacgtccacggaactgagaccttctcgaccctgaagcgggctctgaaccttgctctgttcattgctcctactcctatctacttacatggcgagggagagggaaatgccggcgggaagaaggaaatctacttgagtgctgcgatcaaggaccccttaagcaaactgttccacaaattatgccgagaggggcacacgctttctcgtaaagactttgagaacttcctagaggttgaacagggcgaggccagtgatcaaattgctacaaggcttacaagagacacatacaactttcaacagttcctcgaaacatggtggctgcaattcgggttcagtatcgagaagccggctttgatcgacgacaaggacctcacgcagcctctcagcaattacttcatcaacagcagccacaatacatacctaacgggacatcaatggaccggcaaagcaacgacagagacctatagacgtgtccttcttcaaggatgcagatgcatcgaaattgacgtctggaacaatgatgtcgccgcatctccacaggcaggatcggcgaagggggtgccgcgatcagagcacacccgccacatttcgacaagcagtctgcacacagcggcagccaatctcaagggggcaatcgacgacaagatcgagcgaggaagacaacgcctgggggtcgagaagcaacacagccatagccctcggtgcagcaagtacgatgcaggggctatatcgccctgtcgcgaagatagatcaaccctcaacgtaccgacggccgagcgttcggacggagatgcatcctcgcttcgatctgtacgatcgaggccaacaataccaagagatgaaccaatcgtcatgcatggctggaccttgaatcagcccattggcctgcggcaagtatgcaaggccattcgcgaagccgctttcgagacctcccacttgcctgtcatcatcagtctagaggtgcatgcggaccaagaacaacaagagagcatggtccagatcatgaaagaggaatgggcagggctgatcatcgatagtccttacgaagcgtgcccgagtggtcaaatgcctagacttgaggatctgaaggacaagatattaatcaaggtcaagaagacagctttaagcaccgaaagtacaacaacgatggcttcgctggcccccggaagtcctttccttgacgacgatgctgcttctgaatccggtgatgatcgactcgcgcctgtcgtagcaaaacgaccgccgccacctaaagtccctatctgcgagaatctgagcaaactgggtgtctatacgcatagcgagcgttttgtcacgttcgactcacccgcagctaagattccttcccatatcttctctattaacgaaaagaggatattggagttatgggaggaccagcgagaggagcttttcgcacacaatcgtaactttctaatgcgagcgtaccccaagggaagccgcatcaattcgacgaaccctgacccttcacaattctggcgtaaaggtgtgcaaatggttgccatgaactggcaagtctgggacgagggcatgatgctcaacaaagccatgttttcaggggagcatggctgggttctgaaaccgccatgttatcgaagcaccgacggagattctatcgagcagactgctgattgtctttcataccgtaatattgacctgattatttcggtcctggctggtcaacatatcccgcttccggaaggcatgccacttaacggatccaggaaactgcgacctttcgttaagtgcgagctgcatgtcgaaaaggccgaagagcgatcagcggctgaaggaagcctaagactcgcattgcgtacagatgtatacaaaaagcagacaggcagtggagagtcgaatcatcctgtattcaatcccgaaagccgagacgtctatttcagggatgttcatcgcgttgttgagcaattgagctttgtcagattcagagtcgagcaccgggcagcaacctccctcaccagcgacttttcgtcctgggcatgtatccgtctcgatcgtctcaggactggtcatcgattaatccctctcgtgggcccagatggcaatgaaacggatggcgagctgcttgtgaaagtcttcaagagttatcgccgatcctga

SEQ ID NO: 11788 - protein, 746 aa, Muscodor strobelii
  misc_feature: SGI Peptide ID NO. 563799
  misc_feature (160)..(408): Pfam Id: PF00388 Pfam Desc: Phosphatidylinositol-specific phospholipase C, X domain
  misc_feature (460)..(574): Pfam Id: PF00387 Pfam Desc: Phosphatidylinositol-specific phospholipase C, Y domain
  misc_feature (160)..(210): Pfam Id: PF00388 Pfam Desc: Phosphatidylinositol-specific phospholipase C, X domain
  misc_feature (314)..(408): Pfam Id: PF00388 Pfam Desc: Phosphatidylinositol-specific phospholipase C, X domain
  misc_feature (73)..(743): NCBI GI: 256734013 Blast Desc: NECHADRAFT_36534 [Nectria haematococca mpVI 77-13-4]
  misc_feature (77)..(689): NCBI GI: 156059072 Blast Desc: SS1G_03548 [Sclerotinia sclerotiorum 1980] gi|154701335|gb|EDO01074.1| SS1G_03548 [Sclerotinia sclerotiorum 1980]
  misc_feature (78)..(742): NCBI GI: 46128977 Blast Desc: FG08790.1 [Gibberella zeae PH-1]
  misc_feature (77)..(688): NCBI GI: 261353122 Blast Desc: 1-phosphatidylinositol-4,5-bisphosphate phosphodiesterase [Verticillium albo-atrum VaMs.102]
  misc_feature (317)..(741): NCBI GI: 154290787 Blast Desc: BC1G_15592 [Botryotinia fuckeliana B05.10] gi|150847429|gb|EDN22622.1| BC1G_15592 [Botryotinia fuckeliana B05.10]
  misc_feature (103)..(741): NCBI GI: 116193471 Blast Desc: CHGG_06453 [Chaetomium globosum CBS 148.51] gi|88182366|gb|EAQ89834.1| CHGG_06453 [Chaetomium globosum CBS 148.51]
  misc_feature (18)..(744): NCBI GI: 145610149 Blast Desc: MGG_02682 [Magnaporthe grisea 70-15] gi|145017516|gb|EDK01879.1| MGG_02682 [Magnaporthe grisea 70-15]
  misc_feature (36)..(744): NCBI GI: 149209867 Blast Desc: MGCH7_ch7g415 [Magnaporthe grisea 70-15] gi|86196370|gb|EAQ71008.1| MGCH7_ch7g415 [Magnaporthe grisea 70-15]
  misc_feature (73)..(741): NCBI GI: 46124631 Blast Desc: FG06693.1 [Gibberella zeae PH-1]
  misc_feature (109)..(741): NCBI GI: 240273540 Blast Desc: phospholipase C [Ajellomyces capsulatus H143]
  misc_feature (318)..(741): SWISSPROT Homolog: EC 3.1.4.11 Phosphoinositide phospholipase C
MLAAQPRYNNTREKPGIMCITMPKKPTTSPPRRRLTFNVHGTETFSTLKRALNLALFIAPTPIYLHGEGEGNAGGKKEIYLSAAIKDPLSKLFHKLCREGHTLSRKDFENFLEVEQGEASDQIATRLTRDTYNFQQFLETWWLQFGFSIEKPALIDDKDLTQPLSNYFINSSHNTYLTGHQWTGKATTETYRRVLLQGCRCIEIDVWNNDVAASPQAGSAKGVPRSEHTRHISTSSLHTAAANLKGAIDDKIERGRQRLGVEKQHSHSPRCSKYDAGAISPCREDRSTLNVPTAERSDGDASSLRSVRSRPTIPRDEPIVMHGWTLNQPIGLRQVCKAIREAAFETSHLPVIISLEVHADQEQQESMVQIMKEEWAGLIIDSPYEACPSGQMPRLEDLKDKILIKVKKTALSTESTTTMASLAPGSPFLDDDAASESGDDRLAPVVAKRPPPPKVPICENLSKLGVYTHSERFVTFDSPAAKIPSHIFSINEKRILELWEDQREELFAHNRNFLMRAYPKGSRINSTNPDPSQFWRKGVQMVAMNWQVWDEGMMLNKAMFSGEHGWVLKPPCYRSTDGDSIEQTADCLSYRNIDLIISVLAGQHIPLPEGMPLNGSRKLRPFVKCELHVEKAEERSAAEGSLRLALRTDVYKKQTGSGESNHPVFNPESRDVYFRDVHRVVEQLSFVRFRVEHRAATSLTSDFSSWACIRLDRLRTGHRLIPLVGPDGNETDGELLVKVFKSYRRS

SEQ ID NO: 11789 - DNA, 3508 bp, Muscodor strobelii
  misc_feature: SGI EST ID NO. CUFF.28195.1
  misc_feature: Variant of the nucleotide sequence at SEQ ID NO 11787
cgggcctatttcctcaagccactacagccctacccagcatcgaggagagagggtagtggcttggctcaccaccattcggctcggcctggcccttgttggaatactgggactaggggtgagtcgagcgagtatccatctcaccgggtggcccgttcaggcccatcgagctgggatctaccaatgaggctgctggccccagctgaacctccctgcaagtgtttgttggctgcacatcatagcgctcatctacctgacgtcctgtctctcgaccccatcagcccggttcgtctgattcttgcactttcacttgcaacttgccgtctttcgaattgcacgttctcctgttctactcgtacctgcgttcacctcggcctcagtgacacgtctctggtctcactggcaacggaggacagcctcgcgtgacacgtcaaccccgtcgaccgtcaccctcttattatgtcagccgaatgacaatagcgccctcaaaatcgtgctctgcgggagcgcgaatcgcttaccatgctcgctgctcaacctcgatacaacaacactagggagaagcctgggattatgtgcattactatgcccaagaagccgaccacatcgcccccacgtcgacgcctcactttcaacgtccacggaactgagaccttctcgaccctgaagcgggctctgaaccttgctctgttcattgctcctactcctatctacttacatggcgagggagagggaaatgccggcgggaagaaggaaatctacttgagtgctgcgatcaaggaccccttaagcaaactgttccacaaattatgccgagaggggcacacgctttctcgtaaagactttgagaacttcctagaggttgaacagggcgaggccagtgatcaaattgctacaaggcttacaagagacacatacaactttcaacagttcctcgaaacatggtggctgcaattcgggttcagtatcgagaagccggctttgatcgacgacaaggacctcacgcagcctctcagcaattacttcatcaacagcagccacaatacatacctaacgggacatcaatggaccggcaaagcaacgacagagacctatagacgtgtccttcttcaaggatgcagatgcatcgaaattgacgtctggaacaatgatgtcgccgcatctccacaggcaggatcggcgaagggggtgccgcgatcagagcacacccgccacatttcgacaagcagtctgcacacagcggcagccaatctcaagggggcaatcgacgacaagatcgagcgaggaagacaacgcctgggggtcgagaagcaacacagccatagccctcggtgcagcaagtacgatgcaggggctatatcgccctgtcgcgaagatagatcaaccctcaacgtaccgacggccgagcgttcggacggagatgcatcctcgcttcgatctgtacgatcgaggccaacaataccaagagatgaaccaatcgtcatgcatggctggaccttgaatcagcccattggcctgcggcaagtatgcaaggccattcgcgaagccgctttcgagacctcccacttgcctgtcatcatcagtctagaggtgcatgcggaccaagaacaacaagagagcatggtccagatcatgaaagaggaatgggcagggctgatcatcgatagtccttacgaagcgtgcccgagtggtcaaatgcctagacttgaggatctgaaggacaagatattaatcaaggtcaagaagacagctttaagcaccgaaagtacaacaacgatggcttcgctggcccccggaagtcctttccttgacgacgatgctgcttctgaatccggtgatgatcgactcgcgcctgtcgtagcaaaacgaccgccgccacctaaagtccctatctgcgagaatctgagcaaactgggtgtctatacgcatagcgagcgttttgtcacgttcgactcacccgcagctaagattccttcccatatcttctctattaacgaaaagaggatattggagttatgggaggaccagcgagaggagcttttcgcacacaatcgtaactttctaatgcgagcgtaccccaagggaagccgcatcaattcgacgaaccctgacccttcacaattctggcgtaaaggtgtgcaaatggttgccatgaactggcaagtctgggacgagggcatgatgctcaacaaagccatgttttcaggggagcatggctgggttctgaaaccgccatgttatcgaagcaccgacggagattctatcgagcagactgctgattgtctttcataccgtaatattgacctgattatttcggtcctggctggtcaacatatcccgcttccggaaggcatgccacttaacggatccaggaaactgcgacctttcgttaagtgcgagctgcatgtcgaaaaggccgaagagcgatcagcggctgaaggaagcctaagactcgcattgcgtacagatgtatacaaaaagcagacaggcagtggagagtcgaatcatcctgtattcaatcccgaaagccgagacgtctatttcagggatgttcatcgcgttgttgagcaattgagctttgtcagattcagagtcgagcaccgggcagcaacctccctcaccagcgacttttcgtcctgggcatgtatccgtctcgatcgtctcaggactggtcatcgattaatccctctcgtgggcccagatggcaatgaaacggatggcgagctgcttgtgaaagtcttcaagagttatcgccgatcctgaccatctgcggttatcctcgaacgacgtgcttgatgaggagataaaacaatctgtgccggcacatttctttcgccacggcctggcgtctattggtctttattttgtggcaactgatagatcatctcttcgacattctcttcccgtccttcctttgcattcacgaaaacggattttggcgaaacaaaaactgggacaacccgcgccatgcgccatattcatctacttgtcatcaatgcattccattggatttgattttctagatctccatcacgccactttggccggcagcacggtagaccacagcatgacacagcacggcatacagaaattcatctttcagcactttcttatgttgggcactagccaggagttttgagtaggagcatggattaggtccggatacccgaagacggcaataaactgccgcatgcatattttggagttttgtgttctactggctttcgccccgaaatcgactgggaattggaatgaagatcatgattaatgccaaatcagtggccttgcctatttacttaggttagcgaggcactctgggcatatgttttgcggtagtctttgagcagacacttgaggtacagtctacactagaggtgtcgtggtacagagaaaattgataacagtggatgaaacaactttgtgtcatctatttgtggcttgctgttgcatggctttcccccctttgagtgtagcccctttctattgctgggatccattgactcgatagtca

SEQ ID NO: 11790 - DNA, 291 bp, Muscodor strobelii
  misc_feature: SGI cDNA ID NO. 563800
  misc_feature: Elevated expression when VOC is produced
  misc_feature: Encodes the peptide sequence at SEQ ID NO 11791
atgccatcaactcttaagacgcataaagactacgaggccgaagtgcgctcgtggggatttactaaggtcttcacgtggacagacggaccaaattaccactataccccgcatcgccatgatgaagtgacaacgcatctgatcactcatggcgagatgacaatcacctttcctgaagattcaaagcccaccaaaacgacctattcggttggtgaacgcattgatgtcgaagctcgtcgcttgcacgaggtttggattggtgccaatggctgcacaatggtcattggcgagtag

SEQ ID NO: 11791 - protein, 96 aa, Muscodor strobelii
  misc_feature: SGI Peptide ID NO. 563800
  misc_feature (7)..(96): NCBI GI: 149209867 Blast Desc: MGCH7_ch7g415 [Magnaporthe grisea 70-15] gi|86196370|gb|EAQ71008.1| MGCH7_ch7g415 [Magnaporthe grisea 70-15]
  misc_feature (7)..(96): NCBI GI: 145610145 Blast Desc: [Magnaporthe grisea 70-15] gi|145017514|gb|EDK01877.1| [Magnaporthe grisea 70-15]
  misc_feature (12)..(96): NCBI GI: 261353121 Blast Desc: conserved [Verticillium albo-atrum VaMs.102]
  misc_feature (6)..(96): NCBI GI: 169602225 Blast Desc: SNOG_04108 [Phaeosphaeria nodorum SN15] gi|111066748|gb|EAT87868.1| SNOG_04108 [Phaeosphaeria nodorum SN15]
  misc_feature (5)..(96): NCBI GI: 189203785 Blast Desc: conserved [Pyrenophora tritici-repentis Pt-1C-BFP] gi|187985327|gb|EDU50815.1| conserved [Pyrenophora tritici-repentis Pt-1C-BFP]
  misc_feature (4)..(95): NCBI GI: 156059076 Blast Desc: [Sclerotinia sclerotiorum 1980] gi|154701337|gb|EDO01076.1| [Sclerotinia sclerotiorum 1980]
  misc_feature (5)..(96): NCBI GI: 119492608 Blast Desc: NFIA_069220 [Neosartorya fischeri NRRL 181] gi|119411808|gb|EAW21751.1| NFIA_069220 [Neosartorya fischeri NRRL 181]
  misc_feature (5)..(96): NCBI GI: 146323347 Blast Desc: conserved [Aspergillus fumigatus Af293] gi|129558335|gb|EBA27473.1| conserved [Aspergillus fumigatus Af293]
  misc_feature (5)..(96): NCBI GI: 169767884 Blast Desc: [Aspergillus oryzae RIB40] gi|238484801|ref|XP_002373639.1| conserved [Aspergillus flavus NRRL3357] gi|83766268|dbj|BAE56411.1| protein product oryzae]
  misc_feature (5)..(96): NCBI GI: 242822780 Blast Desc: conserved [Talaromyces stipitatus ATCC 10500] gi|218712878|gb|EED12303.1| conserved [Talaromyces stipitatus ATCC 10500]
  misc_feature: Useful for introducing or modulating the production of volatile compounds
MPSTLKTHKDYEAEVRSWGFTKVFTWTDGPNYHYTPHRHDEVTTHLITHGEMTITFPEDSKPTKTTYSVGERIDVEARRLHEVWIGANGCTMVIGE

SEQ ID NO: 11792 - DNA, 869 bp, Muscodor strobelii
  misc_feature: SGI EST ID NO. CUFF.27992.1
  misc_feature: Variant of the nucleotide sequence at SEQ ID NO 11790
cctgagtgtctcacttatccacgttgaccacgttccccaaatccctaggtaattgaacaaggcaacctcaggcatctgcctgcgcctccactgcctattgccaatttcctatctcgtcgtaaaacgccagctcaaccgcactttactgactcagctcacaaccttacaccatgccatcaactcttaagacgcataaagactacgaggccgaagtgcgctcgtggggatttactaaggtcttcacgtggacagacggaccaaattaccactataccccgcatcgccatgatgaagtgacaacgcatctgatcactcatggcgagatgacaatcacctttcctgaagattcaaagcccaccaaaacgacctattcggttggtgaacgcattgatgtcgaagctcgtcgcttgcacgaggtttggattggtgccaatggctgcacaatggtcattggcgagtagggtagccgtcgccaacgtgacccgtgcgcaagccgcgagaaaggctccagaaaagacttcagaattctttccaagatatagcaatgtcgtaatcctcctgtgggatgcggaggagtatgagatggagataccgcttatgttatttcacttgttgaattcatcgatactacttagcaaaataagtcttgtagggtacctgtaatccgtagatatttgtactaggtcacttataagttggatagcgctcagcgcaattcgattttgaaggggaattggtatatttggtatacacattttgatttaaagcgagtccaaactcatgttgtgatctgctccatctctacgtttgtattacgacatactgaattgtgcagcgaagcacaatgctcgtttgctcttgctccgtac

SEQ ID NO: 11793 - DNA, 825 bp, Muscodor strobelii
  misc_feature: SGI cDNA ID NO. 563801
  misc_feature: Encodes the peptide sequence at SEQ ID NO 11794
atggagggacagccacggaacccacctcaggcacgatccaaaatgaactatgcatgtgaagcctgtcgtgcagctaaaacgaaatgccaacctggaccgcagactggcatctgcaagcgatgttccgagttcaaaagggaatgcatcttccgtacaggtcctcggacccgaagacctaaaaatacgcggctagacgctgccgagtctgcagctcttccacctccgccaggtcctagtaagaccttcagcattgacttcgatatgccaggaatggaagaaccaattgacgacttcgaggaactccgaaggcagcacgagttccatctcaaaaatcttgtccttgacgacgacgagtatgataggatttccgatcaaggcagcgaagaccgaccagcacgggcatcagagaataagccgtttgacttcagtgacatgaccacttcaccctcactctccagatctgagacgagctcactctggaatgaatccacaggctcatctaagcgatcaaaactcgttcacgatatgagcatcaagcctcgtttcaatctagatagtgcttcaaggctgcttcctttattccagaacatgttgccccatgtccccttcatggtgcttccggcaaattctgatgtgagaaaactcgcccggacgcaaccctttgtgctattagccattcttgccactacgagctcttcgagcagccttcagggttacagtctttacgatgaggagtttcgcaaggtcctcgggctcaagttcgtggctggcgccgagcgatcggtagaattgctccagggactgctcatatactgttgctggtaa

SEQ ID NO: 11794 - protein, 274 aa, Muscodor strobelii
  misc_feature: SGI Peptide ID NO. 563801
  misc_feature (7)..(274): NCBI GI: 39971177 Blast Desc: MGG_03055 [Magnaporthe grisea 70-15] gi|145017096|gb|EDK01459.1| MGG_03055 [Magnaporthe grisea 70-15]
  misc_feature (7)..(274): NCBI GI: 149210755 Blast Desc: MGCH7_ch7g850 [Magnaporthe grisea 70-15] gi|86196805|gb|EAQ71443.1| MGCH7_ch7g850 [Magnaporthe grisea 70-15]
  misc_feature (4)..(274): NCBI GI: 116193041 Blast Desc: CHGG_06238 [Chaetomium globosum CBS 148.51] gi|88182151|gb|EAQ89619.1| CHGG_06238 [Chaetomium globosum CBS 148.51]
  misc_feature (37)..(274): NCBI GI: 256723564 Blast Desc: NECHADRAFT_81093 [Nectria haematococca mpVI 77-13-4]
  misc_feature (80)..(274): NCBI GI: 256733664 Blast Desc: NECHADRAFT_35531 [Nectria haematococca mpVI 77-13-4]
  misc_feature (79)..(274): NCBI GI: 46129260 Blast Desc: FG08815.1 [Gibberella zeae PH-1]
  misc_feature (41)..(274): NCBI GI: 171683981 Blast Desc: protein product [Podospora anserina] gi|170941951|emb|CAP67603.1| protein product [Podospora anserina]
  misc_feature (176)..(272): NCBI GI: 85114575 Blast Desc: NCU00558 [Neurospora crassa OR74A] gi|28926511|gb|EAA35483.1| NCU00558 [Neurospora crassa OR74A]
  misc_feature (4)..(270): NCBI GI: 212540346 Blast Desc: C6 finger domain protein, [Penicillium marneffei ATCC 18224] gi|210067627|gb|EEA21719.1| C6 finger domain protein, [Penicillium marneffei ATCC 18224]
  misc_feature (18)..(274): NCBI GI: 255935503 Blast Desc: Pc13g03410 [Penicillium chrysogenum Wisconsin 54-1255] gi|211583398|emb|CAP91410.1| Pc13g03410 [Penicillium chrysogenum Wisconsin 54-1255]
MEGQPRNPPQARSKMNYACEACRAAKTKCQPGPQTGICKRCSEFKRECIFRTGPRTRRPKNTRLDAAESAALPPPPGPSKTFSIDFDMPGMEEPIDDFEELRRQHEFHLKNLVLDDDEYDRISDQGSEDRPARASENKPFDFSDMTTSPSLSRSETSSLWNESTGSSKRSKLVHDMSIKPRFNLDSASRLLPLFQNMLPHVPFMVLPANSDVRKLARTQPFVLLAILATTSSSSSLQGYSLYDEEFRKVLGLKFVAGAERSVELLQGLLIYCCW

SEQ ID NO: 11795 - DNA, 3108 bp, Muscodor strobelii
  misc_feature: SGI EST ID NO. CUFF.28062.0
  misc_feature: Variant of the nucleotide sequence at SEQ ID NO 11793
attttctagccctctttacttctaaagcgaaaatcgagccacctctgtgtgcagctgctctaatctacctataagggtaatgctacacactaaccatcaacttttattggatcaatctcccatatgaccgtgaagtctttgaccaccaccgtgtgagaggcgcccggcccctcaaccaaagacccgttagacagagcgcgggaagcgccgaaagctatcatcctttatttcctcctctcttttccaacggattcgtccgcatttgcaaggtcttcggttcacatcaagaatggagggacagccacggaacccacctcaggcacgatccaaaatgaactatgcatgtgaagcctgtcgtgcagctaaaacgaaatgccaacctggaccgcagactggcatctgcaagcgatgttccgagttcaaaagggaatgcatcttccgtacaggtcctcggacccgaagacctaaaaatacgcggctagacgctgccgagtctgcagctcttccacctccgccaggtcctagtaagaccttcagcattgacttcgatatgccaggaatggaagaaccaattgacgacttcgaggaactccgaaggcagcacgagttccatctcaaaaatcttgtccttgacgacgacgagtatgataggatttccgatcaaggcagcgaagaccgaccagcacgggcatcagagaataagccgtttgacttcagtgacatgaccacttcaccctcactctccagatctgagacgagctcactctggaatgaatccacaggctcatctaagcgatcaaaactcgttcacgatatgagcatcaagcctcgtttcaatctagatagtgcttcaaggctgcttcctttattccagaacatgttgccccatgtccccttcatggtgcttccggcaaattctgatgtgagaaaactcgcccggacgcaaccctttgtgctattagccattcttgccactacgagctcttcgagcagccttcagggttacagtctttacgatgaggagtttcgcaaggtcctcgggctcaagttcgtggctggcgccgagcgatcggtagaattgctccagggactgctcatatactgttgctggtatccttttcacctacgaccgaaaaataagcagttattccaatatctcagaatgtgcgtggatattgtccacgatcttgagctagatgaagaaagtagcctcgatctatcttcaatgtccccggagcgtcaagctcgccgtcttgacgaaatacgcggcctgctagggtgtttctatgcgatatcaacattttcatcaatatggaggcaaaacaccatgctaagatatacaccacaaattgcgcgatgcgctgatgcactggagcaacataccgacctgcagcaagaccaccaccttgtctggctcgcgcgcatccaatacgtgtattccgaaatcaatgaagcacgccgaaacttcgatttggggctacgagatcagcaaagtgagatgcaacgtgatatgattcgtgctggtctcgagtcgcagttccacgacttcgagacacgaatggtcgagaagtgtatttcatccccgagtatcaccctcgccacactaatgacgcatgcatatattctcgccccctcgctcttccgctcctgccggccatcggcaaaggagacttgcgaacctacgcgcaacgagtgcctgctccttgctgctcacaaagtccgcgcattcttcgagttcatcgccgctctcccgtcagaggaactgtccggttttgcaggcgccgacttcggtcgagttatactagcagtcatcatagggtatcgactctctttcccactgtcacgcttgtgccatgattatgatgtggcacagggaaggaagatcgttggtttcgcggccattctaaatcgactttgcgagcctgatgccgagtctgtcgccgatgtaggagtgaaaagcaagggaaacgagccggaaagcgagagcggcaaacatgcaaagaaaactgacgctgttactgccttcaaaatcgtgcttcgatctgtcaaagataagttcgaggagaaaagcaaatctgtggagcacatagcgatgatgagcgcggagacattcacaactgcagaaagacggagcttgtgtcccatgcttaacgggaatatgcaggagtatatcccactatgggctggtcagcaaagggatgctatgaccggttcttatgcgacaagccaaacgagtagctcgggtttacttacaggcccggtgtccggacagatgatagaccttgggccggacttcgctggccccgtggagccattgatagacataggaagcctcacggaccggccgatagtgtacaatgacctctggtctacaatgacgatgggctggggcgcgggtgacataggggacgttaatatagacgatatcgatactacgggtgtattcggagactcattgggtgtttgatggatatcaaattgggtatattgttgctttgtgccgaaaaatgagacaccgtgtccacttcaaaattacatattgttaggtagcttgtacaacgcaagatcgtcttccctccgccaccactgctatcaagcgcttctgattatgcgtttctcagttcgcaggtttttgggcatatatatggactctgcgatgagtgttagctttcctatttagtctcgtaccaaatctggcgatgatgacaagctatcaaaagcccatcgccatcctgcagcattcccacccaagaagaaaatatcaactcacccctcggagaaagaacgaatcctcgtatccaccacatccctcctaacatcttctagcaaatctaaaactctctgctgctcccatcccaacaccctcgtaaaaagcgccatcgtcattggctcgagcataagcagaatatcctgttgaaacaataagctccactccttattcctcgtccccttcacccagggattgagcgcaactgcttctctcctctcgcagatattcgtgaaaccgatctctcctagcattgtgctgtatttcgccgccatgccccaatctcgtcctgccatggcagaggcaaccatgattttctcgccccaatccttcaaggcaca

SEQ ID NO: 11796 - DNA, 1068 bp, Muscodor strobelii
  misc_feature: SGI cDNA ID NO. 563802
  misc_feature: Encodes the peptide sequence at SEQ ID NO 11797
atgacgtggaacaaacgtgacggatgtcgtaggttggcatcggggggcgcggccgtcgggtacgagacgactacgaggaatatgacacagcatatagatctaggcgattcgcaggatctgctggagattgataatgaatgggaccgcgactctgccatcggcatttatagcgactcaacaagaacattgaatagtagtatatatgaccatgttgtggaaaatgggcgaacatatcatcgatttaaggaaggtaaatacatgctacccaacgacgagaaagagcagaaacgactcgaataccagcatgagctatacgtcgccatcgcgaacgggaagctgagcatcattccgaatgtcgaaagagttaggaatgtgttagacattggcacaggaacgggaatctgggctatcgagtttgggctcgaaaaccccggtgcgcttgttactggcatagatctcagtcctatacagccaacctacgtaccaccgaacgtagccttcgagatcaacgacgcagaagacgaatggagcttcagcacgcccttcgatctgatccacatgcgcgcgatgataacctgcttcaaatcaccaaaacatgtcttgcgagaagcataccgaaatctaacacctggaggctacatcgagattcgggagcctattctgcccttccatttcctgactcctcccccagagccctgtgccttgaaggattggggcgagaaaatcatggttgcctctgccatggcaggacgagattggggcatggcggcgaaatacagcacaatgctaggagagatcggtttcacgaatatctgcgagaggagagaagcagttgcgctcaatccctgggtgaaggggacgaggaataaggagtggagcttattgtttcaacaggatattctgcttatgctcgagccaatgacgatggcgctttttacgagggtgttgggatgggagcagcagagagttttagatttgctagaagatgttaggagggatgtggtggatacgaggattcgttctttctccgagggagtccatatatatgcccaaaaacctgcgaactga

SEQ ID NO: 11797 - protein, 355 aa, Muscodor strobelii
  misc_feature: SGI Peptide ID NO. 563802
  misc_feature (126)..(216): Pfam Id: PF08241 Pfam Desc: Methyltransferase domain
  misc_feature (126)..(214): Pfam Id: PF08242 Pfam Desc: Methyltransferase domain
  misc_feature (46)..(353): NCBI GI: 149210753 Blast Desc: MGCH7_ch7g849 [Magnaporthe grisea 70-15] gi|86196804|gb|EAQ71442.1| MGCH7_ch7g849 [Magnaporthe grisea 70-15]
  misc_feature (56)..(354): NCBI GI: 156053960 Blast Desc: SS1G_05828 [Sclerotinia sclerotiorum 1980] gi|154703608|gb|EDO03347.1| SS1G_05828 [Sclerotinia sclerotiorum 1980]
  misc_feature (39)..(339): NCBI GI: 154321477 Blast Desc: BC1G_01613 [Botryotinia fuckeliana B05.10] gi|150852151|gb|EDN27343.1| BC1G_01613 [Botryotinia fuckeliana B05.10]
  misc_feature (47)..(355): NCBI GI: 119191406 Blast Desc: CIMG_00080 [Coccidioides immitis RS]
  misc_feature (83)..(353): NCBI GI: 154321620 Blast Desc: BC1G_00957 [Botryotinia fuckeliana B05.10] gi|150850204|gb|EDN25397.1| BC1G_00957 [Botryotinia fuckeliana B05.10]
  misc_feature (48)..(342): NCBI GI: 154275878 Blast Desc: [Ajellomyces capsulatus NAm1] gi|150413857|gb|EDN09222.1| [Ajellomyces capsulatus NAm1]
  misc_feature (47)..(355): NCBI GI: 240106488 Blast Desc: methyltransferase, [Coccidioides posadasii C735 delta SOWgp]
  misc_feature (36)..(353): NCBI GI: 156056286 Blast Desc: SS1G_05495 [Sclerotinia sclerotiorum 1980] gi|154703279|gb|EDO03018.1| SS1G_05495 [Sclerotinia sclerotiorum 1980]
  misc_feature (48)..(353): NCBI GI: 256723471 Blast Desc: NECHADRAFT_81086 [Nectria haematococca mpVI 77-13-4]
  misc_feature (48)..(353): NCBI GI: 256729457 Blast Desc: NECHADRAFT_63067 [Nectria haematococca mpVI 77-13-4]
MTWNKRDGCRRLASGGAAVGYETTTRNMTQHIDLGDSQDLLEIDNEWDRDSAIGIYSDSTRTLNSSIYDHVVENGRTYHRFKEGKYMLPNDEKEQKRLEYQHELYVAIANGKLSIIPNVERVRNVLDIGTGTGIWAIEFGLENPGALVTGIDLSPIQPTYVPPNVAFEINDAEDEWSFSTPFDLIHMRAMITCFKSPKHVLREAYRNLTPGGYIEIREPILPFHFLTPPPEPCALKDWGEKIMVASAMAGRDWGMAAKYSTMLGEIGFTNICERREAVALNPWVKGTRNKEWSLLFQQDILLMLEPMTMALFTRVLGWEQQRVLDLLEDVRRDVVDTRIRSFSEGVHIYAQKPAN

SEQ ID NO: 11798 - DNA, 1978 bp, Muscodor strobelii
  misc_feature: SGI EST ID NO. CUFF.28063.2
  misc_feature: Variant of the nucleotide sequence at SEQ ID NO 11796
tgtgccttgaaggattggggcgagaaaatcatggttgcctctgccatggcaggacgagattggggcatggcggcgaaatacagcacaatgctaggagagatcggtttcacgaatatctgcgagaggagagaagcagttgcgctcaatccctgggtgaaggggacgaggaataaggagtggagcttattgtttcaacaggatattctgcttatgctcgagccaatgacgatggcgctttttacgagggtgttgggatgggagcagcagagagttttagatttgctagaagatgttaggagggatgtggtggatacgaggattcgttctttctccgagggagtccatatatatgcccaaaaacctgcgaactgagaaacgcataatcagaagcgcttgatagcagtggtggcggagggaagacgatcttgcgttgtacaagctacctaacaatatgtaattttgaagtggacacggtgtctcatttttcggcacaaagcaacaatatacccaatttgatatccatcaaacacccaatgagtctccgaatacacccgtagtatcgatatcgtctatattaacgtcccctatgtcacccgcgccccagcccatcgtcattgtagaccagaggtcattgtacactatcggccggtccgtgaggcttcctatgtctatcaatggctccacggggccagcgaagtccggcccaaggtctatcatctgtccggacaccgggcctgtaagtaaacccgagctactcgtttggcttgtcgcataagaaccggtcatagcatccctttgctgaccagcccatagtgggatatactcctgcatattcccgttaagcatgggacacaagctccgtctttctgcagttgtgaatgtctccgcgctcatcatcgctatgtgctccacagatttgcttttctcctcgaacttatctttgacagatcgaagcacgattttgaaggcagtaacagcgtcagttttctttgcatgtttgccgctctcgctttccggctcgtttcccttgcttttcactcctacatcggcgacagactcggcatcaggctcgcaaagtcgatttagaatggccgcgaaaccaacgatcttccttccctgtgccacatcataatcatggcacaagcgtgacagtgggaaagagagtcgataccctatgatgactgctagtataactcgaccgaagtcggcgcctgcaaaaccggacagttcctctgacgggagagcggcgatgaactcgaagaatgcgcggactttgtgagcagcaaggagcaggcactcgttgcgcgtaggttcgcaagtctcctttgccgatggccggcaggagcggaagagcgagggggcgagaatatatgcatgcgtcattagtgtggcgagggtgatactcgctgtcacattgtgagcacttgtcggagcttttggcacgtaaatgaagagagtatgagaggaagaaggaagggtaagaatgaacactatcagatagcttcgagattgtctagccattgattatttaaggtgatgatgttgcaaaacaactgtcgttttgagacgtttcgacgtagcctctgcatatgtgtactctgcatatcgttctagatgtatcatgtctagttgttgtgcgatgtagcaggcaacggcggatagcatgaaaatgaaaataagggtttgattgattatgagcttttagcaacttacgggatgaaatacacttctcgaccattcgtgtctcgaagtcgtggaactgcgactcgagaccagcacgaatcatatcacgttgcatctcactttgctgatctcgtagccccaaatcgaagtttcggcgtgcttcattgatttcggaatacacgtattggatgcgcgcgagccagacaaggtggtggtcttgctgcaggtcggtatgttgctccagtgcatcagcgcatcgcgcaatttgtggtgtatatcttagcatggtgttttg

SEQ ID NO: 11799 - DNA, 963 bp, Muscodor strobelii
  misc_feature: SGI cDNA ID NO. 563803
  misc_feature: Encodes the peptide sequence at SEQ ID NO 11800
atgtcatcaggcggccgaatcggccgggacgctccttacaatgctcgtggttgcgatatgcgatggttctcgactacagaagcatgtgaaattcttggccggttttcccagatcattcttgtgggcgactcgatgttgagacacgtgatcggtgcgttgaatatcatcatacgtgaagatattgggtatggaggagtgacagattggaatttcaatactcatgagcgatacaaatgcttttgcaatgatcagtttgacgttaccgagtgctcagttcagggcatatataaaacagcagatgttcttacgaacgatcctggtagcttggcctgtcctcgtttggtccctggctggtcaacagatctgaggagtatgtctcagaaatatgctccttattactatcctacctttgctaagtggtttggaacagtggaacagatgattcgctatcctattgaagatgttgagcgcgaccgtctcgaatcggctattaacaccaccattgctaaacccaaagcattcgtcttaggccacggactctggaatgaccttgaaattgctagttcgaaggcctggttgaatgtggtgatcagcataatcaactcgaaattgaagctccgtgatcagtacatatcaaggcacgagaacatgccaatactcctaataacgccaaatgccgccggagagaaaaaatccgacgagtacattgtcacacaaggtaacaaggctcttgtcaagttcgagcacgctatggcgcgtgaagctgccagaaaatttatcgaccatctgggcacttggaacatgtcgatccaagcccgcctttatgatggtgtgcatatggatatgcgcggtaatcttatgaaggccatgatggttctgaactggttggatatgttagaggagggagtcgacactggtaccttttggggggccgatactgtcactcacggcctactcttgtga

SEQ ID NO: 11800 - protein, 320 aa, Muscodor strobelii
  misc_feature: SGI Peptide ID NO. 563803
  misc_feature (1)..(299): NCBI GI: 154321886 Blast Desc: BC1G_01090 [Botryotinia fuckeliana B05.10] gi|150850337|gb|EDN25530.1| BC1G_01090 [Botryotinia fuckeliana B05.10]
  misc_feature (1)..(300): NCBI GI: 156044532 Blast Desc: SS1G_10370 [Sclerotinia sclerotiorum 1980] gi|154694758|gb|EDN94496.1| SS1G_10370 [Sclerotinia sclerotiorum 1980]
  misc_feature (1)..(299): NCBI GI: 119481251 Blast Desc: NFIA_087130 [Neosartorya fischeri NRRL 181] gi|119408808|gb|EAW18757.1| conserved [Neosartorya fischeri NRRL 181]
  misc_feature (1)..(299): NCBI GI: 259479594 Blast Desc: TPA: conserved [Aspergillus nidulans FGSC A4]
  misc_feature (1)..(295): NCBI GI: 121715736 Blast Desc: conserved [Aspergillus clavatus NRRL 1] gi|119403634|gb|EAW14051.1| conserved [Aspergillus clavatus NRRL 1]
  misc_feature (1)..(294): NCBI GI: 67540076 Blast Desc: AN6208.2 [Aspergillus nidulans FGSC A4] gi|40738804|gb|EAA57994.1| [Aspergillus nidulans FGSC A4]
  misc_feature (17)..(299): NCBI GI: 71001686 Blast Desc: conserved [Aspergillus fumigatus Af293] gi|66853162|gb|EAL93486.1| conserved [Aspergillus fumigatus Af293] gi|159129591|gb|EDP54705.1| conserved [Aspergillus A1163]
  misc_feature (1)..(299): NCBI GI: 238496515 Blast Desc: conserved [Aspergillus flavus NRRL3357] gi|220694373|gb|EED50717.1| conserved [Aspergillus flavus NRRL3357]
  misc_feature (1)..(299): NCBI GI: 169774871 Blast Desc: [Aspergillus oryzae RIB40] gi|83769766|dbj|BAE59901.1| protein product [Aspergillus oryzae]
  misc_feature (1)..(90): NCBI GI: 115383900 Blast Desc: conserved [Aspergillus terreus NIH2624] gi|114196189|gb|EAU37889.1| conserved [Aspergillus terreus NIH2624]
MSSGGRIGRDAPYNARGCDMRWFSTTEACEILGRFSQIILVGDSMLRHVIGALNIIIREDIGYGGVTDWNFNTHERYKCFCNDQFDVTECSVQGIYKTADVLTNDPGSLACPRLVPGWSTDLRSMSQKYAPYYYPTFAKWFGTVEQMIRYPIEDVERDRLESAINTTIAKPKAFVLGHGLWNDLEIASSKAWLNVVISIINSKLKLRDQYISRHENMPILLITPNAAGEKKSDEYIVTQGNKALVKFEHAMAREAARKFIDHLGTWNMSIQARLYDGVHMDMRGNLMKAMMVLNWLDMLEEGVDTGTFWGADTVTHGLLL

SEQ ID NO: 11801 - DNA, 2010 bp, Muscodor strobelii
  misc_feature: SGI cDNA ID NO. 563804
  misc_feature: Encodes the peptide sequence at SEQ ID NO 11802
atgaaccccgaaaacaccacccagcaagctgggagtgcagccgccagcagggctccaggcggctctaagccaccggctgtctctcaggctcaagcccaagccgcgacctccagcccttccgtgggctcccaaccggcagccatctctaaaccgcaagcagcctcaaagccagcctttccagctctgtccacggcccggacgaccacgagccccttctcgccgtcgctgacgtctcctgtctcggccgcgccgctcatcagcccgcgccagtccgccatgtcgcaaccggccttttcgcaggcgtcgctcaacggtctcggccacctggggagctcgatatcggccacgcagcccatgttcaagttcggcagcacgtccaactcgcagtcgcacaaggatgccgcgtttgctgcgaccagcgcctcgagcaggcccgtgggaacgcctgccagcagctctgcgacggggactcctgtggcctgcgagctgctgatccgaggtcttcccatcgataccaccgaggaggacgtgtcgttgatgcttctgttcgtcaagaaggagctgctcggtgtccaggtggtgccgggccagcccaagtcggccattgtgaagttcagcacccagaacgcagcgcagcaggccaaggagatgctgcacggcaaatccatcggcgcgcacgatgtctcgctggttgtcgactacgtgtcagggagcccgtcgtcggcgactcggttcagggacgagatgatgggcttgccccagacgactgggccgtctcccacctcgttgcacgcacggtcacacatgttcaccaacgacccgttcccgtccgacaactcgcggggcaagctttcgtctcttgcggaccaccatctgtacaacagctttgcgtcggatctggatgccagcacgcagtatgcgagtatctactccccccagtcgcccatcggcaaccacctcgcacgtggagggcgcgtctcgggcaaggacttgatccacgacacggccaacgacgatgaggaccaggacctgctgaagaaccctctcgcgtttgcggaaaaggagccaatgcagcagcaacgacgatcgaccctcccccagctgcccactcaacgcatggccagcctgtcgctgaacactaacaccaacggcccttcttctctgccgcctttcgtcaaccaaagcatgactcctgtatcgtatacaggccacatgccgccaaccatgatgatgaatggggctaacggacttccacggagcatgccctacatggactatagccacggtcacttcaacagccggcgcacgagactaccagcatccaaccccgcagatcagcaccccccgtgcaatactctatacgtgggcaatctgccggtcaacacgtccgaggaggagctgaagtgcatcttctcccgagtacggggctacaagcgactgtgttttcgcgccaagtcgatgggtcccatgtgcttcgtcgagttcgaggatatatccacggcctccaaggcccttagcgacctctatggggtcgagctgcacaacagcatcaaagggggaatccgtctcagttactccaagaacccgctgggtgttcgcaatcccccggccaacggggctcagacgaacgggcatatgcctcatatgaacggccacatggcaacatcgaccaatggcttcgcgaatgctcaccgcccgcccccggggcttggggctccgagtgcccctccgagtgctcctccaggattcggtggatccagcttcaacggaaactaccccaacaacagcccaaatggcatgaacgccccctatcccgcgggctatccgaacggcaacaccaatctcctcaatggttctatcggaaatactctgtaccctgcgagtgatccctatccgctcaacgccacttccacccccgtgaatggctctgcgaacgggcctttcatgaatggcatttcaatgaacggcacttcattgagtcgtgcttctgtatcctcttcttttcactag

SEQ ID NO: 11802 - protein, 669 aa, Muscodor strobelii
  misc_feature: SGI Peptide ID NO. 563804
  misc_feature (453)..(523): Pfam Id: PF00076 Pfam Desc: RNA recognition motif. (a.k.a. RRM, RBD, or RNP domain)
  misc_feature (453)..(472): Pfam Id: PF00076 Pfam Desc: RNA recognition motif. (a.k.a. RRM, RBD, or RNP domain)
  misc_feature (123)..(585): NCBI GI: 149210751 Blast Desc: MGCH7_ch7g848 [Magnaporthe grisea 70-15] gi|86196803|gb|EAQ71441.1| MGCH7_ch7g848 [Magnaporthe grisea 70-15]
  misc_feature (123)..(585): NCBI GI: 145609694 Blast Desc: MGG_03053 [Magnaporthe grisea 70-15] gi|145017098|gb|EDK01461.1| MGG_03053 [Magnaporthe grisea 70-15]
  misc_feature (144)..(584): NCBI GI: 116193039 Blast Desc: CHGG_06237 [Chaetomium globosum CBS 148.51] gi|88182150|gb|EAQ89618.1| CHGG_06237 [Chaetomium globosum CBS 148.51]
  misc_feature (142)..(601): NCBI GI: 85114567 Blast Desc: NCU00556 [Neurospora crassa OR74A] gi|28926509|gb|EAA35481.1| NCU00556 [Neurospora crassa OR74A]
  misc_feature (163)..(565): NCBI GI: 256734157 Blast Desc: NECHADRAFT_67581 [Nectria haematococca mpVI 77-13-4]
  misc_feature (175)..(612): NCBI GI: 261353563 Blast Desc: RNA binding protein [Verticillium albo-atrum VaMs.102]
  misc_feature (163)..(646): NCBI GI: 258570691 Blast Desc: [Uncinocarpus reesii 1704] gi|237904419|gb|EEP78820.1| [Uncinocarpus reesii 1704]
  misc_feature (180)..(572): NCBI GI: 238839168 Blast Desc: RNA binding protein [Microsporum canis CBS 113480]
  misc_feature (142)..(563): NCBI GI: 171683983 Blast Desc: protein product [Podospora anserina] gi|170941952|emb|CAP67604.1| protein product [Podospora anserina]
  misc_feature (163)..(626): NCBI GI: 119183856 Blast Desc: CIMG_06805 [Coccidioides immitis RS]
MNPENTTQQAGSAAASRAPGGSKPPAVSQAQAQAATSSPSVGSQPAAISKPQAASKPAFPALSTARTTTSPFSPSLTSPVSAAPLISPRQSAMSQPAFSQASLNGLGHLGSSISATQPMFKFGSTSNSQSHKDAAFAATSASSRPVGTPASSSATGTPVACELLIRGLPIDTTEEDVSLMLLFVKKELLGVQVVPGQPKSAIVKFSTQNAAQQAKEMLHGKSIGAHDVSLVVDYVSGSPSSATRFRDEMMGLPQTTGPSPTSLHARSHMFTNDPFPSDNSRGKLSSLADHHLYNSFASDLDASTQYASIYSPQSPIGNHLARGGRVSGKDLIHDTANDDEDQDLLKNPLAFAEKEPMQQQRRSTLPQLPTQRMASLSLNTNTNGPSSLPPFVNQSMTPVSYTGHMPPTMMMNGANGLPRSMPYMDYSHGHFNSRRTRLPASNPADQHPPCNTLYVGNLPVNTSEEELKCIFSRVRGYKRLCFRAKSMGPMCFVEFEDISTASKALSDLYGVELHNSIKGGIRLSYSKNPLGVRNPPANGAQTNGHMPHMNGHMATSTNGFANAHRPPPGLGAPSAPPSAPPGFGGSSFNGNYPNNSPNGMNAPYPAGYPNGNTNLLNGSIGNTLYPASDPYPLNATSTPVNGSANGPFMNGISMNGTSLSRASVSSSFH

SEQ ID NO: 11803 - DNA, 468 bp, Muscodor strobelii
  misc_feature: SGI cDNA ID NO. 563805
  misc_feature: Encodes the peptide sequence at SEQ ID NO 11804
atgctgaccagagacagtttggatactgccggaactgatcaattcgttgccatgagagatctatatatgaagaccggtcaaggatttctccttgtctttagcataacatcaaactcttccttgaacgagatcgccggtctgcgcgaagaaataatccggattaaagatgacgctggtataccgatagtgatctgcgggaacaaggccgatttggaagaccagaggaccgtacccaggacacggggctttgcagtttctcagcgatggggtgcgccttactacgaaaccagtgcgcggactagaacaaacgtggacgaggtcttcattgacttgtgccgacagatgctccgaagggatgacgccaacgataggagggaagagaatgaaaacgatccatactccttgtcatcacacaggaagcgtaggcggcgaagggagaagagcggacataaatgcgtcattctttga

SEQ ID NO: 11804 - protein, 155 aa, Muscodor strobelii
  misc_feature: SGI Peptide ID NO. 563805
  misc_feature (1)..(117): Pfam Id: PF00071 Pfam Desc: Ras family
  misc_feature (7)..(70): Pfam Id: PF08477 Pfam Desc: Miro-like protein
  misc_feature (7)..(117): Pfam Id: PF00071 Pfam Desc: Ras family
  misc_feature (7)..(131): NCBI GI: 46129264 Blast Desc: FG08817.1 [Gibberella zeae PH-1]
  misc_feature (7)..(120): NCBI GI: 261353565 Blast Desc: GTPase HRas [Verticillium albo-atrum VaMs.102]
  misc_feature (7)..(118): NCBI GI: 164429747 Blast Desc: NCU02167 [Neurospora crassa OR74A] gi|157073602|gb|EAA35290.2| conserved [Neurospora crassa OR74A]
  misc_feature (7)..(118): NCBI GI: 3434937 Blast Desc: krev-1 [Neurospora crassa]
  misc_feature (7)..(155): NCBI GI: 171684849 Blast Desc: protein product [Podospora anserina] gi|170942385|emb|CAP68037.1| protein product [Podospora anserina]
  misc_feature (7)..(155): NCBI GI: 145237718 Blast Desc: An07g04240 [Aspergillus niger] gi|134075980|emb|CAK48174.1| protein product [Aspergillus niger]
  misc_feature (7)..(155): NCBI GI: 240109660 Blast Desc: Ras-related protein RSR1, [Coccidioides posadasii C735 delta SOWgp]
  misc_feature (7)..(155): NCBI GI: 119183629 Blast Desc: CIMG_06722 [Coccidioides immitis RS]
  misc_feature (7)..(155): NCBI GI: 238505146 Blast Desc: RAS small monomeric GTPase (Rsr1), [Aspergillus flavus NRRL3357] gi|220689916|gb|EED46266.1| RAS small monomeric GTPase (Rsr1), [Aspergillus flavus NRRL3357]
  misc_feature (7)..(155): NCBI GI: 169780664 Blast Desc: [Aspergillus oryzae RIB40] gi|83773536|dbj|BAE63663.1| protein product [Aspergillus oryzae]
MLTRDSLDTAGTDQFVAMRDLYMKTGQGFLLVFSITSNSSLNEIAGLREEIIRIKDDAGIPIVICGNKADLEDQRTVPRTRGFAVSQRWGAPYYETSARTRTNVDEVFIDLCRQMLRRDDANDRREENENDPYSLSSHRKRRRRREKSGHKCVIL

SEQ ID NO: 11805 - DNA, 3078 bp, Muscodor strobelii
  misc_feature: SGI EST ID NO. CUFF.28052.0
  misc_feature: Variant of the nucleotide sequence at SEQ ID NO 11803
caggcgatgcagcagaagcaggctgtgtgtgattttttctgctctggggtgtcccgtcatgtcatgtcatgtcgttgctatacctatatgtacatgacttcgcacatacgcgatgttggatgtgtgacagcgagggtcattggatagagtagacgccgaaatctcgttgcccgcatacaccaccacgacacaggcacatcttgtcccatcatctatgtctccatcgccggcgttcgctatcacatcagctcttcgctttcacaaagcctgcctagtatactgcctacctactcatcaactcgcgtaagcctgcggcgtcgacagcggttgcgaggccgtactgtactgtattcgacaccccacatctactccacgcaacacagcactgcatgttgtagcatggcatagcataacttgcaaagcctagcaacacagatagatcgtgataggagcagcactgtactcaatacagtacaaccgtgggcatgggtttgtccagctcgcttgctctgccggttcgttcgcccatcgttcgctggagctggccgtgggacactagaccatgatgatattagtgagaggataccctatccctagtccgccatgtgcatcagctccgggtcctcttactactgctagctgcggctcctgtatcccagtcggccggtctctgcccattctccgaccaatctctttgtctgccctctgttggtgtttccttcgtgccgttttggtctgtcagaggtctctgttgatcccatcggcttgtctatctacttctccaatgtccatcgacttgcccatcttccacatgtaatcatttgcacttgtccaagaccaaggagcctgccggcgagcaccaaggacggctgaggcgcgctgctacgatacacacgctttttcttgtcctcgtctctctcctgccatacctgatctatctgcacacacttttaatacttgcatcgccgtgtccgaggtgttcctgttcttccggtcccaatcttcttttcgtcgcccggtcccttaagactgcccgaattctactatttctccgaagatccctagtatctcgaacccttgttcgtccgagatacacgtgtactcgtaccttgttactagtctatgacatactcgtacctaattgtgtcaaatacttagagacctcaccatctttttccgcgtttgtcaactgcttcgcttccacttcgcactcactcgcattcgtgctgaaatcaacttcgcctctttttcgcgttttcttcgcctcactttgtctgtccagtgctttttgttagcctcgcttccggtatcgtgggtttattaccagatgtatccctgaggactgacgatcgttgagttatcgacaaggattggcgttctcgaactccaaggcacgaaagtgaaaagcttcgactgggttggcaaatgcgcgcacacggcaacgtcatatcacgggcctgtgcattattctgttcaattcgctctcttgcatcgtattaaaagaccttagtcgcagacttactgaggaatcagtcgttcgcttcaactggacaacgtttttttcacggtggactgtgtccttcgttaagagtcaaccgatctgcctcgttcgagaccctagccggctacgcagatcctccacatgaactacgagtcagccatagaataggccatcataaaatacccacgtctgcggcatttagacacgttaacgatacctgaatttggtagacaaacacgactacaacattctacagcaacacaaatcagcgctgcgactgccctctgttcgtttgttatctgcggcgacagacgcaggtggaaaagaggcgtatgcgggggctgctttatccaccggatgatcagtgcggcttcgaactatttaatattaattaccccagccgctttcaagaagcttgataattgcaacccctccgcttcgggcatcgagggcaaatcgacaggatgccgtcgaggcatggacgatatcaccaggcggcccgagaataccatgttgtagtcttgggcgcaggtggtgttgggaagagttgtctcacagctcaattcgtccacaacgaatggatagaaagctatgacccaacgattgaggattcttaccggactcagatgtcggttgatcaacgccaggtggttctggaaattttggatactgccggaactgatcaattcgttgccatgagagatctatatatgaagaccggtcaaggatttctccttgtctttagcataacatcaaactcttccttgaacgagatcgccggtctgcgcgaagaaataatccggattaaagatgacgctggtataccgatagtgatctgcgggaacaaggccgatttggaagaccagaggaccgtacccaggacacggggctttgcagtttctcagcgatggggtgcgccttactacgaaaccagtgcgcggactagaacaaacgtggacgaggtcttcattgacttgtgccgacagatgctccgaagggatgacgccaacgataggagggaagagaatgaaaacgatccatactccttgtcatcacacaggaagcgtaggcggcgaagggagaagagcggacataaatgcgtcattctttgacaaaccgaattgagttctaagtgaatctcgaatcacgattcccttttcattctgctatcagaatctactccctggatattatcataaaagaaccattacgacattggcttattgcgtttgcattgcgtggattggacggggcaggacaggattcggagccgaagaaaaaaaacaaaatcaagtaacagcgtctgcatctcttcaatcatggaggatttggacaattatagatgccaagcgggcaacggcacaaagcacattcatattacattgacattaccaaaaagcgacaggtgtatacgacatctccctttccagacgggatcatataagaagtaaacaaagatgaattgagctgatcgtagcaattggaaaccggtatatacgtacatgcccgccagctattgctaatcaagaatcgagttttctgcgctgagttcccgcgtgagccttcgtgcgctcgta

SEQ ID NO: 11806 - DNA, 663 bp, Muscodor strobelii
  misc_feature: SGI cDNA ID NO. 563806
  misc_feature: Encodes the peptide sequence at SEQ ID NO 11807
atgccgtcgaggcatggacgatatcaccaggcggcgttcgtttaccacagccgagaataccatgttgtagtcttgggcgcaggtggtgttgggaagagttgtctcacagctcaattcgtccacaacgaatggatagaaagctatgacccaacgattgaggattcttaccggactcagatgtcggttgatcaacgccaggtggttctggaaattttggatactgccggaactgatcaattcgttgccatgagagatctatatatgaagaccggtcaaggatttctccttgtctttagcataacatcaaactcttccttgaacgagatcgccggtctgcgcgaagaaataatccggattaaagatgacgctggtataccgatagtgatctgcgggaacaaggccgatttggaagaccagaggaccgtacccaggacacggggctttgcagtttctcagcgatggggtgcgccttactacgaaaccagtgcgcggactagaacaaacgtggacgaggtcttcattgacttgtgccgacagatgctccgaagggatgacgccaacgataggagggaagagaatgaaaacgatccatactccttgtcatcacacaggaagcgtaggcggcgaagggagaagagcggacataaatgcgtcattctttga

SEQ ID NO: 11807 - protein, 220 aa, Muscodor strobelii
  misc_feature: SGI Peptide ID NO. 563806
  misc_feature (21)..(135): Pfam Id: PF08477 Pfam Desc: Miro-like protein
  misc_feature (21)..(182): Pfam Id: PF00071 Pfam Desc: Ras family
  misc_feature (18)..(183): NCBI GI: 3434937 Blast Desc: krev-1 [Neurospora crassa]
  misc_feature (15)..(185): NCBI GI: 256734158 Blast Desc: [Nectria haematococca mpVI 77-13-4]
  misc_feature (18)..(220): NCBI GI: 145237718 Blast Desc: An07g04240 [Aspergillus niger] gi|134075980|emb|CAK48174.1| protein product [Aspergillus niger]
  misc_feature (18)..(220): NCBI GI: 240109660 Blast Desc: Ras-related protein RSR1, [Coccidioides posadasii C735 delta SOWgp]
  misc_feature (18)..(220): NCBI GI: 119183629 Blast Desc: CIMG_06722 [Coccidioides immitis RS]
  misc_feature (18)..(220): NCBI GI: 238505146 Blast Desc: RAS small monomeric GTPase (Rsr1), [Aspergillus flavus NRRL3357] gi|220689916|gb|EED46266.1| RAS small monomeric GTPase (Rsr1), [Aspergillus flavus NRRL3357]
  misc_feature (18)..(220): NCBI GI: 212534360 Blast Desc: RAS small monomeric GTPase (Rsr1), [Penicillium marneffei ATCC 18224] gi|197107830|gb|ACH42501.1| RAS small monomeric GTPase [Penicillium marneffei] RAS small monomeric ATCC
  misc_feature (1)..(220): NCBI GI: 171684849 Blast Desc: protein product [Podospora anserina] gi|170942385|emb|CAP68037.1| protein product [Podospora anserina]
  misc_feature (16)..(184): NCBI GI: 261202150 Blast Desc: RAS small monomeric GTPase [Ajellomyces dermatitidis SLH14081] gi|239590386|gb|EEQ72967.1| RAS small monomeric GTPase [Ajellomyces dermatitidis SLH14081]
  misc_feature (18)..(184): NCBI GI: 242790059 Blast Desc: RAS small monomeric GTPase (Rsr1), [Talaromyces stipitatus ATCC 10500] gi|218718076|gb|EED17496.1| RAS small monomeric GTPase (Rsr1), [Talaromyces stipitatus ATCC 10500]
MPSRHGRYHQAAFVYHSREYHVVVLGAGGVGKSCLTAQFVHNEWIESYDPTIEDSYRTQMSVDQRQVVLEILDTAGTDQFVAMRDLYMKTGQGFLLVFSITSNSSLNEIAGLREEIIRIKDDAGIPIVICGNKADLEDQRTVPRTRGFAVSQRWGAPYYETSARTRTNVDEVFIDLCRQMLRRDDANDRREENENDPYSLSSHRKRRRRREKSGHKCVIL

SEQ ID NO: 11808 - DNA, 3078 bp, Muscodor strobelii; identical to SEQ ID NO: 11805
  misc_feature: SGI EST ID NO. CUFF.28052.0
  misc_feature: Variant of the nucleotide sequence at SEQ ID NO 11806

SEQ ID NO: 11809 - DNA, 231 bp, Muscodor strobelii
  misc_feature: SGI cDNA ID NO. 563807
  misc_feature: Encodes the peptide sequence at SEQ ID NO 11810
atgccgtcgaggcatggacgatatcaccaggcggcgttcgtttaccacagccgagaataccatgttgtagtcttgggcgcaggtggtgttgggaagagttgtctcacagctcaattcgtccacaacgaatggatagaaagctatgacccaacgattgaggattcttaccggactcagatgtcggttgatgtaagcgcaaccatcccgtctgatgcgattggcgtgacgtga

SEQ ID NO: 11810 - protein, 76 aa, Muscodor strobelii
  misc_feature: SGI Peptide ID NO. 563807
  misc_feature (21)..(63): Pfam Id: PF00071 Pfam Desc: Ras family
  misc_feature (18)..(63): NCBI GI: 3434937 Blast Desc: krev-1 [Neurospora crassa]
  misc_feature (18)..(63): NCBI GI: 242790059 Blast Desc: RAS small monomeric GTPase (Rsr1), [Talaromyces stipitatus ATCC 10500] gi|218718076|gb|EED17496.1| RAS small monomeric GTPase (Rsr1), [Talaromyces stipitatus ATCC 10500]
  misc_feature (18)..(63): NCBI GI: 197107828 Blast Desc: RAS small monomeric GTPase [Penicillium marneffei]
  misc_feature (18)..(63): NCBI GI: 212534360 Blast Desc: RAS small monomeric GTPase (Rsr1), [Penicillium marneffei ATCC 18224] gi|197107830|gb|ACH42501.1| RAS small monomeric GTPase [Penicillium marneffei] RAS small monomeric ATCC
  misc_feature (18)..(63): NCBI GI: 145237718 Blast Desc: An07g04240 [Aspergillus niger] gi|134075980|emb|CAK48174.1| protein product [Aspergillus niger]
  misc_feature (18)..(63): NCBI GI: 238505146 Blast Desc: RAS small monomeric GTPase (Rsr1), [Aspergillus flavus NRRL3357] gi|220689916|gb|EED46266.1| RAS small monomeric GTPase (Rsr1), [Aspergillus flavus NRRL3357]
  misc_feature (18)..(63): NCBI GI: 255952861 Blast Desc: Pc21g01120 [Penicillium chrysogenum Wisconsin 54-1255] gi|211588894|emb|CAP95009.1| Pc21g01120 [Penicillium chrysogenum Wisconsin 54-1255]
  misc_feature (18)..(63): NCBI GI: 119479529 Blast Desc: RAS small monomeric GTPase (Rsr1), [Neosartorya fischeri NRRL 181] gi|119407947|gb|EAW17896.1| RAS small monomeric GTPase (Rsr1), [Neosartorya fischeri NRRL 181]
  misc_feature (18)..(63): NCBI GI: 240277802 Blast Desc: RAS small monomeric GTPase [Ajellomyces capsulatus H143]
  misc_feature (18)..(63): NCBI GI: 261202150 Blast Desc: RAS small monomeric GTPase [Ajellomyces dermatitidis SLH14081] gi|239590386|gb|EEQ72967.1| RAS small monomeric GTPase [Ajellomyces dermatitidis SLH14081]
MPSRHGRYHQAAFVYHSREYHVVVLGAGGVGKSCLTAQFVHNEWIESYDPTIEDSYRTQMSVDVSATIPSDAIGVT

SEQ ID NO: 11811 - DNA, 3078 bp, Muscodor strobelii; identical to SEQ ID NO: 11805
  misc_feature: SGI EST ID NO. CUFF.28052.0
  misc_feature: Variant of the nucleotide sequence at SEQ ID NO 11809

SEQ ID NO: 11812 - DNA, 1320 bp, Muscodor strobelii
  misc_feature: SGI cDNA ID NO. 563808
  misc_feature: Encodes the peptide sequence at SEQ ID NO 11813
atgttgaccgaaagttatttcgtctcggtgtcgggaccgccgctcacgaacaacaccgctattcccaaggacgcaggcatatacgagcatatccttcacccgacccatgcaacatctgctgttttgaagaagagttcggtaccaactgatggcctggcggtcagtggcactcatgtctttgccgctcagcaagaaaagtccactgtgcatgtctatgccaaggctaagggaaatcaagaggctgttgtcaccttttctgagcgtattagcagcgtccttctccttgacaatgtgctcttcctaggaactcaggagggacgagtcatagcttgggagatttgcacgggccggcaagtcaccacaccgccatgccacgtacaggctgtgacatgcattgctgccactccatttcacctcctaacaggatctgccgactctaatgtgcaggtatggtcagttgctcgtcttctggaactcgattctaccattgagcatgagccccttgagactctcaagaatcacagggccgccatcacctcactagtcgtctcccagagcgttaatcccgacaccaatatctgcgtctctgcgagcaaggacaagtcctgtgtcatctggaactaccagctcggcattcctcttcgaacaatattgttcccaagctcacctttgtcgatcgcacttgacccctgtgcccgcgcattctatgcttctactgaagacggttcactcttcgcagtcgagctgttcggggagaaaccacttatcggctctcaaagtgaagagggatctacagctgtgcaagtatcatcagcattcggtgccgtgcccccagaagctggtgctgctacctgtcttggcttgaattatgacgggactatcttgttgtctggccaccctcagggtcaagtccgacgatgggatctcagcagcccggaggactcaacagagcttgcgaatttgaatgctgctgtcaccaatatcatatttgtctcaccacttccagcgtctgaattgactcggcccatcacagtcgtcaagccgttccttggaagtcgaacctacaacttcagctcccaactggaatctgacctgttggatgacacaaaattctcgaagatggttagctcagatggcctaccacaagacttcctcgagcaggcaatccttgcatttcaagaacctgccgataagtcatctgctgccgataccgatctccagagagaaaatgaggagctgcgagaactaattgaggaacagcgcgcgctgcaaaagaagatgctccaaaagtacgttgaagcaacgtcttcgagagcctag

SEQ ID NO: 11813 - protein, 439 aa, Muscodor strobelii
  misc_feature: SGI Peptide ID NO. 563808
  misc_feature (165)..(207): Pfam Id: PF00400 Pfam Desc: WD domain, G-beta repeat
  misc_feature (116)..(152): Pfam Id: PF00400 Pfam Desc: WD domain, G-beta repeat
  misc_feature (1)..(438): NCBI GI: 116193031 Blast Desc: CHGG_06233 [Chaetomium globosum CBS 148.51] gi|88182146|gb|EAQ89614.1| CHGG_06233 [Chaetomium globosum CBS 148.51]
  misc_feature (1)..(429): NCBI GI: 171683977 Blast Desc: protein product [Podospora anserina] gi|170941949|emb|CAP67601.1| protein product [Podospora anserina]
  misc_feature (1)..(436): NCBI GI: 39971181 Blast Desc: MGG_03057 [Magnaporthe grisea 70-15] gi|149210759|ref|XP_001522754.1| MGCH7_ch7g852 [Magnaporthe grisea 70-15] gi|86196807|gb|EAQ71445.1| MGCH7_ch7g852 grisea
  misc_feature (1)..(394): NCBI GI: 85114583 Blast Desc: NCU00560 [Neurospora crassa OR74A] gi|28926513|gb|EAA35485.1| conserved [Neurospora crassa OR74A]
  misc_feature (1)..(433): NCBI GI: 156045772 Blast Desc: SS1G_09162 [Sclerotinia sclerotiorum 1980] gi|154693558|gb|EDN93296.1| SS1G_09162 [Sclerotinia sclerotiorum 1980]
  misc_feature (1)..(426): NCBI GI: 46105274 Blast Desc: FG00265.1 [Gibberella zeae PH-1]
  misc_feature (1)..(424): NCBI GI: 256731904 Blast Desc: NECHADRAFT_40904 [Nectria haematococca mpVI 77-13-4]
  misc_feature (1)..(389): NCBI GI: 212544676 Blast Desc: ribosomal assembly complex component Ipi3, [Penicillium marneffei ATCC 18224] gi|210065461|gb|EEA19555.1| ribosomal assembly complex component Ipi3, [Penicillium marneffei
  misc_feature (1)..(429): NCBI GI: 255944205 Blast Desc: Pc20g03180 [Penicillium chrysogenum Wisconsin 54-1255] gi|211587605|emb|CAP85647.1| Pc20g03180 [Penicillium chrysogenum Wisconsin 54-1255]
  misc_feature (1)..(348): NCBI GI: 189202200 Blast Desc: WD domain containing protein [Pyrenophora tritici-repentis Pt-1C-BFP] gi|187984535|gb|EDU50023.1| WD domain containing protein [Pyrenophora tritici-repentis Pt-1C-BFP]
MLTESYFVSVSGPPLTNNTAIPKDAGIYEHILHPTHATSAVLKKSSVPTDGLAVSGTHVFAAQQEKSTVHVYAKAKGNQEAVVTFSERISSVLLLDNVLFLGTQEGRVIAWEICTGRQVTTPPCHVQAVTCIAATPFHLLTGSADSNVQVWSVARLLELDSTIEHEPLETLKNHRAAITSLVVSQSVNPDTNICVSASKDKSCVIWNYQLGIPLRTILFPSSPLSIALDPCARAFYASTEDGSLFAVELFGEKPLIGSQSEEGSTAVQVSSAFGAVPPEAGAATCLGLNYDGTILLSGHPQGQVRRWDLSSPEDSTELANLNAAVTNIIFVSPLPASELTRPITVVKPFLGSRTYNFSSQLESDLLDDTKFSKMVSSDGLPQDFLEQAILAFQEPADKSSAADTDLQRENEELRELIEEQRALQKKMLQKYVEATSSRA

SEQ ID NO: 11814 - DNA, 882 bp, Muscodor strobelii
  misc_feature: SGI EST ID NO. CUFF.28060.0
  misc_feature: Variant of the nucleotide sequence at SEQ ID NO 11812
aaaattttgggcagactcgtgcgcccttgacattcggccgtgatctataaatatagcgggtaagtctagtggattatagtggacgcacggatcatttatttaccactgtactttcttcagactcggaacaagcagcagcagcaaaacctcgactacaaacccaatacgtaagtttacttgcatcgaaagaggaacgttgaggtgggtaaaatagttgagaagagtcttcataatggacgactcttgcttttgtttgggctaagtatccatattgtatgatgccctggaacgattgaataaagtttggatctcggtgtcaagtgctagtgggtcccggccaagtcccgattgggaaccatcgaattcttttacttggaaattcacgatacgtctaaacaagtaggaaaaattgttcgatccgccagaacatcccgtgtcatctgccattgcccagacgacgactttagccaggcttacacagagcctctcatatctttagttctgatgtgagattcatcaagtcacttcacgatcaagatgttgaccgaaagttatttcgtctcggtgtcgggaccgccgctcacgaacaacaccgctattcccaaggacgcaggcatatacgagcatatccttcacccgacccatgcaacatctgctgttttgaagaagagttcggtaccaactgatggcctggcggtcagtggcactcatgtctttgccgctcagcaagaaaagtccactgtgcatgtctatgccaaggctaagggaaatcaagaggctgttgtcaccttttctgagcgtattagcagcgtccttctccttgacaatgtgctcttcctaggaactcaggagggacgagtcatagcttgggagatttgcacg

SEQ ID NO: 11815 - DNA, 702 bp, Muscodor strobelii
  misc_feature: SGI cDNA ID NO. 563809
  misc_feature: Encodes the peptide sequence at SEQ ID NO 11816
atggcgggcagtaaaatcctcgttcttggtggcacgggacctgctggactgtgcttgctgcgggaattggtatctagccagcatcaaacaatagtttacgccagaaatgtgtccaagataccatcagacctgatgggcagcgacgtccttgagatcgtaaagggcgaggtagacgatttgaattcactatcccttgttgttgctcgatgctctgtggtcatctcgttgctcggcccaaacatcagtgatcatattccagatcattctctgtatgccaacatttataaaaacatcttcgagctgatgcgccaacatggtgtccgccgcattctcgccatgggaactccctccatcaaacgacccgaggactcttggaccttgatacagtctgtggtcattctattcgtttggatactacataacagtgtctactggaacgtcatcaatatcgccagtgcatttgagcgcgacgctactgatctcgactggactgtgtttcggattggccaaatcctgggagagtcggatgaatcgagctggaaggcagatagagagggaggtgacccattcgttgggtggattggtaagaagggatggtcattgcctttgaagagggcaatgttggcgaggtggcttgtgggtgctgcagagggcaaggcagaagagtggataggcaagatgccagccatttgcgatccctga

SEQ ID NO: 11816 - protein, 233 aa, Muscodor strobelii
  misc_feature: SGI Peptide ID NO. 563809
  misc_feature (1)..(231): NCBI GI: 259483578 Blast Desc: TPA: conserved [Aspergillus nidulans FGSC A4]
  misc_feature (1)..(231): NCBI GI: 256722463 Blast Desc: NECHADRAFT_77250 [Nectria haematococca mpVI 77-13-4]
  misc_feature (1)..(207): NCBI GI: 67541873 Blast Desc: AN7100.2 [Aspergillus nidulans FGSC A4] gi|40742115|gb|EAA61305.1| AN7100.2 [Aspergillus nidulans FGSC A4]
  misc_feature (1)..(223): NCBI GI: 46105042 Blast Desc: FG00149.1 [Gibberella zeae PH-1]
  misc_feature (4)..(223): NCBI GI: 70995428 Blast Desc: conserved [Aspergillus fumigatus Af293] gi|66850104|gb|EAL90431.1| conserved [Aspergillus fumigatus Af293] gi|159131224|gb|EDP56337.1| conserved [Aspergillus A1163]
  misc_feature (1)..(231): NCBI GI: 46119874 Blast Desc: FG04806.1 [Gibberella zeae PH-1]
  misc_feature (1)..(233): NCBI GI: 115383830 Blast Desc: conserved [Aspergillus terreus NIH2624] gi|114196154|gb|EAU37854.1| conserved [Aspergillus terreus NIH2624]
  misc_feature (1)..(230): NCBI GI: 171676288 Blast Desc: protein product [Podospora anserina] gi|170936210|emb|CAP60869.1| protein product [Podospora anserina]
  misc_feature (5)..(233): NCBI GI: 240105995 Blast Desc: CPC735_055580 [Coccidioides posadasii C735 delta SOWgp]
  misc_feature (5)..(233): NCBI GI: 119192686 Blast Desc: CIMG_00720 [Coccidioides immitis RS]
MAGSKILVLGGTGPAGLCLLRELVSSQHQTIVYARNVSKIPSDLMGSDVLEIVKGEVDDLNSLSLVVARCSVVISLLGPNISDHIPDHSLYANIYKNIFELMRQHGVRRILAMGTPSIKRPEDSWTLIQSVVILFVWILHNSVYWNVINIASAFERDATDLDWTVFRIGQILGESDESSWKADREGGDPFVGWIGKKGWSLPLKRAMLARWLVGAAEGKAEEWIGKMPAICDP

SEQ ID NO: 11817 - DNA, 1282 bp, Muscodor strobelii
  misc_feature: SGI EST ID NO. CUFF.28104.1
  misc_feature: Variant of the nucleotide sequence at SEQ ID NO 11815
attggatctcatcatttctacgactgcttcattagaaaccacgtacaaaatgtcttgctctcctctcaaacgcctgaagttcacttgtacttcgttcatcgaaaatggcgggcagtaaaatcctcgttcttggtggcacgggacctgctggactgtgcttgctgcgggaattggtatctagccagcatcaaacaatagtttacgccagaaatgtgtccaagataccatcagacctgatgggcagcgacgtccttgagatcgtaaagggcgaggtagacgatttgaattcactatcccttgttgttgctcgatgctctgtggtcatctcgttgctcggcccaaacatcagtgatcatattccagatcattctctgtatgccaacatttataaaaacatcttcgagctgatgcgccaacatggtgtccgccgcattctcgccatgggaactccctccatcaaacgacccgaggactcttggaccttgatacagtctgtggtcattctattcgtttggatactacataacagtgtctactggaacgtcatcaatatcgccagtgcatttgagcgcgacgctactgatctcgactggactgtgtttcggattggccaaatcctgggagagtcggatgaatcgagctggaaggcagatagagagggaggtgacccattcgttgggtggattggtaagaagggatggtcattgcctttgaagagggcaatgttggcgaggtggcttgtgggtgctgcagagggcaaggcagaagagtggataggcaagatgccagccatttgcgatccctgattatgctgttgtgttgtgctgtattgcaggatatacgatttgtatatggtatgaacggcggtggcgaatgccttgaatctgcgtatgtacaagtgtatacctaagttatgtaatgtaatttgtaaggatggcagatcctattcccaagtaatccacagatggccatacttcattttgatagcttgcgatgacttgataagaaactgatgcatgaacaattcccgatcctctgtgcatcaatatatttgctctttgcggattcgcagcctttgactctactgttgatgttcgctctgaaggctaaggcagtttaagcactatgagttatggttttgggcgcttcttaatgacgactgggtacgagctgtgctagcaatatcatcttttgattttcccattatcgagtaaatttcattatagattcatagacttgtgcaccaaatagaacactcatgtaatattttgtgacagaagag

SEQ ID NO: 11818 - DNA, 1998 bp, Muscodor strobelii
  misc_feature: SGI cDNA ID NO. 563810
  misc_feature: Encodes the peptide sequence at SEQ ID NO 11819
atgaacgaaggcaacgggttctctgagccactaatggagtttggctgcaatatggcagaaatgttagcagtcgacttagaggaatcgaatggcattttcgagtcaaggcagctcactgctggcgcccctgccccaggtttggcgagtgacggattgcagagacgctactctctccaaaatgattgctacctcgatcccatcttgtcatccgaacttgcaaatcccgcgctatcgaaatccaagtcacagtcaaatctgcagacaagtaacagagggacgtttggccctcctggccatgaattagagagaaaggcatccttatcgagcagtgactgttcggcttatctcaaaccaccttcgctgagcacccgcgctggctccctagtaacaattgatacctcagtcgaatccccgacctttctcggcgtacatttgcatccgagtaaagagccgacgcaaagctggatggatttcagctttgacgatatgtcacctaccattgtgcgacgaagaagcagtttatctgatattccttttggatttgaagcttcaatgatggcaacccgaaacaatgcgcttgagctacacacacctagtagccaagaagcatctgttttcaaattccctccaactttacccccaagacgatcgtcgcttcagcatcaggaggcgtacgcaatgtggtctaccacccgcgctgccgccgcagccgaacaatatcccgaagctccgccgcagccccgcgaagacagacaggaccagaaagcgccaccccaagatacccgcatccaagcagaaccaagctcgtctatgggaagcatttctgatgcgacgtatcaggtacgagatgatgggaacgattatgcggattatctggcgtatctgagagcttcagatgaggacactactgacaaacatcctcaggctaccttggatttcggatctcaagcaatggatagagaaagtgccgtgcgtgaagaagtcgagcataaggcagcccaaatacataattttatgaatagcagtatatccggatgcgaacaggaaacgatggagctggcaggcatattttcgggagacgtcgatattcaggcctggctccagtccagtgctcagcacgaattccaacagcgccgcaaagggcgaatccagcccaccaatctgtctccatcggccatagaaacgctccgagtaactgtgtcttgttttcctgacactatgctggcttgcgacagccttaccatcgaaaacattcgcaatgttcttcatggcgtccgaccatccagtcaagacagcatgcttagcgctggcgttactaagcagaaggcctctaaatggaggtttgcgacttccttctttgcaaaatcgcataatcaggatgaagaggaagatgaaagacatatgcaggcagaactaggccgttatgcaaccatcgcaggcaaggaatgggacgcactaaaggggatcttcccgcaagggaccgatcagctctgcagttctctatatgcccacctccttgcatttaactacgtcacggctatttgcccacgtgccgctctccagagccctcttgcggctattcacaagccttctattggtgcccctatgccatcttggaaaaggaatcgcgtggtgactgtgtcgatcatggatgtcgatgagatgccgactcaacaccgtcgatccgaggatacggtcggcgctccgaagaaagcggccagcatcctcggcattggcgaaccatctgatgcccgcccaggaaccgctctcagccgacgtaacagtgtctcgcgaccatcaactgctatcgatgtccggagttcagacggtgttgactcactaagagatcttcgtatcacattggcgaagtgtgttgcacggatagttgcgacgttaaggacatctgctccaaatgacggtcgcgttggttatgcagcagaggacgccatgtttatgcaggcgttgtgtgaagtggtacgatgcgctgagatgaaataa

SEQ ID NO: 11819 - protein, 665 aa, Muscodor strobelii
  misc_feature: SGI Peptide ID NO. 563810
  misc_feature (362)..(663): NCBI GI: 261353651 Blast Desc: conserved [Verticillium albo-atrum VaMs.102]
  misc_feature (388)..(663): NCBI GI: 171683979 Blast Desc: protein product [Podospora anserina] gi|170941950|emb|CAP67602.1| protein product [Podospora anserina]
  misc_feature (363)..(663): NCBI GI: 85114579 Blast Desc: NCU00559 [Neurospora crassa OR74A] gi|28926512|gb|EAA35484.1| [Neurospora crassa OR74A]
  misc_feature (363)..(663): NCBI GI: 46105276 Blast Desc: FG00266.1 [Gibberella zeae PH-1]
  misc_feature (363)..(663): NCBI GI: 256732299 Blast Desc: NECHADRAFT_93849 [Nectria haematococca mpVI 77-13-4]
  misc_feature (385)..(663): NCBI GI: 149210763 Blast Desc: MGCH7_ch7g854 [Magnaporthe grisea 70-15] gi|86196809|gb|EAQ71447.1| MGCH7_ch7g854 [Magnaporthe grisea 70-15]
  misc_feature (385)..(663): NCBI GI: 39971183 Blast Desc: [Magnaporthe grisea 70-15] gi|145017093|gb|EDK01456.1| [Magnaporthe grisea 70-15]
  misc_feature (362)..(422): NCBI GI: 116193029 Blast Desc: CHGG_06232 [Chaetomium globosum CBS 148.51] gi|88182145|gb|EAQ89613.1| CHGG_06232 [Chaetomium globosum CBS 148.51]
MNEGNGFSEPLMEFGCNMAEMLAVDLEESNGIFESRQLTAGAPAPGLASDGLQRRYSLQNDCYLDPILSSELANPALSKSKSQSNLQTSNRGTFGPPGHELERKASLSSSDCSAYLKPPSLSTRAGSLVTIDTSVESPTFLGVHLHPSKEPTQSWMDFSFDDMSPTIVRRRSSLSDIPFGFEASMMATRNNALELHTPSSQEASVFKFPPTLPPRRSSLQHQEAYAMWSTTRAAAAAEQYPEAPPQPREDRQDQKAPPQDTRIQAEPSSSMGSISDATYQVRDDGNDYADYLAYLRASDEDTTDKHPQATLDFGSQAMDRESAVREEVEHKAAQIHNFMNSSISGCEQETMELAGIFSGDVDIQAWLQSSAQHEFQQRRKGRIQPTNLSPSAIETLRVTVSCFPDTMLACDSLTIENIRNVLHGVRPSSQDSMLSAGVTKQKASKWRFATSFFAKSHNQDEEEDERHMQAELGRYATIAGKEWDALKGIFPQGTDQLCSSLYAHLLAFNYVTAICPRAALQSPLAAIHKPSIGAPMPSWKRNRVVTVSIMDVDEMPTQHRRSEDTVGAPKKAASILGIGEPSDARPGTALSRRNSVSRPSTAIDVRSSDGVDSLRDLRITLAKCVARIVATLRTSAPNDGRVGYAAEDAMFMQALCEVVRCAEMK

SEQ ID NO: 11820 - DNA, 2979 bp, Muscodor strobelii
  misc_feature: SGI EST ID NO. CUFF.28072.0
  misc_feature: Variant of the nucleotide sequence at SEQ ID NO 11818
acacattggacttcctttgtcctttcgaacccctgatccaagatgtaccgttggtcgttgattgggagtaacccacgttgaccccctggtcaaccgttgtcgcctataatccttgcttcgagagtcttttcgtcttcttgacatttttttggtcgacaatcctcgtcctttacaacgagcatcacagtatcctgctccccttcgggaaatcagggtctgtgggttcttcgtcaccctaagcgtctagttgataattcgcctattattatcgtattccccctgtcttcctaggctctagctgttgctcagctcctgcaggcatttccttgttataacttgcgagtgtcgcgttgccctggacttttagcatcattttccaagattcttcatgacttcgcctacggtgacacaaactagacgataattctccgacgaataccacaacactgttcgggggcaccgttctattccacttactctcttacgctacaagacagtacctcattgaatagtgcaattattctacaccacagcttcgactataataacgaacgaaagagagctcgaccaaaatgaacgaaggcaacgggttctctgagccactaatggagtttggctgcaatatggcagaaatgttagcagtcgacttagaggaatcgaatggcattttcgagtcaaggcagctcactgctggcgcccctgccccaggtttggcgagtgacggattgcagagacgctactctctccaaaatgattgctacctcgatcccatcttgtcatccgaacttgcaaatcccgcgctatcgaaatccaagtcacagtcaaatctgcagacaagtaacagagggacgtttggccctcctggccatgaattagagagaaaggcatccttatcgagcagtgactgttcggcttatctcaaaccaccttcgctgagcacccgcgctggctccctagtaacaattgatacctcagtcgaatccccgacctttctcggcgtacatttgcatccgagtaaagagccgacgcaaagctggatggatttcagctttgacgatatgtcacctaccattgtgcgacgaagaagcagtttatctgatattccttttggatttgaagcttcaatgatggcaacccgaaacaatgcgcttgagctacacacacctagtagccaagaagcatctgttttcaaattccctccaactttacccccaagacgatcgtcgcttcagcatcaggaggcgtacgcaatgtggtctaccacccgcgctgccgccgcagccgaacaatatcccgaagctccgccgcagccccgcgaagacagacaggaccagaaagcgccaccccaagatacccgcatccaagcagaaccaagctcgtctatgggaagcatttctgatgcgacgtatcaggtacgagatgatgggaacgattatgcggattatctggcgtatctgagagcttcagatgaggacactactgacaaacatcctcaggctaccttggatttcggatctcaagcaatggatagagaaagtgccgtgcgtgaagaagtcgagcataaggcagcccaaatacataattttatgaatagcagtatatccggatgcgaacaggaaacgatggagctggcaggcatattttcgggagacgtcgatattcaggcctggctccagtccagtgctcagcacgaattccaacagcgccgcaaagggcgaatccagcccaccaatctgtctccatcggccatagaaacgctccgagtaactgtgtcttgttttcctgacactatgctggcttgcgacagccttaccatcgaaaacattcgcaatgttcttcatggcgtccgaccatccagtcaagacagcatgcttagcgctggcgttactaagcagaaggcctctaaatggaggtttgcgacttccttctttgcaaaatcgcataatcaggatgaagaggaagatgaaagacatatgcaggcagaactaggccgttatgcaaccatcgcaggcaaggaatgggacgcactaaaggggatcttcccgcaagggaccgatcagctctgcagttctctatatgcccacctccttgcatttaactacgtcacggctatttgcccacgtgccgctctccagagccctcttgcggctattcacaagccttctattggtgcccctatgccatcttggaaaaggaatcgcgtggtgactgtgtcgatcatggatgtcgatgagatgccgactcaacaccgtcgatccgaggatacggtcggcgctccgaagaaagcggccagcatcctcggcattggcgaaccatctgatgcccgcccaggaaccgctctcagccgacgtaacagtgtctcgcgaccatcaactgctatcgatgtccggagttcagacggtgttgactcactaagagatcttcgtatcacattggcgaagtgtgttgcacggatagttgcgacgttaaggacatctgctccaaatgacggtcgcgttggttatgcagcagaggacgccatgtttatgcaggcgttgtgtgaagtggtacgatgcgctgagatgaaataagtaagaatgggaaaatcatgaactctcctttgtgtatagaatgggatgggtttgcatggaatggcgtacggaaaaggataccctgtatgagtagaatgattgtgcgattcgagaatggtctacgcagcgggacaaagcgttgcttttttgcacggattatatttggtactatgagaggatcgagctatggcctgtacagtctttgtgcttggaggacttcaatgccctttaaacggacctcacatccgactgcacattttggtcaaacaagatgaattaagtcataaataactcgcatggtcaatctgacagagtgccggatgacgcttcgtacatgcaattttccgttcgaatccttagctgcaaggcaatttcctgtaattcgtgatgggatttatacacttacgac

SEQ ID NO: 11821 - DNA, 1032 bp, Muscodor strobelii
  misc_feature: SGI cDNA ID NO. 563811
  misc_feature: Encodes the peptide sequence at SEQ ID NO 11822
atgatgaataaaaaccaagccaaggccagtattttctcgtttgtcactgtatccaaacccctttgggctgggctcgtccacgacaccgtcaagcaagccaagttccacctgaaggccttttggttcttcacatgcagcgacgtcaagactatcctcattccctgcctcacattcgcagccgccaacaccatggcgctaagtacctttgatccgctgctccccatgtccgtcgaattagcagatctggcgcggcgattcccactggtaatcgcgtggatgtggatcaacctcgcagccatatgcgtcaacaaccagcgttcgcgagaggcaatcgtcgaggacaagatcaacaagccctggcgccccatagccagcggcctcgtcttgccccaacaggcaatacggttcatgacgttctatttcgtcgtctcccacgctatgggcgctgctatgggcggaagcgggctccgccagtccctcgtcctgtttgcaaccagcatgtggtattccacagggggaggtggtgatgtcaacccggtgatccgcaattttctcaacgccgtgggctatctctgctttgtctccggcggcatggaggttacactacagcaggtgttaccaatcggtttcggtgtcagcaacggagaaggggaagcgcccagtcgtctgtcagcctggttcgctatcatcggcggaatcatcactacaacaatgcatgtccaggacctgtcagaccaggagggtgatgccgcacgaaagagacgaaccatgccacttgtcattggggactttccgtcccgattgatcatttttgtgtggctaccgatatgggggattatatgcgccgagttctgggatgctccctcctcgacatatgctatagtggtcacattagctgtcctcatcgggctgagaacagtgtttttcaggagtgtgcctcacgataagtttacttttgtgctctggcttgtttggttatcatgcgtcttcgccttgcctttatgcacgtcattgtcttatactaggcagtag

SEQ ID NO: 11822 - protein, 343 aa, Muscodor strobelii
  misc_feature: SGI Peptide ID NO. 563811
  misc_feature (41)..(341): NCBI GI: 70995239 Blast Desc: conserved [Aspergillus fumigatus Af293] gi|66850017|gb|EAL90344.1| conserved [Aspergillus fumigatus Af293] gi|159131136|gb|EDP56249.1| conserved [Aspergillus A1163]
  misc_feature (25)..(334): NCBI GI: 255950774 Blast Desc: Pc22g22600 [Penicillium chrysogenum Wisconsin 54-1255] gi|211593171|emb|CAP99548.1| Pc22g22600 [Penicillium chrysogenum Wisconsin 54-1255]
  misc_feature (41)..(341): NCBI GI: 119495957 Blast Desc: NFIA_015490 [Neosartorya fischeri NRRL 181] gi|119412915|gb|EAW22856.1| conserved [Neosartorya fischeri NRRL 181]
  misc_feature (36)..(334): NCBI GI: 121701963 Blast Desc: conserved [Aspergillus clavatus NRRL 1] gi|119397389|gb|EAW07820.1| conserved [Aspergillus clavatus NRRL 1]
  misc_feature (35)..(337): NCBI GI: 171691040 Blast Desc: protein product [Podospora anserina] gi|170945468|emb|CAP71580.1| protein product [Podospora anserina]
  misc_feature (28)..(338): NCBI GI: 39945766 Blast Desc: MGG_08003 [Magnaporthe grisea 70-15] gi|145019235|gb|EDK03463.1| MGG_08003 [Magnaporthe grisea 70-15]
  misc_feature (29)..(337): NCBI GI: 242778969 Blast Desc: conserved [Talaromyces stipitatus ATCC 10500] gi|218722966|gb|EED22384.1| conserved [Talaromyces stipitatus ATCC 10500]
  misc_feature (27)..(333): NCBI GI: 212533827 Blast Desc: conserved [Penicillium marneffei ATCC 18224] gi|210072434|gb|EEA26523.1| conserved [Penicillium marneffei ATCC 18224]
  misc_feature (38)..(334): NCBI GI: 154313037 Blast Desc: BC1G_05520 [Botryotinia fuckeliana B05.10] gi|150849605|gb|EDN24798.1| BC1G_05520 [Botryotinia fuckeliana B05.10]
  misc_feature (41)..(305): NCBI GI: 145237052 Blast Desc: An07g00810 [Aspergillus niger] gi|134075638|emb|CAK39304.1| protein product [Aspergillus niger]
MMNKNQAKASIFSFVTVSKPLWAGLVHDTVKQAKFHLKAFWFFTCSDVKTILIPCLTFAAANTMALSTFDPLLPMSVELADLARRFPLVIAWMWINLAAICVNNQRSREAIVEDKINKPWRPIASGLVLPQQAIRFMTFYFVVSHAMGAAMGGSGLRQSLVLFATSMWYSTGGGGDVNPVIRNFLNAVGYLCFVSGGMEVTLQQVLPIGFGVSNGEGEAPSRLSAWFAIIGGIITTTMHVQDLSDQEGDAARKRRTMPLVIGDFPSRLIIFVWLPIWGIICAEFWDAPSSTYAIVVTLAVLIGLRTVFFRSVPHDKFTFVLWLVWLSCVFALPLCTSLSYTRQ

SEQ ID NO: 11823 - DNA, 1134 bp, Muscodor strobelii
  misc_feature: SGI cDNA ID NO. 563812
  misc_feature: Encodes the peptide sequence at SEQ ID NO 11824
atggacccgtccaaaacaccagcgctggagcctcctcccgggcagacatcaaacctacaagatgcgcactcgatccattacatccagatcgttgtgtcggcgattgcggtgaccctctccgcagccgccgttgccgtccgaacatacacgcgtgcaggcatcctgcacaagttcgacacgactgatgtggcgctcctcgtggcatgggtaagcctgaatctggtctttcccggatactcctcccctaccgcagctgaccccgcgaaggtcgccatggtcgccctattcggcgtcggggtatatacaggtcacttcgggcaaggcaagcatcagtggaacgtctccgtagccgatgtgctgcagctgacagtgctcatcaacatcatcgagatcctctataatcccctgaccttcctcgtcaagtatgcagtcttaagacaaattgagtcactattcttcgaacaccggcgagaccatatcctttataaggtcctctgggccctgatttggggcaaccttgtcttctacctcaccctcctctttctcttcatctttcagtgcgtgccccgggcgaagctatcgaaccccgaactaccgggaaggtgcatcgacaccacccaaacgtacatagccgcgggcgctatcaatcttgtctctgacctgactatccttttcgtccccattgcttccatcggtaaattgaagatcagcacgaaagctaaagtggcagccgctgccgtattcgcagtgggtataactgccatcatcgcaggaattctccgactggtttatagcgtgcaaatcatccgcacacccgacgtcacttacgccatagaaccagtagccatatgggcgttcatcgaattcaccgccattttctacgtagcatgttgccctttcttcccccggtttttccaccacttccgggaacgaggctcggaactatcctcaggatccgggctatccaacagcaaccggtacaagtcgacgcagcgcggcgtcggatcatccgtgccaacacatgccggagaggtaatgggagcaggaacaggtgaatacggcagcgacatcgagctaaggttgcagactcctcctttaggtaacccctttggtcgcgaggcggaatacaactga

SEQ ID NO: 11824 - protein, 377 aa, Muscodor strobelii
  misc_feature: SGI Peptide ID NO. 563812
  misc_feature (19)..(352): NCBI GI: 16945439 Blast Desc: related to integral membrane protein PTH11 [Neurospora crassa]
  misc_feature (106)..(332): NCBI GI: 67528508 Blast Desc: AN4452.2 [Aspergillus nidulans FGSC A4] gi|40741027|gb|EAA60217.1| AN4452.2 [Aspergillus nidulans FGSC A4] gi|259482731|tpe|CBF77490.1| TPA: 60S ribosomal protein L36
  misc_feature (6)..(284): NCBI GI: 121706810 Blast Desc: ribosomal protein L36e, [Aspergillus clavatus NRRL 1] gi|119399784|gb|EAW10210.1| ribosomal protein L36e, [Aspergillus clavatus NRRL 1]
  misc_feature (90)..(337): NCBI GI: 238489453 Blast Desc: conserved [Aspergillus flavus NRRL3357] gi|220698352|gb|EED54692.1| conserved [Aspergillus flavus NRRL3357]
  misc_feature (1)..(317): NCBI GI: 189197019 Blast Desc: conserved [Pyrenophora tritici-repentis Pt-1C-BFP] gi|187980795|gb|EDU47421.1| conserved [Pyrenophora tritici-repentis Pt-1C-BFP]
  misc_feature (8)..(334): NCBI GI: 156057637 Blast Desc: SS1G_04550 [Sclerotinia sclerotiorum 1980] gi|154702335|gb|EDO02074.1| SS1G_04550 [Sclerotinia sclerotiorum 1980]
  misc_feature (128)..(352): NCBI GI: 164423873 Blast Desc: NCU07769 [Neurospora crassa OR74A] gi|157070267|gb|EAA29027.2| [Neurospora crassa OR74A]
  misc_feature (10)..(329): NCBI GI: 145237348 Blast Desc: An07g02370 [Aspergillus niger] gi|134075790|emb|CAK39326.1| protein product [Aspergillus niger]
  misc_feature (102)..(285): NCBI GI: 238491740 Blast Desc: integral membrane protein [Aspergillus flavus NRRL3357] gi|220697520|gb|EED53861.1| integral membrane protein [Aspergillus flavus NRRL3357]
  misc_feature (105)..(297): NCBI GI: 119501048 Blast Desc: NFIA_108770 [Neosartorya fischeri NRRL 181] gi|119415446|gb|EAW25384.1| conserved [Neosartorya fischeri NRRL 181]
MDPSKTPALEPPPGQTSNLQDAHSIHYIQIVVSAIAVTLSAAAVAVRTYTRAGILHKFDTTDVALLVAWVSLNLVFPGYSSPTAADPAKVAMVALFGVGVYTGHFGQGKHQWNVSVADVLQLTVLINIIEILYNPLTFLVKYAVLRQIESLFFEHRRDHILYKVLWALIWGNLVFYLTLLFLFIFQCVPRAKLSNPELPGRCIDTTQTYIAAGAINLVSDLTILFVPIASIGKLKISTKAKVAAAAVFAVGITAIIAGILRLVYSVQIIRTPDVTYAIEPVAIWAFIEFTAIFYVACCPFFPRFFHHFRERGSELSSGSGLSNSNRYKSTQRGVGSSVPTHAGEVMGAGTGEYGSDIELRLQTPPLGNPFGREAEYN

SEQ ID NO: 11825 - DNA, 1439 bp, Muscodor strobelii
  misc_feature: SGI EST ID NO. CUFF.28101.1
  misc_feature: Variant of the nucleotide sequence at SEQ ID NO 11823
cacgcgtgcaggcatcctgcacaagttcgacacgactgatggtgagtcgcgatgattgagtcttttgggttggagttgctgatcgggacggatgaagtggcgctcctcgtggcatgggtaagcctgaatctggtctttcccggatactcctcccctaccgcagctgaccccgcgaaggtcgccatggtcgccctattcggcgtcggggtatatacaggtcacttcgggcaaggcaagcatcagtggaacgtctccgtagccgatgtgctgcagctgacagtgctcatcaacatcatcgagatcctctataatcccctgaccttcctcgtcaagtatgcagtcttaagacaaattgagtcactattcttcgaacaccggcgagaccatatcctttataaggtcctctgggccctgatttggggcaaccttgtcttctacctcaccctcctctttctcttcatctttcagtgcgtgccccgggcgaagctatcgaaccccgaactaccgggaaggtgcatcgacaccacccaaacgtacatagccgcgggcgctatcaatcttgtctctgacctgactatccttttcgtccccattgcttccatcggtaaattgaagatcagcacgaaagctaaagtggcagccgctgccgtattcgcagtgggtataactgccatcatcgcaggaattctccgactggtttatagcgtgcaaatcatccgcacacccgacgtcacttacgccatagaaccagtagccatatgggcgttcatcgaattcaccgccattttctacgtagcatgttgccctttcttcccccggtttttccaccacttccgggaacgaggctcggaactatcctcaggatccgggctatccaacagcaaccggtacaagtcgacgcagcgcggcgtcggatcatccgtgccaacacatgccggagaggtaatgggagcaggaacaggtgaatacggcagcgacatcgagctaaggttgcagactcctcctttaggtaacccctttggtcgcgaggcggaatacaactgatgcttgtatgataatcagtctgactattctattatggacaatttgatatgagcggcgactactcgtgcgacggatgcggcttactcatgtggcgcgggataatacaatacccattgccagatcgtagaaacgaagttcccgagctgccgcaggctaccactaagcgtaaaacttctagaactgctgacggatcctcctgtgagtcgggcatggtacggtagtatgtgcaatccgcaagcgtttcatgtttaacattccatcgcttaagaatcaaattggagtcatatttacactcgccgatgttctcgatgttgttggccaagtaagctcgaaagcggagtccgctctcgtatgggtcgaacagcaggataagcctgttgtgttacgagaacggc

SEQ ID NO: 11826 - DNA, 840 bp, Muscodor strobelii
  misc_feature: SGI cDNA ID NO. 563813
  misc_feature: Encodes the peptide sequence at SEQ ID NO 11827
atgtcggacgagtatgtggatttcatgacgcgccatgccagcgacgcgcaaagacttgacgaacaattcgacatcttcaccgagaacatcggctacctgctccatccctcaattaagtcttccctccccgcctcacccgtcatcgcggacatcgccacgggcaccggccggtttctcgtgcaagccagcgagcagtttccggacggtgttcttgaagggtccgatatatctgccgcctcgttccctccagccggcgaccttccgcacaacgtgacgctctcgatcctcgacatcaagaagccagtccccgaagccttgcgcggacggtacgacgccatccacgtgcgcatgttggtggcgggtatgctacccgacgactggctccccgccgtgtcaaacctggctcagatgctcaagcccggcggctatctacagtggactgagtgcgacttcattacgctgaagcacctacgagctggcgtggactcgagcgttgaccacatccgcgcgctgggccggtccttcggcacagtgctccgcgagcgcttctcgcacggttggaacacacttccggctcacatgcgaacggttgggcttgaaggggtcttcagcgacatcctcagctccgaccgcgtcgccgccacacgacacaagtcgactgtcaacagcatcctcgcgcccctgtcgtcgcttcgccagcaggccaagcggggtcacccgggagccaagacggaggaggagatcgacgcgcttgaggcgaatgtgctgaaagatatacagtccggcgcgtatatacgctatgacatttacgtgacctgtggtcggaagccgctggcttga

SEQ ID NO: 11827 - protein, 279 aa, Muscodor strobelii
  misc_feature: SGI Peptide ID NO. 563813
  misc_feature (49)..(144): Pfam Id: PF08242 Pfam Desc: Methyltransferase domain
  misc_feature (1)..(277): NCBI GI: 255950778 Blast Desc: Pc22g22620 [Penicillium chrysogenum Wisconsin 54-1255] gi|211593173|emb|CAP99550.1| Pc22g22620 [Penicillium chrysogenum Wisconsin 54-1255]
  misc_feature (8)..(209): NCBI GI: 169596262 Blast Desc: SNOG_00888 [Phaeosphaeria nodorum SN15] gi|160701267|gb|EAT92383.2| SNOG_00888 [Phaeosphaeria nodorum SN15]
  misc_feature (9)..(277): NCBI GI: 119489916 Blast Desc: NFIA_061810 [Neosartorya fischeri NRRL 181] gi|119411077|gb|EAW21020.1| conserved [Neosartorya fischeri NRRL 181]
  misc_feature (9)..(277): NCBI GI: 70998749 Blast Desc: methyltransferase [Aspergillus fumigatus Af293] gi|66851733|gb|EAL92058.1| methyltransferase, [Aspergillus fumigatus Af293]
  misc_feature (17)..(277): NCBI GI: 145612725 Blast Desc: MGG_07346 [Magnaporthe grisea 70-15] gi|145019863|gb|EDK04091.1| MGG_07346 [Magnaporthe grisea 70-15]
  misc_feature (9)..(277): NCBI GI: 159127115 Blast Desc: methyltransferase, [Aspergillus fumigatus A1163]
  misc_feature (9)..(148): NCBI GI: 145258266 Blast Desc: An04g06270 [Aspergillus niger] gi|134074595|emb|CAK38888.1| protein product [Aspergillus niger]
  misc_feature (8)..(148): NCBI GI: 226286195 Blast Desc: conserved [Paracoccidioides brasiliensis Pb01]
  misc_feature (4)..(206): NCBI GI: 121701965 Blast Desc: conserved [Aspergillus clavatus NRRL 1] gi|119397390|gb|EAW07821.1| conserved [Aspergillus clavatus NRRL 1]
  misc_feature (8)..(148): NCBI GI: 226291659 Blast Desc: conserved [Paracoccidioides brasiliensis Pb18]
MSDEYVDFMTRHASDAQRLDEQFDIFTENIGYLLHPSIKSSLPASPVIADIATGTGRFLVQASEQFPDGVLEGSDISAASFPPAGDLPHNVTLSILDIKKPVPEALRGRYDAIHVRMLVAGMLPDDWLPAVSNLAQMLKPGGYLQWTECDFITLKHLRAGVDSSVDHIRALGRSFGTVLRERFSHGWNTLPAHMRTVGLEGVFSDILSSDRVAATRHKSTVNSILAPLSSLRQQAKRGHPGAKTEEEIDALEANVLKDIQSGAYIRYDIYVTCGRKPLA

SEQ ID NO: 11828 - DNA, 2847 bp, Muscodor strobelii
  misc_feature: SGI EST ID NO. CUFF.28191.1
  misc_feature: Variant of the nucleotide sequence at SEQ ID NO 11826
atctggatgtaatggatcgagtgcgcatcttgtaggtttgatgtctgcccgggaggaggctccagcgctggtgttttggacgggtccatgcgtgtgaaaagtaatatcacgaacagatctctttcttccgactgcagacggattgaaaatcgcagtaactacgcacgagttgatcgtccatggtttctggctctttctgtatacatgatgagatatcgagggtaagtgtaacgtctaaggcggatttagcagggcatgcagtcatcactgccatcttacaatggcgtgtactgtgtaacatctgcaggcaatcagacgcctcgagctgacggtaggatcgtgatcgagaggtcgctcgtgttcacacgtctcgaaatcacctgaccaaggtggcacaaaatatgctcaaccacggatccgttcggccgatcaatgacggacataggaaatcggttggagtaagccgccgttcctcccttgctttattcatactttattcagacctcagcagtgatgcaggtgcgacgttggccgtgacaccacgattgttctccgccgctctgccactccccgcccactgctcattctgtatccctcgtcctcgttgtgcatctcttgttctaccttgactcaactcaatcctgaatcatccaagcaagcatctcagaaacagaccaagtcaccatgtcggacgagtatgtggatttcatgacgcgccatgccagcgacgcgcaaagacttgacgaacaattcgacatcttcaccgagaacatcggctacctgctccatccctcaattaagtcttccctccccgcctcacccgtcatcgcggacatcgccacgggcaccggccggtttctcgtgcaagccagcgagcagtttccggacggtgttcttgaagggtccgatatatctgccgcctcgttccctccagccggcgaccttccgcacaacgtgacgctctcgatcctcgacatcaagaagccagtccccgaagccttgcgcggacggtacgacgccatccacgtgcgcatgttggtggcgggtatgctacccgacgactggctccccgccgtgtcaaacctggctcagatgctcaagcccggcggctatctacagtggactgagtgcgacttcattacgctgaagcacctacgagctggcgtggactcgagcgttgaccacatccgcgcgctgggccggtccttcggcacagtgctccgcgagcgcttctcgcacggttggaacacacttccggctcacatgcgaacggttgggcttgaaggggtcttcagcgacatcctcagctccgaccgcgtcgccgccacacgacacaagtcgactgtcaacagcatcctcgcgcccctgtcgtcgcttcgccagcaggccaagcggggtcacccgggagccaagacggaggaggagatcgacgcgcttgaggcgaatgtgctgaaagatatacagtccggcgcgtatatacgctatgacatttacgtgacctgtggtcggaagccgctggcttgatcgtatatatcgattcgcggaaacatgccttcatctggcaacgtgttgcccatcacgggcagatatgtgcacctcacttcatcgaaggaaaccgcttcgcgcgtccagttacaactgaatcagcaaatattgtaattagtaaatacaagtgcgtgaattatctgacttaaatcactgggtcttcttggtataggcgatagccaaaagcacgcgatatgttggcaacacagtactcggccgtagtatcatcgcgagcgagattgatctgcaggagttggagccaggatgcggtacacgcgacggacgaatacccgtctcaagtcgaggacctctttgcgcacggatcgtagacccgatagtgatgagaggtgctgtggctagtgctgtggctagcgctgtggcgcggcagataacccgaaaaaatagtgcatcgttgtggatagtccagtacaataaaaaatctaaccgtcctcacctcaatttctatttaccaactagcctgtgatcatttgccgaagtgtatttatacatcagattgaatgatctaccactgcaatgccttcggtctatgaactagcagcacgttcgtcttgcgaaatagtcggtccttctgagggatgtttgcgctattaatttgtgcaggactgactacaacgtgagcctgagactggcaaaccttagatcccagctgaacacaaactgtttcaggaacagattcacgacaagcatcctcatcatctcggaatcttgatgtttagcttgcgactaacgactaatgagctccatgaatgatgtggtatgtgatccttccagagctctacagttcgattgctgtgcctttgatcctatgcgtcctgcgcaagagactgcctattgcctaaacctttaggtaccattctgcacggcattaagttgctcagcacagcaaatatgaatgggggccggtgcactaaaagctaaataagcgttgcatcgagggaacgggttagtacaaggtgctcgtactaatgacagaactccaatatctttttggaatgctatacaataccagcgcgctcacagatgagtcgattgaaatatgcatgggattaacaccggcgattgctccgctttactttccctcagtttatcccattactatggcctattctcagtagctacatcatcgttcaagggctgtcgcgtacagatgacgattctgtgctttgactatgagatacatacagttaatacatatgtatctacacacttcacgcttttcattgatatttaccatgtgtcaattaagcgcagttgccgtacaataaatatgatgaacagcca

SEQ ID NO: 11829 - DNA, 726 bp, Muscodor strobelii
  misc_feature: SGI cDNA ID NO. 563814
  misc_feature: Encodes the peptide sequence at SEQ ID NO 11830
atgaccgaggcagaaagatggaacgacatctacatgacactcttcccggatgacgatccccttgagatcccttcaccttatcatgaatatgtcaactcgatcaatccaatgagcgaagatttgatgagctgcggggctgctttcgcaagatatgaggctttcctccaagaggagcttccaaaaacaatccagaaagagattgaggatgagctcgagattaacttccggatcgacccgatagaatacaagaagatgattgtcgatttgttcaagtcaacacaggcgaaattattccaaacgtttttgaacagagagaagggatccaagcatccgacgcccacaccgaaaaaattgccacaagtttcgccttctcccagggataagaagagttttgatgtatttgaggcatttgctctagaagatccgcccgaggacatgtccttcttgtacgatcagccagcggctagtgacgagaattccagcatgaactttgacgaaaatctctttttcgactggaagcggaaacaatccgatcatactgtacagcgcaatccatctgacatcataccgttaggagagcaattcacttctctcaatcatgagatttcgccgcaacactttctttgggacgcaaataatcatcatgtcaacattttcacgagcctcagtaccgcagaagtcccaagcgacatcacaaccgaccaaattcaaagggatccaagttaa

SEQ ID NO: 11830 - protein, 241 aa, Muscodor strobelii
  misc_feature: SGI Peptide ID NO. 563814
  misc_feature (1)..(218): NCBI GI: 171683689 Blast Desc: protein product [Podospora anserina] gi|170941804|emb|CAP67458.1| protein product [Podospora anserina]
  misc_feature (1)..(101): NCBI GI: 116194256 Blast Desc: CHGG_03726 [Chaetomium globosum CBS 148.51] gi|88179639|gb|EAQ87107.1| CHGG_03726 [Chaetomium globosum CBS 148.51]
MTEAERWNDIYMTLFPDDDPLEIPSPYHEYVNSINPMSEDLMSCGAAFARYEAFLQEELPKTIQKEIEDELEINFRIDPIEYKKMIVDLFKSTQAKLFQTFLNREKGSKHPTPTPKKLPQVSPSPRDKKSFDVFEAFALEDPPEDMSFLYDQPAASDENSSMNFDENLFFDWKRKQSDHTVQRNPSDIIPLGEQFTSLNHEISPQHFLWDANNHHVNIFTSLSTAEVPSDITTDQIQRDPS

SEQ ID NO: 11831 - DNA, 3589 bp, Muscodor strobelii
  misc_feature: SGI EST ID NO. CUFF.28098.0
  misc_feature: Variant of the nucleotide sequence at SEQ ID NO 11829
gaaattttgagacattcagtgtcttaactatcaatatgcctacgttgtattcaaaatgttggggtgaggcagctgacgtggctgtgctgcatgcatgtgcagagggagccagctgggttattcgcaattgcgcaaaactccagtcaggaaccctccaatcctttatcttaccataattcaggcaacattctcttgttctcactagctcggattgtccacacctatcccatattgaagattgaaaataacacgccatgagcagatcgctccgaatgagcgaagcctcaaacgatgcaatcaagaccgaatggtcgatagagcacgacataccaaacgaggctttatcatttgctgagttcgtcgatctacaagaaatactaggatgcagtaacgaaaagagttctagtctcttgaagggttcttcatcgttgagtagcactagagaaacctcaagacgagatgctcccgcgacggataaaagcatcagtgcaaataatgagcgagagcgccaacaggtacagaaacggaaagctacccaacgtgcattccgtaagcgcaaggaacaacacatcaaggatctcgaagccaacttggctagattagaatctactcagactcaggctgcagccgagagtgatgagctcagaggagccctgatcgaattgactgagaggaccaaaactcagcgcggtgtcccaagctttcagacacagcaaatactatctaccgacctattacacatcaaagtctcgataccagtgtctggagttgaagttcgatctccagtgataaagccttccgacttcgtcgagttcaatgctcatctgctagaagctatcgagaatgctgtttccggacacgagtatccctggattccgagtgacaaattcgctgagcacgatgacgatgaagagaacttctgggtgcggtctgcaaaactaaccgctaatattgagtgtgaggagacaacgaagcaaagctgggtacaggaaacggcagctattgtgaccgatcttctcgcttccagcaagtcaacaacgcagtcgtcggggtcgcgagatgaggaagccacattttcttcctcgttttcatatgcgcctccatcatcgcatatttcgcagcccttacactttgaggaacggcacattgaacaagaccactcaagtcttgccgctccatcaaaatcggacacatcatccgacccaggcctcagctctggcccttccattgacgatgacgatgcttcccattgtccaagtatcggaactcctcctattgaggctaatactttcgatactatcaaacagaagacgtggataagcgaaaacattattaaccctacgattaagcgtcctctaccagagtgtccagaaggttatcgcattagttcctacagcccatatctcccgggtcctttcccttcaacgaaagacttttccgcttctgcgcagaccgtcgcagggtcccagtctaccgtttacggaatgaaaaagtgggctaaaaaggcgtggaagaatccagctctaaagcaatcaattattgcagttggtggcgcaagtatggcggagtcgtttggagagacgtgtgcttctggcgccataatcgcgagcagagaatatagttcttatcagcaacatcatcaagtagcccagactgagacgacaactcatcagacgaatgcggtaccaacgaaggctgcgggcgcgcaaagatcacgaaatgggaactcaaccccatcgaaatcaatatcttcctcaccgccaaccacctcaacctcatcacaacagtcgcggaaaaggaaaatttcgagacaaaaggagatggtatccgaagaggacaactctgactctagcgaagataccaggcatgctaaggtatctcgaaactatctaaccgttgagcaaagattcgcctgcccatattttaagagaaatcccacaaaatatgccagtgagaggacctgtgttggaccaggctggaagtcgatcaatcggctaaaagaacacatatatcgccgacatacacttccccggtttaagtgcagtcgttgcggagaagagttccagaagttggaacctcttgtcacccatcagcgatctgcgactccctgcgacatcataattcagcaggactcggagggaattaattcggagcaagaagccaagctaaggtcccgcaaggggatagccaagatgaccgaggcagaaagatggaacgacatctacatgacactcttcccggatgacgatccccttgagatcccttcaccttatcatgaatatgtcaactcgatcaatccaatgagcgaagatttgatgagctgcggggctgctttcgcaagatatgaggctttcctccaagaggagcttccaaaaacaatccagaaagagattgaggatgagctcgagattaacttccggatcgacccgatagaatacaagaagatgattgtcgatttgttcaagtcaacacaggcgaaattattccaaacgtttttgaacagagagaagggatccaagcatccgacgcccacaccgaaaaaattgccacaagtttcgccttctcccagggataagaagagttttgatgtatttgaggcatttgctctagaagatccgcccgaggacatgtccttcttgtacgatcagccagcggctagtgacgagaattccagcatgaactttgacgaaaatctctttttcgactggaagcggaaacaatccgatcatactgtacagcgcaatccatctgacatcataccgttaggagagcaattcacttctctcaatcatgagatttcgccgcaacactttctttgggacgcaaataatcatcatgtcaacattttcacgagcctcagtaccgcagaagtcccaagcgacatcacaaccgaccaaattcaaagggatccaagttaacgactatgcacaagacttccttcgcaatatcatggataagcgtgaaggcgaggagagcgacgaagaaaacttatatgattagttagatcccatatgtaatacaactcgatactccgtttctgctctcctcgtaagctttgaaaagcataccccaattatagctaaaactaagcgacaggagccatacacccatttattggtagctcaattataatgtagattaaagattttatacaagtaatatagaccagaatattgtttcctgatttctcatcaaattcggtactaaacaagccagcgttgttgtatttggactttaccctcttcaatatcagctctcaaactgccctcataaatcatcatatcatgtacatacgcctgcccaatatacaaccaagagctttcaggctcatgacgattacctggcctatccggagctgccttacgcaacaccaccgggacttgtgaaccaagcaccaagcacaccacatctccctctctcgtatctgatggccccagtccgaatcgcccattatttgtcgcaaagaggcgccttcctaaacaggcatcgttacgcgctttttcgtgagcttctctcaagtttgcacctcgtgattctagacttttgtcaggtgccggagctttcgaagttccctgcatagaccccgttg

SEQ ID NO: 11832 - DNA, 1476 bp, Muscodor strobelii
  misc_feature: SGI cDNA ID NO. 563815
  misc_feature: Encodes the peptide sequence at SEQ ID NO 11833
atgagcagatcgctccgaatgagcgaagcctcaaacgatgcaatcaagaccgaatggtcgatagagcacgacataccaaacgaggctttatcatttgctgagttcgtcgatctacaagaaatactaggatgcagtaacgaaaagagttctagtctcttgaagggttcttcatcgttgagtagcactagagaaacctcaagacgagatgctcccgcgacggataaaagcatcagtgcaaataatgagcgagagcgccaacaggtacagaaacggaaagctacccaacgtgcattccgtaagcgcaaggaacaacacatcaaggatctcgaagccaacttggctagattagaatctactcagactcaggctgcagccgagagtgatgagctcagaggagccctgatcgaattgactgagaggaccaaaactcagcgcggtgtcccaagctttcagacacagcaaatactatctaccgacctattacacatcaaagtctcgataccagtgtctggagttgaagttcgatctccagtgataaagccttccgacttcgtcgagttcaatgctcatctgctagaagctatcgagaatgctgtttccggacacgagtatccctggattccgagtgacaaattcgctgagcacgatgacgatgaagagaacttctgggtgcggtctgcaaaactaaccgctaatattgagtgtgaggagacaacgaagcaaagctgggtacaggaaacggcagctattgtgaccgatcttctcgcttccagcaagtcaacaacgcagtcgtcggggtcgcgagatgaggaagccacattttcttcctcgttttcatatgcgcctccatcatcgcatatttcgcagcccttacactttgaggaacggcacattgaacaagaccactcaagtcttgccgctccatcaaaatcggacacatcatccgacccaggcctcagctctggcccttccattgacgatgacgatgcttcccattgtccaagtatcggaactcctcctattgaggctaatactttcgatactatcaaacagaagacgtggataagcgaaaacattattaaccctacgattaagcgtcctctaccagagtgtccagaaggttatcgcattagttcctacagcccatatctcccgggtcctttcccttcaacgaaagacttttccgcttctgcgcagaccgtcgcagggtcccagtctaccgtttacggaatgaaaaagtgggctaaaaaggcgtggaagaatccagctctaaagcaatcaattattgcagttggtggcgcaaacgaatgcggtaccaacgaaggctgcgggcgcgcaaagatcacgaaatgggaactcaaccccatcgaaatcaatatcttcctcaccgccaaccacctcaacctcatcacaacagtcgcggaaaaggaaaatttcgagacaaaaggagatggtatccgaagaggacaactctga

SEQ ID NO: 11833 - protein, 491 aa, Muscodor strobelii
  misc_feature: SGI Peptide ID NO. 563815
  misc_feature (90)..(155): NCBI GI: 145610236 Blast Desc: MGG_02632 [Magnaporthe grisea 70-15] gi|145017583|gb|EDK01946.1| MGG_02632 [Magnaporthe grisea 70-15]
  misc_feature (90)..(155): NCBI GI: 149209749 Blast Desc: MGCH7_ch7g357 [Magnaporthe grisea 70-15] gi|86196312|gb|EAQ70950.1| MGCH7_ch7g357 [Magnaporthe grisea 70-15]
  misc_feature (85)..(145): NCBI GI: 256733587 Blast Desc: NECHADRAFT_67451 [Nectria haematococca mpVI 77-13-4]
  misc_feature (85)..(137): NCBI GI: 116193673 Blast Desc: CHGG_06554 [Chaetomium globosum CBS 148.51] gi|88182467|gb|EAQ89935.1| CHGG_06554 [Chaetomium globosum CBS 148.51]
  misc_feature (83)..(142): NCBI GI: 169606506 Blast Desc: SNOG_06296 [Phaeosphaeria nodorum SN15] gi|160707010|gb|EAT86127.2| SNOG_06296 [Phaeosphaeria nodorum SN15]
  misc_feature (39)..(137): NCBI GI: 242206310 Blast Desc: [Postia placenta Mad-698-R] gi|220731876|gb|EED85716.1| [Postia placenta Mad-698-R]
  misc_feature (83)..(137): NCBI GI: 169843520 Blast Desc: CC1G_08635 [Coprinopsis cinerea okayama7#130] gi|116510427|gb|EAU93322.1| CC1G_08635 [Coprinopsis cinerea okayama7#130]
  misc_feature (82)..(145): NCBI GI: 259148572 Blast Desc: Yap1p [Saccharomyces cerevisiae EC1118]
  misc_feature (82)..(145): NCBI GI: 499193 Blast Desc: par1 [Saccharomyces cerevisiae]
  misc_feature (82)..(145): NCBI GI: 207342465 Blast Desc: YML007Wp-like protein [Saccharomyces cerevisiae AWRI1631]
MSRSLRMSEASNDAIKTEWSIEHDIPNEALSFAEFVDLQEILGCSNEKSSSLLKGSSSLSSTRETSRRDAPATDKSISANNERERQQVQKRKATQRAFRKRKEQHIKDLEANLARLESTQTQAAAESDELRGALIELTERTKTQRGVPSFQTQQILSTDLLHIKVSIPVSGVEVRSPVIKPSDFVEFNAHLLEAIENAVSGHEYPWIPSDKFAEHDDDEENFWVRSAKLTANIECEETTKQSWVQETAAIVTDLLASSKSTTQSSGSRDEEATFSSSFSYAPPSSHISQPLHFEERHIEQDHSSLAAPSKSDTSSDPGLSSGPSIDDDDASHCPSIGTPPIEANTFDTIKQKTWISENIINPTIKRPLPECPEGYRISSYSPYLPGPFPSTKDFSASAQTVAGSQSTVYGMKKWAKKAWKNPALKQSIIAVGGANECGTNEGCGRAKITKWELNPIEINIFLTANHLNLITTVAEKENFETKGDGIRRGQL

SEQ ID NO: 11834 - DNA, 3589 bp, Muscodor strobelii; identical to SEQ ID NO: 11831
  misc_feature: SGI EST ID NO. CUFF.28098.0
  misc_feature: Variant of the nucleotide sequence at SEQ ID NO 11832

SEQ ID NO: 11835 - DNA, 999 bp, Muscodor strobelii
  misc_feature: SGI cDNA ID NO. 563816
  misc_feature: Reduced expression when VOC is produced
  misc_feature: Encodes the peptide sequence at SEQ ID NO 11836
atggcggcaaagcgtccgattatctactacggaacaacgacctacggttcttctcacgtcccaaccctacaagaccccgagtttgcgtccaagttccttgacacagttcgaagtacgggcatcagccagctcgacacagcagcccgatatccaccggacaaccacggcgcttccgagcgtatgctgggcgctgtccatgccgccgacaaaggattcaccatcaacactaaagtgcttttcgccgggcgaaacagcgacggaaccctcagcctcgatgccgtgcgtaaaagcgtcgctactagtcttaaacgactaggtattcagaagatcggcatcttatatgcccattgccctgatgaagttacgccactcgaggagcaggctcaagctctgagtgaacaggtgctactaggaaattgcgagaagtacggcgtatccaacttcccagtcaacacactcgcacaattcctccaaatttgtgaagaaaagaactaccccaagccatcagtctatcaaggccagtacaacctaatctgtcggggtccggagaaagacttgatcccactcctgcgtaaacacaacatgacattcaacgcatactcaccgctgggaggtggtttcctcactgctaaactaacaacgggcaacgcggcgggaacgcgtctgggcagtgcttacggtgcgcatttcacgaatatgtatgatcgtcccgagtatcacgatgctgtgaggggtttgttgagtgtcattgaaccgctgaggatgaaacctactgaggcggcgttgagatgggcggcgtatcattcggtgcttggggaaagtgatgggattatacttggggctacgaaaccagagcagttggttgctaatatggaggatattgaaaaggggtcgctgcctgatgaggttgttgatgtgattgaggggattgggaggagggtggatgagatgggtggtggtgatttcgagattaagccttctatgcttccgcctcaataa

SEQ ID NO: 11836 - protein, 332 aa, Muscodor strobelii
  misc_feature: SGI Peptide ID NO. 563816
  misc_feature (16)..(312): Pfam Id: PF00248 Pfam Desc: Aldo/keto reductase family
  misc_feature (88)..(216): Pfam Id: PF00248 Pfam Desc: Aldo/keto reductase family
  misc_feature (6)..(310): NCBI GI: 242798377 Blast Desc: aldo/keto reductase, [Talaromyces stipitatus ATCC 10500] gi|218716502|gb|EED15923.1| aldo/keto reductase, [Talaromyces stipitatus ATCC 10500]
  misc_feature (6)..(319): NCBI GI: 242816449 Blast Desc: oxidoreductase, [Talaromyces stipitatus ATCC 10500] gi|218715119|gb|EED14542.1| oxidoreductase, [Talaromyces stipitatus ATCC 10500]
  misc_feature (1)..(321): NCBI GI: 46109720 Blast Desc: FG01742.1 [Gibberella zeae PH-1]
  misc_feature (6)..(320): NCBI GI: 154316678 Blast Desc: BC1G_04270 [Botryotinia fuckeliana B05.10] gi|150846070|gb|EDN21263.1| BC1G_04270 [Botryotinia fuckeliana B05.10]
  misc_feature (27)..(316): NCBI GI: 242771299 Blast Desc: aldo/keto reductase, [Talaromyces stipitatus ATCC 10500] gi|218721434|gb|EED20852.1| aldo/keto reductase, [Talaromyces stipitatus ATCC 10500]
  misc_feature (23)..(317): NCBI GI: 256724268 Blast Desc: NECHADRAFT_53519 [Nectria haematococca mpVI 77-13-4]
  misc_feature (26)..(310): NCBI GI: 242799919 Blast Desc: aldo/keto reductase, [Talaromyces stipitatus ATCC 10500] gi|218716824|gb|EED16245.1| aldo/keto reductase, [Talaromyces stipitatus ATCC 10500]
  misc_feature (3)..(314): NCBI GI: 212541014 Blast Desc: aldo/keto reductase, [Penicillium marneffei ATCC 18224] gi|210067961|gb|EEA22053.1| aldo/keto reductase, [Penicillium marneffei ATCC 18224]
  misc_feature (32)..(323): NCBI GI: 255950784 Blast Desc: Pc22g22650 [Penicillium chrysogenum Wisconsin 54-1255] gi|211593176|emb|CAP99553.1| Pc22g22650 [Penicillium chrysogenum Wisconsin 54-1255]
  misc_feature (4)..(314): NCBI GI: 169772957 Blast Desc: [Aspergillus oryzae RIB40] gi|83768808|dbj|BAE58945.1| protein product [Aspergillus oryzae]
  misc_feature (25)..(303): SWISSPROT Homolog: EC 1.1.1.91 Aryl-alcohol dehydrogenase (NADP(+))
  misc_feature: Useful for introducing or modulating the production of volatile compounds
MAAKRPIIYYGTTTYGSSHVPTLQDPEFASKFLDTVRSTGISQLDTAARYPPDNHGASERMLGAVHAADKGFTINTKVLFAGRNSDGTLSLDAVRKSVATSLKRLGIQKIGILYAHCPDEVTPLEEQAQALSEQVLLGNCEKYGVSNFPVNTLAQFLQICEEKNYPKPSVYQGQYNLICRGPEKDLIPLLRKHNMTFNAYSPLGGGFLTAKLTTGNAAGTRLGSAYGAHFTNMYDRPEYHDAVRGLLSVIEPLRMKPTEAALRWAAYHSVLGESDGIILGATKPEQLVANMEDIEKGSLPDEVVDVIEGIGRRVDEMGGGDFEIKPSMLPPQ

SEQ ID NO: 11837 - DNA, 2198 bp, Muscodor strobelii
  misc_feature: SGI EST ID NO. CUFF.28329.0
  misc_feature: Variant of the nucleotide sequence at SEQ ID NO 11835
tcagtttagcatgagaggaattatctccaatgctttcatgagtagtattactgttgttcaagatcgactatcatgcagcatcatgcttagtataattttttctcaatcatctcgatctttcttgagtttatcaaattggatactactgacgcatccaatgaaagggtcctacaagtctcagttttgctcacgccttcctggcatacaatcgatactggtgaccattcttccacaagagctgaccctagtcacagtcatattagccttctcaagatgcagtgtttaccacggctgggaagatattcatcctgagaatcgtagaacaatattgactgaggacttgatgtagcctcgcgcattattggctgtctcatggagtatatcacacgatgccccactttcggcattcgcataagacgtctcgacgactactacaaccatgacatcgcgctttgtcgctctcgcgttagcatgaaggcatctttcagggctttcaatgaagagattgagaacagatgagggtgagagcacgatgcgggtttcacggacgacccatggtcttctggctattgccactgcgagtgagatggatttacgtataaatatgaagagggacgccggcatcggcacaggacaatgatcgggacaactaccatcacgaacgctgctgtgatcattgcgactcttttgtcctcatcttacccatcggcctcatcctccggcatacttatctaaacaccaagaggcactgttgagctgatatttagtctcctcgtcttcgagttataccacaacctttgaagtcattggggtttctgctatgtccaagatggcggcaaagcgtccgattatctactacggaacaacgacctacggttcttctcacgtcccaaccctacaagaccccgagtttgcgtccaagttccttgacacagttcgaagtacgggcatcagccagctcgacacagcagcccgatatccaccggacaaccacggcgcttccgagcgtatgctgggcgctgtccatgccgccgacaaaggattcaccatcaacactaaagtgcttttcgccgggcgaaacagcgacggaaccctcagcctcgatgccgtgcgtaaaagcgtcgctactagtcttaaacgactaggtattcagaagatcggcatcttatatgcccattgccctgatgaagttacgccactcgaggagcaggctcaagctctgagtgaacaggtgctactaggaaattgcgagaagtacggcgtatccaacttcccagtcaacacactcgcacaattcctccaaatttgtgaagaaaagaactaccccaagccatcagtctatcaaggccagtacaacctaatctgtcggggtccggagaaagacttgatcccactcctgcgtaaacacaacatgacattcaacgcatactcaccgctgggaggtggtttcctcactgctaaactaacaacgggcaacgcggcgggaacgcgtctgggcagtgcttacggtgcgcatttcacgaatatgtatgatcgtcccgagtatcacgatgctgtgaggggtttgttgagtgtcattgaaccgctgaggatgaaacctactgaggcggcgttgagatgggcggcgtatcattcggtgcttggggaaagtgatgggattatacttggggctacgaaaccagagcagttggttgctaatatggaggatattgaaaaggggtcgctgcctgatgaggttgttgatgtgattgaggggattgggaggagggtggatgagatgggtggtggtgatttcgagattaagccttctatgcttccgcctcaataaggttgatcgttctgagaaataggcgggcataaaattgactacttagtattagagttgtgagttcattagaactgtgaaggcgattaggatagttccgtgcgttgtagggttatataaggtgttgtttccgattcatgatagcagatgttttaggtgtctcgaaatcacacatgttccgataattctgcatttggtgtctgtaaagcgacttatatataccgtatagtcgatacgcatgaggagtccaaccggggcaacttatgctattttcctcacacaggtttcaattaatggcgtccattactgcttattcttacctcactttcttacatgcctaagataagctgggggaatatctggcgaacttgcg

SEQ ID NO: 11838 - DNA, 906 bp, Muscodor strobelii
  misc_feature: SGI cDNA ID NO. 563817
  misc_feature: Reduced expression when VOC is produced
  misc_feature: Encodes the peptide sequence at SEQ ID NO 11839
atgaaggtgttttcgtattggatcttcccgatagtgtcgggcgtcgcatggctcgcgacgctgctgaccatgttcatctactggaaggcaagcgacgaccacttccctagtcaagcgggcgacatcccctacatctccgacattggcgcctcgcgactcaagcccttgttcatcgtcggttcggtcctcaccaccgtctttctcgacgccgccttcatctccgatcgtctgctacgccacaagggacgcctagtacctaacgcatcgctcggcgagaagatcctctccggcctgtccctcgtcttcgccgctgtcggcaccatcggcctgacctttctgtcggggttcgacgtctaccaccataagacgctgcatgacagtttcctcgtgctgttcataggaggctacctactctctgccatcttcctctgctgggagttccagagactgggcaagaaataccggcagcaccgcatccttcgcgcctccttctggatcaagctcacattcgtcctcgtcgaactcgccctcgctattgcctttgtcgtcttcagttttagaaagatttacaacgaggccgcaatcctggagtgggttatttcgctcgtcttcacattctacgtcatgtccttcatcatcgatctatggcctgccgttgccacaaagcaaggcggccgctacgacttgagacccatgaacaccaacgacatcgaaaccgccgtccgcgaaggccacatcgccaccgctgctgagcttgctctgccccgtcatactgctgatagcgagcgaaccttgaacgacggcacgaatccacaggtcgtacccgctgctgccggcgctgctcctctcggcgagaagtctaatggaaattctaagaaaggccgtaagacgcacgttgatttctag

SEQ ID NO: 11839 - protein, 301 aa, Muscodor strobelii
  misc_feature: SGI Peptide ID NO. 563817
  misc_feature (1)..(232): NCBI GI: 39972361 Blast Desc: MGG_07482 [Magnaporthe grisea 70-15] gi|145016670|gb|EDK01100.1| MGG_07482 [Magnaporthe grisea 70-15]
  misc_feature (1)..(222): NCBI GI: 171692875 Blast Desc: protein product [Podospora anserina] gi|170946386|emb|CAP73187.1| protein product [Podospora anserina]
  misc_feature (8)..(243): NCBI GI: 85099236 Blast Desc: NCU03660 [Neurospora crassa OR74A] gi|16944460|emb|CAD11343.1| conserved [Neurospora crassa] gi|28922260|gb|EAA31504.1| conserved [Neurospora crassa OR74A]
  misc_feature (3)..(222): NCBI GI: 46126095 Blast Desc: FG07425.1 [Gibberella zeae PH-1]
  misc_feature (1)..(249): NCBI GI: 261355645 Blast Desc: conserved [Verticillium albo-atrum VaMs.102]
  misc_feature (1)..(279): NCBI GI: 242808942 Blast Desc: FK506 suppressor Sfk1, [Talaromyces stipitatus ATCC 10500] gi|218715891|gb|EED15313.1| FK506 suppressor Sfk1, [Talaromyces stipitatus ATCC 10500]
  misc_feature (5)..(298): NCBI GI: 189193701 Blast Desc: conserved [Pyrenophora tritici-repentis Pt-1C-BFP] gi|187978753|gb|EDU45379.1| conserved [Pyrenophora tritici-repentis Pt-1C-BFP]
  misc_feature (1)..(227): NCBI GI: 240106556 Blast Desc: CPC735_000880 [Coccidioides posadasii C735 delta SOWgp]
  misc_feature (1)..(272): NCBI GI: 212537527 Blast Desc: FK506 suppressor Sfk1, [Penicillium marneffei ATCC 18224] gi|210068661|gb|EEA22752.1| FK506 suppressor Sfk1, [Penicillium marneffei ATCC 18224]
  misc_feature (5)..(292): NCBI GI: 156030488 Blast Desc: SS1G_14468 [Sclerotinia sclerotiorum 1980] gi|154700859|gb|EDO00598.1| SS1G_14468 [Sclerotinia sclerotiorum 1980]
  misc_feature: Useful for introducing or modulating the production of volatile compounds
MKVFSYWIFPIVSGVAWLATLLTMFIYWKASDDHFPSQAGDIPYISDIGASRLKPLFIVGSVLTTVFLDAAFISDRLLRHKGRLVPNASLGEKILSGLSLVFAAVGTIGLTFLSGFDVYHHKTLHDSFLVLFIGGYLLSAIFLCWEFQRLGKKYRQHRILRASFWIKLTFVLVELALAIAFVVFSFRKIYNEAAILEWVISLVFTFYVMSFIIDLWPAVATKQGGRYDLRPMNTNDIETAVREGHIATAAELALPRHTADSERTLNDGTNPQVVPAAAGAAPLGEKSNGNSKKGRKTHVDF

SEQ ID NO: 11840 - DNA, 1806 bp, Muscodor strobelii
  misc_feature: SGI EST ID NO. CUFF.28466.1
  misc_feature: Variant of the nucleotide sequence at SEQ ID NO 11838
cggtgcaggggtcagcggagagtgtgaagtcatacaccaagatcgagtcgggtcgatcgagcagcccgcttttccgaacaaaaacaccatcgagaaggcacacgaccaagatgtctttttcttggggtcttctcttctcattgccgcatcattcttagccatttccccccttgtttcctgccttttctcgatctcatagtatatcaatctattccattcgctaatcgtcagggggataggcacaggactacagtcgccatgaaggtgttttcgtattggatcttcccgatagtgtcgggcgtcgcatggctcgcgacgctgctgaccatgttcatctactggaaggcaagcgacgaccacttccctagtcaagcgggcgacatcccctacatctccgacattggcgcctcgcgactcaagcccttgttcatcgtcggttcggtcctcaccaccgtctttctcgacgccgccttcatctccgatcgtctgctacgccacaagggacgcctagtacctaacgcatcgctcggcgagaagatcctctccggcctgtccctcgtcttcgccgctgtcggcaccatcggcctgacctttctgtcggggttcgacgtctaccaccataagacgctgcatgacagtttcctcgtgctgttcataggaggctacctactctctgccatcttcctctgctgggagttccagagactgggcaagaaataccggcagcaccgcatccttcgcgcctccttctggatcaagctcacattcgtcctcgtcgaactcgccctcgctattgcctttgtcgtcttcagttttagaaagatttacaacgaggccgcaatcctggagtgggttatttcgctcgtcttcacattctacgtcatgtccttcatcatcgatctatggcctgccgttgccacaaagcaaggcggccgctacgacttgagacccatgaacaccaacgacatcgaaaccgccgtccgcgaaggccacatcgccaccgctgctgagcttgctctgccccgtcatactgctgatagcgagcgaaccttgaacgacggcacgaatccacaggtcgtacccgctgctgccggcgctgctcctctcggcgagaagtctaatggaaattctaagaaaggccgtaagacgcacgttgatttctagaagaattcgctgtccgggggctggctttatggttcgtgcacgccgaagagcgagatatcgatgtttcaagattcgcccaccctcgccggtgacggcttagagtctcagggctcactcacaacggtgatagaagttcctgagtcccagaatctcatcaacagttggtacacatgtgcgcgagtcggcgatactatacagttcaaagtaactgtccccatacctccaaggggggttgtgacgaagctgccgcctatccagttcatacttgtgacatgataataggcgttatggagagcaaatgacacataaacgaggatgaagcattacatggacggcgttgggcgtgtcttctttgtataccttttgatttcattgcattgagcggcgacggtgctcagatcctgatagaaatatcctaggtttgcatagtataatcaataattgcatgattatccaacagcactcgtcatgttgcttatgtaaggcagctttggtgattctgaatcgaatcatgttgtagcctaactactaggtaggcactacgggaatagaaattacacgtaaatctgacacatttcgtcaaaactgcggcgcgggggttgtgacatcttgtttagtaatgctatgaaacgaatgggacgc

SEQ ID NO: 11841 - DNA, 1851 bp, Muscodor strobelii
  misc_feature: SGI cDNA ID NO. 563818
  misc_feature: Encodes the peptide sequence at SEQ ID NO 11842
atgtcttcgactacgaagcgcaacggcgatagtcgcaaagttgcgtcgatcaagaattattttaggtctacaaaaccgcaaacaggaggatcacacaaggcaagccccggttcgcagagttttcccaatatagccgaatcacatttccttgacgtcggtcctgacacgcaaataattacttcgagaaaacggaaggcgtcaacttctgctccttcttctcctgtttcgctgcgtcctgagcggaagcgtccagctctagaaagagcactgtctgggacagcaaatgtattcgcgcacctcccgctctcgagcccatccgactcttcgtccgcacttacaaaagccttctctctgctcttcgcaaaacctagtcaagaagacgataactctagtcttggcagcgctttcgaccgaggtgtgtcagtatcatcacgaagcaccgacagtctggccaatcgaagcaacaaagctcgggctcctggagcccgagcacggagagacgccgcggatgcaaggagagtgttgcaaacgataagagaattccaggaaaagaaatacgtgcctaagaagtacggtgttggtggagaatacttagttcagagaacacttcatccctcaggctataagctgttgcgtgaggtagagttgaagcgacccgagaatagtgaagtcctggaatacttcaactccgatgagttccatttcgaatacaatcgtcgccctgttaaaggatacaaacagtttgtcatccgcatgccatcgacgttccacgaatctatggctggaagatttagtgatgtaataagagactggttggccgagatcaagaagggggccttatgcacgatcgagcgcactagaggcgagaccgtgcggattgctgaatcaatcgcgtctactctagcaactagagtacatatggatgagcctcgtgacgatcatctcgaacctgatctttcctttacttatgagaactgtatcgttgctgatctagtggtcgaagtggcatggtcgcagagcaagctgaaattaccagatcgggctataaggttcattgaaggtacgaagggtgcaattcgaactgtgattggattagagatgaatgatatttaccgcgggggacaaagagcgacattttctgtgtggaaatctcagctagatggcaaagaatggaaatgcaccacatcagtcaataataaggtgagagaaacatccctctccatctcataccacattttccgaacgcagtctaacctaggccaggaattcattgatgaagccggcgatcctataacattagcagactgcgtactatcattgtctctctctgatttcctatgcgaagaagaaggaagtgaggtgggggagtttgagaatctcacacttgagatatcctcgactaagctccatgatatttacaaaaaggcattcaggacgcatgtcatgggcgagtcaagccgccagattgagaagttggagacgaaagtaagtgaaaatcttcggaaaatcgccgacgtaatagatatgatgacagagggaggaggtgagaatgtacgggaccagatagttatgtcagaggaaaaggtaggtgaagtcaatacaattataggagagattgaagagtcagtgactggcatcagagacaagacgaagacagtgcaagagaacatggacaagatacccaacaagattggaaaagtagagaaagcaagaattacgctggaaggaaaggtggcagacctagaagcgaggtttgttgaaatacaagccatacaagggaggatcgttgtgaagacagtgaagacgctacgctcgtttttcggacatcagtcgaggaaacggttgaagtag

SEQ ID NO: 11842 - protein, 616 aa, Muscodor strobelii
  misc_feature: SGI Peptide ID NO. 563818
  misc_feature (225)..(456): NCBI GI: 159122793 Blast Desc: AFUB_097650 [Aspergillus fumigatus A1163] gi|159122830|gb|EDP47951.1| AFUB_098020 [Aspergillus fumigatus A1163]
  misc_feature (225)..(456): NCBI GI: 70986544 Blast Desc: AFUA_7G08520 [Aspergillus fumigatus Af293] gi|66846393|gb|EAL86725.1| AFUA_7G08520 [Aspergillus fumigatus Af293]
  misc_feature (203)..(472): NCBI GI: 255944385 Blast Desc: Pc20g04100 [Penicillium chrysogenum Wisconsin 54-1255] gi|211587695|emb|CAP85739.1| Pc20g04100 [Penicillium chrysogenum Wisconsin 54-1255]
  misc_feature (228)..(476): NCBI GI: 255932901 Blast Desc: Pc12g11010 [Penicillium chrysogenum Wisconsin 54-1255] gi|211582540|emb|CAP80728.1| Pc12g11010 [Penicillium chrysogenum Wisconsin 54-1255]
MSSTTKRNGDSRKVASIKNYFRSTKPQTGGSHKASPGSQSFPNIAESHFLDVGPDTQIITSRKRKASTSAPSSPVSLRPERKRPALERALSGTANVFAHLPLSSPSDSSSALTKAFSLLFAKPSQEDDNSSLGSAFDRGVSVSSRSTDSLANRSNKARAPGARARRDAADARRVLQTIREFQEKKYVPKKYGVGGEYLVQRTLHPSGYKLLREVELKRPENSEVLEYFNSDEFHFEYNRRPVKGYKQFVIRMPSTFHESMAGRFSDVIRDWLAEIKKGALCTIERTRGETVRIAESIASTLATRVHMDEPRDDHLEPDLSFTYENCIVADLVVEVAWSQSKLKLPDRAIRFIEGTKGAIRTVIGLEMNDIYRGGQRATFSVWKSQLDGKEWKCTTSVNNKVRETSLSISYHIFRTQSNLGQEFIDEAGDPITLADCVLSLSLSDFLCEEEGSEVGEFENLTLEISSTKLHDIYKKAFRTHVMGESSRQIEKLETKVSENLRKIADVIDMMTEGGGENVRDQIVMSEEKVGEVNTIIGEIEESVTGIRDKTKTVQENMDKIPNKIGKVEKARITLEGKVADLEARFVEIQAIQGRIVVKTVKTLRSFFGHQSRKRLK

SEQ ID NO: 11843 - DNA, 669 bp, Muscodor strobelii
  misc_feature: SGI cDNA ID NO. 563819
  misc_feature: Encodes the peptide sequence at SEQ ID NO 11844
atggatcccgtcggaaccactcaccgcagtgagccagagcctacggccgagccggtttcttctagcgctgcaacagagtttgaatctatgtttgggtattctgttgatcaagctgcacaaaattggggctcgtggctcgtggcgcctgagcccggtcaaagctctctgttagtacgtcaagttgagctcgaagctttcaagcactttgatacagttagactggagcgaaagaaaaggcttaagaacgtcgagaaacgtgctggtgttatgagaaccctcaacgagttgagtctgcacatgtactcgctgtattccgaagatgagaaccacagagcgggtttctatcgtgccaggcgccctgaggcctgggaaattttcaaagaggagaaagctagggcaagggaagcttgcgattctgttcttcgcgaacaccagctagaatgcgacgaagaactcctcaagttcatatttcttagggcgctggtcaatgcaaggtcgtggcactgcgcagaagagaacgaagagtttgacatcgactattctaaggagaactacagcaagctgcttaagttgcttcaattccttatcaagcatgccgacgaggaagcagtaataagcaaatacgttatggaaaggaaggcgactagagagaggcgtcgggcagaataa

SEQ ID NO: 11844 - protein, 222 aa, Muscodor strobelii
  misc_feature: SGI Peptide ID NO. 563819
MDPVGTTHRSEPEPTAEPVSSSAATEFESMFGYSVDQAAQNWGSWLVAPEPGQSSLLVRQVELEAFKHFDTVRLERKKRLKNVEKRAGVMRTLNELSLHMYSLYSEDENHRAGFYRARRPEAWEIFKEEKARAREACDSVLREHQLECDEELLKFIFLRALVNARSWHCAEENEEFDIDYSKENYSKLLKLLQFLIKHADEEAVISKYVMERKATRERRRAE

SEQ ID NO: 11845 - DNA, 464 bp, Muscodor strobelii
  misc_feature: SGI EST ID NO. CUFF.28143.0
  misc_feature: Variant of the nucleotide sequence at SEQ ID NO 11843
cgagtatagtacacaagcttattgctccagatcatcttgttcgtttctcttgcatcccttcacacaccacagctagtacagagcacaaaagctttgttcacatcccgattggctgtagagacacaccagtcatggatcccgtcggaaccactcaccgcagtgagccagagcctacggccgagccggtttcttctagcgctgcaacagagtttgaatctatgtttgggtattctgttgatcaagctgcacaaaattggggctcgtggctcgtggcgcctgagcccggtcaaagctctctgttagtacgtcaagttgagctcgaagctttcaagcactttgatacagttagactggagcgaaagaaaaggcttaagaacgtcgagaaacgtgctggtgttatgagaaccctcaacgagttgagtctgcacatgtactcgctgtattccgaagatgagaaccacaga

SEQ ID NO: 11846 - DNA, 2607 bp, Muscodor strobelii
  misc_feature: SGI cDNA ID NO. 563820
  misc_feature: Encodes the peptide sequence at SEQ ID NO 11847
atggatagttctacagcatttgtgtgcgaatatctttatgacgtgtctccgagaacggcacatattgataattacgggcagatactcgacatcactccttacactatagagcgaggaggccaacttctagggggcctgagcccctcaacgctagctcgtcaactattgaacgatctatcctcggcttccgcacttgaaatcggcgctttaaccaacgtcgacgaggttgatctgtttgctgaggatatcgttcttgcaaacagcacatatgtgttgattcttgatgatttctttaacctcttgaccgcagtactacggccaaataacttctattttttgctcagccccgacgcagtattgacgaacacaaagcatctgcacagtatcctgtcagcccagtttgcgaaaattaaccttatgagctcctccaaggatcggatcgctagtattgtatatactaccgaaccgcgattgcatattcagcgcctgtcgttttacgggttgactgtaactacggcagctatgatcttgttaacgagcatattgcttgttcttgcaccaagcacgaatctgactcgcgatccaggatctattgggagccttgctacgatactggcgcgcagtcacatcctgtgtagcggcttattctgcttcgggtcgccgtcgatgatttccctgcgccgaagcttactgggtacgttatgccgtacaacgatggactacaatgcttccacccccgtgttcaaaatctgcctagtcaagccaaaagagcaagcgattgagcatgatttgattccattgagggaaatgcagtcacgcaaactaggtcgagttgcatggtgggatccatggcaactacgggttactttcaagtccttattgctcctcttcctggccacattggtcattgcactagcagtcttggctaggatgtctgctaagcaagatggtcttgcatttgttcgcgatgatgaatatgctcactacgcctggacttaccttccgacactagtgctgatagcacttcacacatggatagacagtcttctttccctgtaccaaaacctactaccttactctaagcttcgaaataggtccacagatactagatctgccctcttcgataaaaacccctcgcgtcttactatacaaaattttatcgacaatcttcgcggtaagcaatgggcgccttctttagctttgctctcactgctggtagccccatttcttaccacagttgcaagcggtctttactcggcaaaaccggttccatcttccactgcggttgaaatgacacctacgagtgcgttcaacacttcgttctacgcgcaatatagcgacacagacgttaaatggaaaggcttgggcgcagctcagattgtcaatgttatatacgcatttgacctgcccgagccaccatggacatatgggccttttgctttcaatgagatttataatttagataacagtgccgaattgtcgacagccgataacttgcaaattcgagttccagccgttagagcgcccgttaagtgcacacaagtcgattcagataatctgaatctaaccttggccaacccgcattacgacaaatgggaagcgacggtccgttggtcttctccggtgaagccttcttgttccagcgcttggagtttcaggctttcattccctttaaatacgagtaagtctttcggaaggtttacttggcttccattcgaggccgaccagaacgaagactgcccatcttcggctatcgtatacggtctaattaacaaaacgtcgacaaacattaagttgttattgtgtacaacgcctgtcgaacagctggaggtcgagaccacattctcacccttggatcacagagttctgaatgccactcctgacgaacgcactgtaagatccttcacaagcgtgagcaatgcatacgttccagggttctgggggtttcaagatcatttaatggattgtaaaacgtgctggtacaacactgcttggtacggacctgatacgaattactcggatgaagtatatgagtacgcagatgcgtataccgatcgcgttttcaggttattgttctcctggaacagtcaacttcaagctcatgacctggttccgaatccctcatccaccgatgccgcgacagcaaagatcatttctgcactctccaacctgactggcgtgatccacgcgcaatatatcaacctcgcggggcgcgtccagctgcctacgatctcagatcagtcgcaacagcttttcaatggaacgctccatggacatgactgtctacgcgttcagcaaaatgctatctcaacctatattctagaagcgctgcttgtgatcatcatcatctccatcggtgtcctatcctggtctgtgagtacaaaggagctactgccatataaaccgtgcagtatcgctgcggctgccagtcttctagcaggctcaaagatgctgcaacagattcctctcggggcagaattcatcgagcgcgacgaatacttggcattacttccagtcttccgcgacaactcgtttagtatggggtggtggggtgatgacaagagtacggcgagatttggtatcgacctaggtgcatgcacaagctaa

SEQ ID NO: 11847 - protein, 868 aa, Muscodor strobelii
  misc_feature: SGI Peptide ID NO. 563820
  misc_feature (2)..(867): NCBI GI: 145248079 Blast Desc: An13g01490 [Aspergillus niger] gi|134081037|emb|CAK41549.1| protein product [Aspergillus niger]
  misc_feature (6)..(864): NCBI GI: 238504406 Blast Desc: conserved [Aspergillus flavus NRRL3357] gi|220690905|gb|EED47254.1| conserved [Aspergillus flavus NRRL3357]
  misc_feature (29)..(864): NCBI GI: 169764361 Blast Desc: [Aspergillus oryzae RIB40] gi|83764506|dbj|BAE54650.1| protein product [Aspergillus oryzae]
  misc_feature (118)..(851): NCBI GI: 238845466 Blast Desc: conserved [Microsporum canis CBS 113480]
  misc_feature (133)..(850): NCBI GI: 240110383 Blast Desc: CPC735_064150 [Coccidioides posadasii C735 delta SOWgp]
  misc_feature (118)..(854): NCBI GI: 115400976 Blast Desc: [Aspergillus terreus NIH2624] gi|114190017|gb|EAU31717.1| [Aspergillus terreus NIH2624]
  misc_feature (133)..(850): NCBI GI: 119180568 Blast Desc: CIMG_08905 [Coccidioides immitis RS]
  misc_feature (131)..(827): NCBI GI: 258573005 Blast Desc: [Uncinocarpus reesii 1704] gi|237900950|gb|EEP75351.1| [Uncinocarpus reesii 1704]
  misc_feature (157)..(824): NCBI GI: 255944265 Blast Desc: Pc20g03490 [Penicillium chrysogenum Wisconsin 54-1255] gi|211587635|emb|CAP85678.1| Pc20g03490 [Penicillium chrysogenum Wisconsin 54-1255]
  misc_feature (124)..(864): NCBI GI: 239610037 Blast Desc: conserved [Ajellomyces dermatitidis ER-3]
MDSSTAFVCEYLYDVSPRTAHIDNYGQILDITPYTIERGGQLLGGLSPSTLARQLLNDLSSASALEIGALTNVDEVDLFAEDIVLANSTYVLILDDFFNLLTAVLRPNNFYFLLSPDAVLTNTKHLHSILSAQFAKINLMSSSKDRIASIVYTTEPRLHIQRLSFYGLTVTTAAMILLTSILLVLAPSTNLTRDPGSIGSLATILARSHILCSGLFCFGSPSMISLRRSLLGTLCRTTMDYNASTPVFKICLVKPKEQAIEHDLIPLREMQSRKLGRVAWWDPWQLRVTFKSLLLLFLATLVIALAVLARMSAKQDGLAFVRDDEYAHYAWTYLPTLVLIALHTWIDSLLSLYQNLLPYSKLRNRSTDTRSALFDKNPSRLTIQNFIDNLRGKQWAPSLALLSLLVAPFLTTVASGLYSAKPVPSSTAVEMTPTSAFNTSFYAQYSDTDVKWKGLGAAQIVNVIYAFDLPEPPWTYGPFAFNEIYNLDNSAELSTADNLQIRVPAVRAPVKCTQVDSDNLNLTLANPHYDKWEATVRWSSPVKPSCSSAWSFRLSFPLNTSKSFGRFTWLPFEADQNEDCPSSAIVYGLINKTSTNIKLLLCTTPVEQLEVETTFSPLDHRVLNATPDERTVRSFTSVSNAYVPGFWGFQDHLMDCKTCWYNTAWYGPDTNYSDEVYEYADAYTDRVFRLLFSWNSQLQAHDLVPNPSSTDAATAKIISALSNLTGVIHAQYINLAGRVQLPTISDQSQQLFNGTLHGHDCLRVQQNAISTYILEALLVIIIISIGVLSWSVSTKELLPYKPCSIAAAASLLAGSKMLQQIPLGAEFIERDEYLALLPVFRDNSFSMGWWGDDKSTARFGIDLGACTS

SEQ ID NO: 11848 - DNA, 183 bp, Muscodor strobelii
  misc_feature: SGI EST ID NO. CUFF.28155.0
  misc_feature: Variant of the nucleotide sequence at SEQ ID NO 11846
ccaacttctagggggcctgagcccctcaacgctagctcgtcaactattgaacgatctatcctcggcttccgcacttgaaatcggcgctttaaccaacgtcgacgaggttgatctgtttgctgaggatatcgttcttgcaaacagcacatatgtgttgattcttgatgatttctttaacctctt

SEQ ID NO: 11849 - DNA, 1365 bp, Muscodor strobelii
  misc_feature: SGI cDNA ID NO. 563821
  misc_feature: Encodes the peptide sequence at SEQ ID NO 11850
atggaccgagggaagaggcctgctagccgatttgatgatctagattttccagacgagatctatggcggggaccctgagaaaaatgattcatatgagttagacaaacatcagtcagggctgtcggatatgttggcagcattcccgcctccggccagccggcgtagcatgcgacagagcgttacttcctggccattacctagacgggcctcgcgcggtccgacacgagtcacggaaagaaccattgattctgagccgtcggaaccgcctgctgagaaaaaacgaaggtgctgcggcctgccgctgtggggtttctggcttgtccttctcatctttctaatcatcattgctgctgccgttgtgatcccagtcgagctgctcgtagtccacaagaacgacggcaaatcgagtcccgcacagagctgcatggatcagctgacatgtgctaatggtggcaccaacgttgtaagccagggtgtatgctcttgtatctgtgctaacggctttacgggcacaaactgcactattcccacgacgcagggatgcactactacgaccttacaagccggcgatacgagcatccaaaatgtcacaattggacaagcgattccccgcctagtcttagacgcgaattcaaatttctcgatccctctagaggcaaccgaaatcatatcgaaattcagttcatccaacctctcgtgcaataccgaaaatgctctagtaacattcaatggcgtatcggctgccaccgaaaaccaggtcacggatagtctcgacattggcgatgatgattcgtccctcacacacgctgtggtcacaggcttacgtgcgaacgaacgcatcaccctaactatcctacccgatagtgatgccaccattatcctcagcgagccgactggggcgggcagtgtcttcatcacgacgctaacagctccaaccacttttacgggccaagtcactaccatactcgccaagtcttacacagtcacgccatcaacagagcctaccgaaacaggctaccctactggaactccaccaacgaccatgtcgacttcgacgacatcaaagccgaccagcacaaccatgagctcgagcaagacaacatcgtcgacaagctcgccaactgccacgttcactgcttcagatcagactttcgacttcgcacgaatcgctgtcctttttgtattgcaggagaagtcagtggatgaggcttcgtcggcacaaactgagctccagaatttctttagcagcaatccgacgacagccaacgccaagaacgtgactctcggcgataacacttcagtcgatctggtgaattatatcgttgacgtgggagctggcaaaataggcgggaacaaatcagactaa

SEQ ID NO: 11850 - protein, 454 aa, Muscodor strobelii
  misc_feature: SGI Peptide ID NO. 563821
  misc_feature (1)..(443): NCBI GI: 116193459 Blast Desc: CHGG_06447 [Chaetomium globosum CBS 148.51] gi|88182360|gb|EAQ89828.1| CHGG_06447 [Chaetomium globosum CBS 148.51]
  misc_feature (1)..(451): NCBI GI: 256733985 Blast Desc: NECHADRAFT_35748 [Nectria haematococca mpVI 77-13-4]
  misc_feature (1)..(451): NCBI GI: 46128261 Blast Desc: FG08508.1 [Gibberella zeae PH-1]
  misc_feature (1)..(449): NCBI GI: 39970477 Blast Desc: MGG_02705 [Magnaporthe grisea 70-15] gi|149209933|ref|XP_001522341.1| MGCH7_ch7g448 [Magnaporthe grisea 70-15] gi|86196403|gb|EAQ71041.1| MGCH7_ch7g448 grisea
  misc_feature (1)..(244): NCBI GI: 171684851 Blast Desc: protein product [Podospora anserina] gi|170942386|emb|CAP68038.1| protein product [Podospora anserina]
  misc_feature (1)..(243): NCBI GI: 85113437 Blast Desc: NCU02165 [Neurospora crassa OR74A] gi|28926309|gb|EAA35288.1| [Neurospora crassa OR74A]
  misc_feature (1)..(449): NCBI GI: 154322312 Blast Desc: BC1G_01303 [Botryotinia fuckeliana B05.10] gi|150850550|gb|EDN25743.1| BC1G_01303 [Botryotinia fuckeliana B05.10]
  misc_feature (1)..(449): NCBI GI: 156046743 Blast Desc: SS1G_09456 [Sclerotinia sclerotiorum 1980] gi|154693851|gb|EDN93589.1| SS1G_09456 [Sclerotinia sclerotiorum 1980]
  misc_feature (6)..(397): NCBI GI: 67537194 Blast Desc: AN4767.2 [Aspergillus nidulans FGSC A4] gi|40741619|gb|EAA60809.1| AN4767.2 [Aspergillus nidulans FGSC A4] gi|259482390|tpe|CBF76828.1| TPA: conserved [Aspergillus FGSC
  misc_feature (1)..(450): NCBI GI: 225685236 Blast Desc: conserved [Paracoccidioides brasiliensis Pb03]
MDRGKRPASRFDDLDFPDEIYGGDPEKNDSYELDKHQSGLSDMLAAFPPPASRRSMRQSVTSWPLPRRASRGPTRVTERTIDSEPSEPPAEKKRRCCGLPLWGFWLVLLIFLIIIAAAVVIPVELLVVHKNDGKSSPAQSCMDQLTCANGGTNVVSQGVCSCICANGFTGTNCTIPTTQGCTTTTLQAGDTSIQNVTIGQAIPRLVLDANSNFSIPLEATEIISKFSSSNLSCNTENALVTFNGVSAATENQVTDSLDIGDDDSSLTHAVVTGLRANERITLTILPDSDATIILSEPTGAGSVFITTLTAPTTFTGQVTTILAKSYTVTPSTEPTETGYPTGTPPTTMSTSTTSKPTSTTMSSSKTTSSTSSPTATFTASDQTFDFARIAVLFVLQEKSVDEASSAQTELQNFFSSNPTTANAKNVTLGDNTSVDLVNYIVDVGAGKIGGNKSD

SEQ ID NO: 11851 - DNA, 4844 bp, Muscodor strobelii
  misc_feature: SGI EST ID NO. CUFF.28248.1
  misc_feature: Variant of the nucleotide sequence at SEQ ID NO 11849
ctgtggccaagcacttgcatactggaatttgtacttagaatactgatccatctatattcgtatccaaatgcgctacggaccgtgtggactgtagtgtcggtggctgctgctactgctgaatccgcctcacattcttagtgtccagccgctgactgcatcgtgtgcttcgagaaagaggtccagacttcccacacatactcacacactcgcaccgtccgtcccatctcatctgtgtctctccttctctcacccgtccgcatccgtctctttcctcccgcgcgcacgcacgcactcactcccttcaacctcttccgtgcttccgctgtggcacttttatcgtcaacagatttcgggcgcgagctgtcctaactgactggcaattttcaaacgaacgcaattgcggttgatcattcgttcatttcttattcttctacacactcgttctttcctgcgtctcggctgatccgagtctgtcttgacgacaattaatccaattgcccatccctggcccagtccaacttcgtcattcgttctcaccgggaaacagaaaaagactcactcgctttctctgatctcagtcacccaacaaaccaacgctagagcagcgacgaggtcggcactttccattgtagaataacatcatccgctggtcttctcctcgcctgatgtcttcctgatcgccaatcttaagacaattcgctattctgcctgggtgtgcctctgttgccagcctattcaaccgtccctggccctgaagtgtgccatccacaatcctgaaacacgtatggtgtccgagtagcaccaccaaccatctacttcttctcaccactggatagtagagcgctgtgcgaccaccagaattcgtcatcgcctgctgactacaggtattttgattaccgactgcctattgttgtcgtgaggatcaccgaagcccgaacaaatccggcacccagtggattctggatactggccattgccacaattgagtgttgacaacacatagactcattcatttttatcttttcgctcaccgcagttgaacgtgtcgacacgccattgccaggaaacaagcagtggattaaaagactcgggacttttcgaaacgtgggaaacttctcttcatttattcaacaacaattgcgacgccaggattgaagcgctcgcctccgagagttggaactcaagacagacagtgtcacgaacaaggcacgaatatccaaggtcttcatttccgatccgtgtgtctcagtcttttacgcatcggtgcgtcggttctgtcggacgaacgctgccggacattcgtttgtgcgactcgaagggcccacgcgtctgcagacaatcggctatcgacatctcgacaacctgtttttgggcgtgtactagggctcacttatgccgttgatatagcgccgcggggattttgagtacgctgggatacgaactgtgatacggggaatgatacgggtccgactgagacgactgagtcaaggcttcaatgagtcagtttaaaaatgcgagaaacatggacgatacatccgggatggggtcagtcaagagggccagggagcgagctcaagccggagttccaagaggtccaccgccgtcgataccaggcatcccacaggtagcaaggcgtcagcaagcgcctgctggactacagtcgaaagatgggtctgtcgggatggccatttcaagaccgactccagtaccccagtggccgctcgccggtcccatcgcctcgcctgcttctgtagattctgaaccttaccggcctcctcccggacgctcgcaacagccacctcaacgccctcccagaccaagccgagtgccctcgattctggatggatctcgcgtgcaggatcacacgcccgtgtttcaatacgcaccgcagaacgtgagaaactcggatctctccggtccagagtcttcaaggccgtcgaccacctcttcggtagggtcgatccctgatttccccttgccagtagcagcaccaagtggactgccacgacgcagcgtcaatctcgggcccccgccatcttcgaggcgtggagcttcctccttttattctactgcctcattcgtgtcgcctattcctgaggagagccctcgaataaaatcacacacatcatatgcttcaagcgcagccattccggagagctttgggaccctttcgcccaataactacagccccgaaggttactactttgatgaagcaatcgcagaggaatctgtgatcagtgatgacgcagatgataggggcttagtcaggagtgcaagtatagggaaaagagggaaaccttcgctgatcacaacgaagagcgttgataaatcggaatcgatgcctctgcgacccaccccaaaacccgtccagagcggaccttttgccgatggaactggatacttagatggttcttcgagctcatcggcaccaacgactatcaagaatgtcgcagtcaccggtttgactgctgacacgatgttgagtgcaatggaggctgcaagtgcgacggacccctccgagtgtgccaagaccggatccttcgtccaggcccttcaggctctctggactaagacggccgcctcgtctcgatattgatgcagttagggctgctgaagcgcgagggagcctgacgagtttacctgatttgatccgacgcgctacgaggcttgcttctatgatggaccgagggaagaggcctgctagccgatttgatgatctagattttccagacgagatctatggcggggaccctgagaaaaatgattcatatgagttagacaaacatcagtcagggctgtcggatatgttggcagcattcccgcctccggccagccggcgtagcatgcgacagagcgttacttcctggccattacctagacgggcctcgcgcggtccgacacgagtcacggaaagaaccattgattctgagccgtcggaaccgcctgctgagaaaaaacgaaggtgctgcggcctgccgctgtggggtttctggcttgtccttctcatctttctaatcatcattgctgctgccgttgtgatcccagtcgagctgctcgtagtccacaagaacgacggcaaatcgagtcccgcacagagctgcatggatcagctgacatgtgctaatggtggcaccaacgttgtaagccagggtgtatgctcttgtatctgtgctaacggctttacgggcacaaactgcactattcccacgacgcagggatgcactactacgaccttacaagccggcgatacgagcatccaaaatgtcacaattggacaagcgattccccgcctagtcttagacgcgaattcaaatttctcgatccctctagaggcaaccgaaatcatatcgaaattcagttcatccaacctctcgtgcaataccgaaaatgctctagtaacattcaatggcgtatcggctgccaccgaaaaccaggtcacggatagtctcgacattggcgatgatgattcgtccctcacacacgctgtggtcacaggcttacgtgcgaacgaacgcatcaccctaactatcctacccgatagtgatgccaccattatcctcagcgagccgactggggcgggcagtgtcttcatcacgacgctaacagctccaaccacttttacgggccaagtcactaccatactcgccaagtcttacacagtcacgccatcaacagagcctaccgaaacaggctaccctactggaactccaccaacgaccatgtcgacttcgacgacatcaaagccgaccagcacaaccatgagctcgagcaagacaacatcgtcgacaagctcgccaactgccacgttcactgcttcagatcagactttcgacttcgcacgaatcgctgtcctttttgtattgcaggagaagtcagtggatgaggcttcgtcggcacaaactgagctccagaatttctttagcagcaatccgacgacagccaacgccaagaacgtgactctcggcgataacacttcagtcgatctggtgaattatatcgttgacgtgggagctggcaaaataggcgggaacaaatcagactaaagtacatttacggaaatcatcgacatacactacggactggttactaccgacactatacgcacacataactttaagctatacaatcgcacttatctacgcatgacgaatcatgagcctcgggagggaaaaacgaggccggtcattgcattgcatttcaattgcctttggcatatttgaaacggtgtacgaggagttttgagacagtgttgcctctttttttcatatgaacagttcatgaatgagctttgcttaattttttggtgcatctgagacgagcaaaaagtcgaggcatgttattagttactataccaccatatcatacaatacaataccataaggagaggggacgagggagtggtaatcgctgtacaaaatatgagctgcgctataccgagctgagtgcttgaggcgcagtctgagagctgtgtgagtagagtagagctgtcgattttggagcggaagggagatattgcattacttagcttgctaggtagcttgaagagaccacttatcgcaaaattttgtctgatattgatttgaagatgacggtgcgaggtgagcgagaaatcaggggagacggtgacatccagctggcttgaaacttgacaatcctccgcgatctttgggggccagttgacaaggtatattgctaccgtaattattctgttacagcaactgattggcccagcaagtctatgatgtaaaggacgtatggttgcaatatcaacccaaccaagacctactcggtccttctgctcgtcacttcaaatgcgatggtacgctgtcgaggtctcattcgtc

SEQ ID NO: 11852 - DNA, 1056 bp, Muscodor strobelii
  misc_feature: SGI cDNA ID NO. 563822
  misc_feature: Encodes the peptide sequence at SEQ ID NO 11853
atggggtcagtcaagagggccagggagcgagctcaagccggagttccaagaggtccaccgccgtcgataccaggcatcccacaggtagcaaggcgtcagcaagcgcctgctggactacagtcgaaagatgggtctgtcgggatggccatttcaagaccgactccagtaccccagtggccgctcgccggtcccatcgcctcgcctgcttctgtagattctgaaccttaccggcctcctcccggacgctcgcaacagccacctcaacgccctcccagaccaagccgagtgccctcgattctggatggatctcgcgtgcaggatcacacgcccgtgtttcaatacgcaccgcagaacgtgagaaactcggatctctccggtccagagtcttcaaggccgtcgaccacctcttcggtagggtcgatccctgatttccccttgccagtagcagcaccaagtggactgccacgacgcagcgtcaatctcgggcccccgccatcttcgaggcgtggagcttcctccttttattctactgcctcattcgtgtcgcctattcctgaggagagccctcgaataaaatcacacacatcatatgcttcaagcgcagccattccggagagctttgggaccctttcgcccaataactacagccccgaaggttactactttgatgaagcaatcgcagaggaatctgtgatcagtgatgacgcagatgataggggcttagtcaggagtgcaagtatagggaaaagagggaaaccttcgctgatcacaacgaagagcgttgataaatcggaatcgatgcctctgcgacccaccccaaaacccgtccagagcggaccttttgccgatggaactggatacttagatggttcttcgagctcatcggcaccaacgactatcaagaatgtcgcagtcaccggtttgactgctgacacgatgttgagtgcaatggaggctgcaagtgcgacggacccctccgagtgtgccaagaccggatccttcgtccaggcccttcaggctctctggactaagacggccgcctcgtctcgatattga

SEQ ID NO: 11853 - protein, 351 aa, Muscodor strobelii
  misc_feature: SGI Peptide ID NO. 563822
  misc_feature (32)..(326): NCBI GI: 116193459 Blast Desc: CHGG_06447 [Chaetomium globosum CBS 148.51] gi|88182360|gb|EAQ89828.1| CHGG_06447 [Chaetomium globosum CBS 148.51]
  misc_feature (2)..(320): NCBI GI: 39970477 Blast Desc: MGG_02705 [Magnaporthe grisea 70-15] gi|149209933|ref|XP_001522341.1| MGCH7_ch7g448 [Magnaporthe grisea 70-15] gi|86196403|gb|EAQ71041.1| MGCH7_ch7g448 grisea
  misc_feature (2)..(326): NCBI GI: 171684851 Blast Desc: protein product [Podospora anserina] gi|170942386|emb|CAP68038.1| protein product [Podospora anserina]
  misc_feature (2)..(327): NCBI GI: 46128261 Blast Desc: FG08508.1 [Gibberella zeae PH-1]
  misc_feature (40)..(289): NCBI GI: 261353158 Blast Desc: conserved [Verticillium albo-atrum VaMs.102]
  misc_feature (2)..(324): NCBI GI: 256733985 Blast Desc: NECHADRAFT_35748 [Nectria haematococca mpVI 77-13-4]
  misc_feature (1)..(326): NCBI GI: 85113437 Blast Desc: NCU02165 [Neurospora crassa OR74A] gi|28926309|gb|EAA35288.1| [Neurospora crassa OR74A]
  misc_feature (2)..(257): NCBI GI: 226279310 Blast Desc: conserved [Paracoccidioides brasiliensis Pb01]
  misc_feature (2)..(266): NCBI GI: 239613814 Blast Desc: conserved [Ajellomyces dermatitidis ER-3]
  misc_feature (45)..(330): NCBI GI: 225685236 Blast Desc: conserved [Paracoccidioides brasiliensis Pb03]
MGSVKRARERAQAGVPRGPPPSIPGIPQVARRQQAPAGLQSKDGSVGMAISRPTPVPQWPLAGPIASPASVDSEPYRPPPGRSQQPPQRPPRPSRVPSILDGSRVQDHTPVFQYAPQNVRNSDLSGPESSRPSTTSSVGSIPDFPLPVAAPSGLPRRSVNLGPPPSSRRGASSFYSTASFVSPIPEESPRIKSHTSYASSAAIPESFGTLSPNNYSPEGYYFDEAIAEESVISDDADDRGLVRSASIGKRGKPSLITTKSVDKSESMPLRPTPKPVQSGPFADGTGYLDGSSSSSAPTTIKNVAVTGLTADTMLSAMEAASATDPSECAKTGSFVQALQALWTKTAASSRY

SEQ ID NO: 11854 - DNA, 4899 bp, Muscodor strobelii
  misc_feature: SGI EST ID NO. CUFF.28248.0
  misc_feature: Variant of the nucleotide sequence at SEQ ID NO 11852
ctgtggccaagcacttgcatactggaatttgtacttagaatactgatccatctatattcgtatccaaatgcgctacggaccgtgtggactgtagtgtcggtggctgctgctactgctgaatccgcctcacattcttagtgtccagccgctgactgcatcgtgtgcttcgagaaagaggtccagacttcccacacatactcacacactcgcaccgtccgtcccatctcatctgtgtctctccttctctcacccgtccgcatccgtctctttcctcccgcgcgcacgcacgcactcactcccttcaacctcttccgtgcttccgctgtggcacttttatcgtcaacagatttcgggcgcgagctgtcctaactgactggcaattttcaaacgaacgcaattgcggttgatcattcgttcatttcttattcttctacacactcgttctttcctgcgtctcggctgatccgagtctgtcttgacgacaattaatccaattgcccatccctggcccagtccaacttcgtcattcgttctcaccgggaaacagaaaaagactcactcgctttctctgatctcagtcacccaacaaaccaacgctagagcagcgacgaggtcggcactttccattgtagaataacatcatccgctggtcttctcctcgcctgatgtcttcctgatcgccaatcttaagacaattcgctattctgcctgggtgtgcctctgttgccagcctattcaaccgtccctggccctgaagtgtgccatccacaatcctgaaacacgtatggtgtccgagtagcaccaccaaccatctacttcttctcaccactggatagtagagcgctgtgcgaccaccagaattcgtcatcgcctgctgactacaggtattttgattaccgactgcctattgttgtcgtgaggatcaccgaagcccgaacaaatccggcacccagtggattctggatactggccattgccacaattgagtgttgacaacacatagactcattcatttttatcttttcgctcaccgcagttgaacgtgtcgacacgccattgccaggaaacaagcagtggattaaaagactcgggacttttcgaaacgtgggaaacttctcttcatttattcaacaacaattgcgacgccaggattgaagcgctcgcctccgagagttggaactcaagacagacagtgtcacgaacaaggcacgaatatccaaggtcttcatttccgatccgtgtgtctcagtcttttacgcatcggtgcgtcggttctgtcggacgaacgctgccggacattcgtttgtgcgactcgaagggcccacgcgtctgcagacaatcggctatcgacatctcgacaacctgtttttgggcgtgtactagggctcacttatgccgttgatatagcgccgcggggattttgagtacgctgggatacgaactgtgatacggggaatgatacgggtccgactgagacgactgagtcaaggcttcaatgagtcagtttaaaaatgcgagaaacatggacgatacatccgggatggggtcagtcaagagggccagggagcgagctcaagccggagttccaagaggtccaccgccgtcgataccaggcatcccacaggtagcaaggcgtcagcaagcgcctgctggactacagtcgaaagatgggtctgtcgggatggccatttcaagaccgactccagtaccccagtggccgctcgccggtcccatcgcctcgcctgcttctgtagattctgaaccttaccggcctcctcccggacgctcgcaacagccacctcaacgccctcccagaccaagccgagtgccctcgattctggatggatctcgcgtgcaggatcacacgcccgtgtttcaatacgcaccgcagaacgtgagaaactcggatctctccggtccagagtcttcaaggccgtcgaccacctcttcggtagggtcgatccctgatttccccttgccagtagcagcaccaagtggactgccacgacgcagcgtcaatctcgggcccccgccatcttcgaggcgtggagcttcctccttttattctactgcctcattcgtgtcgcctattcctgaggagagccctcgaataaaatcacacacatcatatgcttcaagcgcagccattccggagagctttgggaccctttcgcccaataactacagccccgaaggttactactttgatgaagcaatcgcagaggaatctgtgatcagtgatgacgcagatgataggggcttagtcaggagtgcaagtatagggaaaagagggaaaccttcgctgatcacaacgaagagcgttgataaatcggaatcgatgcctctgcgacccaccccaaaacccgtccagagcggaccttttgccgatggaactggatacttagatggttcttcgagctcatcggcaccaacgactatcaagaatgtcgcagtcaccggtttgactgctgacacgatgttgagtgcaatggaggctgcaagtgcgacggacccctccgagtgtgccaagaccggatccttcgtccaggcccttcaggctctctggactaagacggccgcctcgtctcgatattgatgcagttagggctgctgaagcgcgagggagcctgacgagtttacctgatttgatccgacgcgctacgaggcttgcttctatgatggaccgagggaagaggcctgctagccgatttgatgatctagattttccagacgagatctatggcggggaccctgagaaaaatgattcatgtgagtgtgcctgattataagtctaagatcccaagaccactgaccattgctatagatgagttagacaaacatcagtcagggctgtcggatatgttggcagcattcccgcctccggccagccggcgtagcatgcgacagagcgttacttcctggccattacctagacgggcctcgcgcggtccgacacgagtcacggaaagaaccattgattctgagccgtcggaaccgcctgctgagaaaaaacgaaggtgctgcggcctgccgctgtggggtttctggcttgtccttctcatctttctaatcatcattgctgctgccgttgtgatcccagtcgagctgctcgtagtccacaagaacgacggcaaatcgagtcccgcacagagctgcatggatcagctgacatgtgctaatggtggcaccaacgttgtaagccagggtgtatgctcttgtatctgtgctaacggctttacgggcacaaactgcactattcccacgacgcagggatgcactactacgaccttacaagccggcgatacgagcatccaaaatgtcacaattggacaagcgattccccgcctagtcttagacgcgaattcaaatttctcgatccctctagaggcaaccgaaatcatatcgaaattcagttcatccaacctctcgtgcaataccgaaaatgctctagtaacattcaatggcgtatcggctgccaccgaaaaccaggtcacggatagtctcgacattggcgatgatgattcgtccctcacacacgctgtggtcacaggcttacgtgcgaacgaacgcatcaccctaactatcctacccgatagtgatgccaccattatcctcagcgagccgactggggcgggcagtgtcttcatcacgacgctaacagctccaaccacttttacgggccaagtcactaccatactcgccaagtcttacacagtcacgccatcaacagagcctaccgaaacaggctaccctactggaactccaccaacgaccatgtcgacttcgacgacatcaaagccgaccagcacaaccatgagctcgagcaagacaacatcgtcgacaagctcgccaactgccacgttcactgcttcagatcagactttcgacttcgcacgaatcgctgtcctttttgtattgcaggagaagtcagtggatgaggcttcgtcggcacaaactgagctccagaatttctttagcagcaatccgacgacagccaacgccaagaacgtgactctcggcgataacacttcagtcgatctggtgaattatatcgttgacgtgggagctggcaaaataggcgggaacaaatcagactaaagtacatttacggaaatcatcgacatacactacggactggttactaccgacactatacgcacacataactttaagctatacaatcgcacttatctacgcatgacgaatcatgagcctcgggagggaaaaacgaggccggtcattgcattgcatttcaattgcctttggcatatttgaaacggtgtacgaggagttttgagacagtgttgcctctttttttcatatgaacagttcatgaatgagctttgcttaattttttggtgcatctgagacgagcaaaaagtcgaggcatgttattagttactataccaccatatcatacaatacaataccataaggagaggggacgagggagtggtaatcgctgtacaaaatatgagctgcgctataccgagctgagtgcttgaggcgcagtctgagagctgtgtgagtagagtagagctgtcgattttggagcggaagggagatattgcattacttagcttgctaggtagcttgaagagaccacttatcgcaaaattttgtctgatattgatttgaagatgacggtgcgaggtgagcgagaaatcaggggagacggtgacatccagctggcttgaaacttgacaatcctccgcgatctttgggggccagttgacaaggtatattgctaccgtaattattctgttacagcaactgattggcccagcaagtctatgatgtaaaggacgtatggttgcaatatcaacccaaccaagacctactcggtccttctgctcgtcacttcaaatgcgatggtacgctgtcgaggtctcattcgtc

SEQ ID NO: 11855 - DNA, 1734 bp, Muscodor strobelii
  misc_feature: SGI cDNA ID NO. 563823
  misc_feature: Elevated expression when VOC is produced
  misc_feature: Encodes the peptide sequence at SEQ ID NO 11856
atggtcttcactccgccatcatgggtacccaaattgccgttcgatccgcccgactcgatcccgttaggtgaattcgtttgcacagagagatatggccggcagccaattgataaatctcaaaacccattcacgtgcgggttgagcgggaggacttactcgaccaaggaagtgagtgaacgaatcgaattgcttgcaagagctctagcaaaacgaacaggatggaagccgaatgaggaaatgcattgggataaggtcgtaggactgtattcattcaacacaattgactacctcatggcctcatttgcagtacatcgactgtctggtatcgtcacgcctgcgaacgcaatgtatacagcagccgagcttgagcatcagttgaagtcatctggcgcaaaggctctgattacatgcacaccgctgctcgagaacgcgctaacggcagcacgagcaactggcatccccgatgacaaaattttaattctcgacttccacggtgcccctagagacaaacgattcaagactatcgacgagttgattacagagggcaaaagaatactcgagcttgagcccttgagatggacgaagggccaaggcggccgacaaccggcctatctatgctactctagcgggacgtcaggactcccgaaagccgtaatgatctcacatcacaacatcatcgcgaatgtgatgcagataagatggcacgatgacacaggccgacgacagaagaatgttgaaacacagacttccatcggacttcttccgctatcacacatctacggactcgtagtcgtagcaaacgcagggatgtaccgaggagatggcacaatcatactaccgcgcttcgaactcaggacactgctcgaaagtattcaaagatttaagatcaactttatgtgtctcgtgcccccaatcatcattcaaatgcttaggaacaaggacttgtgctcgaaatatgatctcagcagcgttcgctttgtgtatgtgggtgccgcaccgctcggcgaggaaacaacgacagatttccggaaagcattccctcatatcacggttgggcagggttatggcatgacggaaacatctacagtggtaatcagcacaggcgagaacgacgtctttcctggcatggcaggttcgctagtcccgggtgtaaaggcaaaaattatcgacgatgacggccatgagataacagaacatggtaaacgtggagaattactggtacaatcaccgtctgttactttgggttacctacacaatgagcctgcgacttcagcagcatacgtttgggatgacgatggacgatggatgcgcacgggcgatattgcccttgtaagagtctcgccaaatgggcatgaacacttggctattgttgatcgtctaaaggaattgataaaagtcaagggtcatcaagtagcaccggcagagctagaagcacatcttctgacgcatccagctgtcaatgactgcactgtgattccggtacctgacgagagaagtggcgaagttccaaaggcgttcgtagtcaagtccacgtctgcagcaggcaaaccggacgaagagattattcgggaaatttgcaaacatgttgaagagcataaggcgaggtataagtggctcaaaggaggggttgaatttattgatgcagtaccgaagagtcccagtgggaagatattgagacggatactgaaggacaaggagaaagaggcgagaagagctgaaggtgcgaagttgtga

SEQ ID NO: 11856 - protein, 577 aa, Muscodor strobelii
  misc_feature: SGI Peptide ID NO. 563823
  misc_feature (53)..(491): Pfam Id: PF00501 Pfam Desc: AMP-binding enzyme
  misc_feature (83)..(491): Pfam Id: PF00501 Pfam Desc: AMP-binding enzyme
  misc_feature (1)..(577): NCBI GI: 171684469 Blast Desc: protein product [Podospora anserina] gi|170942195|emb|CAP67847.1| protein product [Podospora anserina]
  misc_feature (1)..(577): NCBI GI: 85074899 Blast Desc: NCU00677 [Neurospora crassa OR74A] gi|28927630|gb|EAA36581.1| NCU00677 [Neurospora crassa OR74A]
  misc_feature (1)..(577): NCBI GI: 256734190 Blast Desc: [Nectria haematococca mpVI 77-13-4]
  misc_feature (1)..(577): NCBI GI: 46129316 Blast Desc: FG08843.1 [Gibberella zeae PH-1]
  misc_feature (1)..(577): NCBI GI: 149210175 Blast Desc: MGCH7_ch7g569 [Magnaporthe grisea 70-15] gi|86196524|gb|EAQ71162.1| MGCH7_ch7g569 [Magnaporthe grisea 70-15]
  misc_feature (1)..(577): NCBI GI: 46122767 Blast Desc: FG05761.1 [Gibberella zeae PH-1]
  misc_feature (1)..(573): NCBI GI: 256722385 Blast Desc: NECHADRAFT_44354 [Nectria haematococca mpVI 77-13-4]
  misc_feature (15)..(577): NCBI GI: 145611902 Blast Desc: MGG_11685 [Magnaporthe grisea 70-15] gi|145019122|gb|EDK03401.1| MGG_11685 [Magnaporthe grisea 70-15]
  misc_feature (1)..(577): NCBI GI: 256720997 Blast Desc: NECHADRAFT_94784 [Nectria haematococca mpVI 77-13-4]
  misc_feature (1)..(577): NCBI GI: 256724262 Blast Desc: NECHADRAFT_53430 [Nectria haematococca mpVI 77-13-4]
  misc_feature (11)..(565): SWISSPROT Homolog: EC 6.2.1.12 4-coumarate--CoA ligase
  misc_feature: Useful for introducing or modulating the production of volatile compounds
MVFTPPSWVPKLPFDPPDSIPLGEFVCTERYGRQPIDKSQNPFTCGLSGRTYSTKEVSERIELLARALAKRTGWKPNEEMHWDKVVGLYSFNTIDYLMASFAVHRLSGIVTPANAMYTAAELEHQLKSSGAKALITCTPLLENALTAARATGIPDDKILILDFHGAPRDKRFKTIDELITEGKRILELEPLRWTKGQGGRQPAYLCYSSGTSGLPKAVMISHHNIIANVMQIRWHDDTGRRQKNVETQTSIGLLPLSHIYGLVVVANAGMYRGDGTIILPRFELRTLLESIQRFKINFMCLVPPIIIQMLRNKDLCSKYDLSSVRFVYVGAAPLGEETTTDFRKAFPHITVGQGYGMTETSTVVISTGENDVFPGMAGSLVPGVKAKIIDDDGHEITEHGKRGELLVQSPSVTLGYLHNEPATSAAYVWDDDGRWMRTGDIALVRVSPNGHEHLAIVDRLKELIKVKGHQVAPAELEAHLLTHPAVNDCTVIPVPDERSGEVPKAFVVKSTSAAGKPDEEIIREICKHVEEHKARYKWLKGGVEFIDAVPKSPSGKILRRILKDKEKEARRAEGAKL

SEQ ID NO: 11857 - DNA, 2452 bp, Muscodor strobelii
  misc_feature: SGI EST ID NO. CUFF.28182.0
  misc_feature: Variant of the nucleotide sequence at SEQ ID NO 11855
aacgaacagtcagctgttcatggacaaaattatacgtaaagggataatctggatctagttctcaacggtccttttagaagcccaatcccccaattttccccacggccccaatgtctaatccctgtctaccctggttatcgctgacgtcggccatctcgaactatcgaggtcatctagcgggagacgatgcgacacgcggttagcagggggtagagactcgttaattgagaaaattcccccaacctcgtttccccgaacgagatccctttaatctgatttggtttaattcttccaggagaagacctcgttgtacacactcgtacacattatcgaatcgctgtgccgagaatagatgtctgtatatcgaaatcggttccttaattgacagttccgattcctatacgagcagcaaaaatggtcttcactccgccatcatgggtacccaaattgccgttcgatccgcccgactcgatcccgttaggtgaattcgtttgcacagagagatatggccggcagccaattgataaatctcaaaacccattcacgtgcgggttgagcgggaggacttactcgaccaaggaagtgagtgaacgaatcgaattgcttgcaagagctctagcaaaacgaacaggatggaagccgaatgaggaaatgcattgggataaggtcgtaggactgtattcattcaacacaattgactacctcatggcctcatttgcagtacatcgactgtctggtatcgtcacgcctgcgaacgcaatgtatacagcagccgagcttgagcatcagttgaagtcatctggcgcaaaggctctgattacatgcacaccgctgctcgagaacgcgctaacggcagcacgagcaactggcatccccgatgacaaaattttaattctcgacttccacggtgcccctagagacaaacgattcaagactatcgacgagttgattacagagggcaaaagaatactcgagcttgagcccttgagatggacgaagggccaaggcggccgacaaccggcctatctatgctactctagcgggacgtcaggactcccgaaagccgtaatgatctcacatcacaacatcatcgcgaatgtgatgcagataagatggcacgatgacacaggccgacgacagaagaatgttgaaacacagacttccatcggacttcttccgctatcacacatctacggactcgtagtcgtagcaaacgcagggatgtaccgaggagatggcacaatcatactaccgcgcttcgaactcaggacactgctcgaaagtattcaaagatttaagatcaactttatgtgtctcgtgcccccaatcatcattcaaatgcttaggaacaaggacttgtgctcgaaatatgatctcagcagcgttcgctttgtgtatgtgggtgccgcaccgctcggcgaggaaacaacgacagatttccggaaagcattccctcatatcacggttgggcagggttatggcatgacggaaacatctacagtggtaatcagcacaggcgagaacgacgtctttcctggcatggcaggttcgctagtcccgggtgtaaaggcaaaaattatcgacgatgacggccatgagataacagaacatggtaaacgtggagaattactggtacaatcaccgtctgttactttgggttacctacacaatgagcctgcgacttcagcagcatacgtttgggatgacgatggacgatggatgcgcacgggcgatattgcccttgtaagagtctcgccaaatgggcatgaacacttggctattgttgatcgtctaaaggaattgataaaagtcaagggtcatcaagtagcaccggcagagctagaagcacatcttctgacgcatccagctgtcaatgactgcactgtgattccggtacctgacgagagaagtggcgaagttccaaaggcgttcgtagtcaagtccacgtctgcagcaggcaaaccggacgaagagattattcgggaaatttgcaaacatgttgaagagcataaggcgaggtataagtggctcaaaggaggggttgaatttattgatgcagtaccgaagagtcccagtgggaagatattgagacggatactgaaggacaaggagaaagaggcgagaagagctgaaggtgcgaagttgtgagatgtactggactaggactgcgtcatctattggaaacggcgaggtcatttgtcaatctgtggtacatgtaacactctgagatggccatatcgcctcttgacgctcgatcattgagcacactgtgacccacaggtttggctagtgtgactgaaacgacacaattctactgcaaacaatgtgaggtcatcataccgaccagtgggcgtgtcacagaacagagaggcttggactggctgagcaagtaatggatgtttatcgatgcctaggccatgcctctaccgtaggcactcgcagatagtacaag

SEQ ID NO: 11858 - DNA, 2235 bp, Muscodor strobelii
  misc_feature: SGI cDNA ID NO. 563824
  misc_feature: Encodes the peptide sequence at SEQ ID NO 11859
caaacagacaaactcttcgccatcgctttctacaatctacctctagtctccagagtgcgcagtctgagagccaagaacattggccagctgctttccatctccggcacagtcacacgaacctccgaggtcagacccgagctgtctctggcaaccttcatatgcgagtcttgtcgcagtgtcgtgcccaacatcgagcagacgttcagatacaccgagcctacacaatgtcccaatgccgaatgtggtaatcgcctggcttggcagcttgacattaggcagagtacgtttgtggattggcagaaagtcagaattcaggagaacagttcggaaatccccaccggcagcatgccgcgaactatggatgtcatccttcgtggcgaaatagtcgatcgtgccaaggccggagaaaagtgtatctttacgggtgccttgatcgtggtgccagacgtgagccagctgggtcttcccggtgttcgacccgtagcggtcagagacgatagaaacgcgtcgcgcaataacgatgtcggcggcagcggagtatcaggtctcaagtcgctaggtgcacgcgatctgacgtatcgccttgctttccttgccaacatgctcaccccagatacatcaacccccggtcaatcagcaggccgacaagtgaacgatataattaactccatgacgcaggcatctgccgagactgcagagagtgtagaggaggcgcaggcggctgtcttgaactccatgacaccagctgagattgaagagcttcgtgagatggtccacagtgaccatatatactcgcgattagtcaagtcccttgcacctactgtctacggtcatgagattgtcaagaagggtatcctattgcaactcatgtctggtgtccacaagaccacgccagaaggcattgccctgcgtggtgatatcaatatctgcattgtaggagacccatctacttcgaagtcccaatttctgaaatacgtttgctcttttgctcctcgggcagtatacacatccggcaaagcgtcctccgctgctggtttgacggcagccgtcatcaaagacgaagagaccggcgagttcaccatcgaagccggagctctgatgttagcagacaatggtatctgcgccatcgacgagttcgacaaaatggacctcgccgaccaagtcgccatccacgaagccatggaacagcaaaccatctccatcgcaaaagccggcatccacgcaaccttgaatgcgcgatcgtcgattctggcggctgctaaccctgtaagtggtcggtacaaccgcaagacgacgctgcgcgcaaacatcaacatgtcagcgcccatcatgtcccgtttcgatctcttcttcgtggtgctcgacgaatgtaacgagtccgtcgaccgccacctcgcagagcacatcgtgggcatccacgctctacgcgatagcgccatcgagccggagttcagcaccgagtgtctgcagcgctacatccgcttcgcgcggacctttcgcccagaattcacagacgaggctaaagagcggttggtcaacaagtacaaagagctccgcgccgatgatgcccaaggcggcatcggcaagaacagctaccgtattaccgtccgtcagctcgagtccctgatccgtctatccgaagccattgcaaaagcaaactgtgtggaagaaatcgtccctgagttcgtggacgaggcgttcagcctcttgcgtcagagtatcatctcggtcgagcacgacgacgtagagatggacgaggactacgacgagcccgaagactccgctgcgctcatcgcggctgcggatgaagcggcagcagcggcatctgcatctgcatcccaagacgccgaaggcgacgatgccatgaccgaggaggaagccgccgcgaagaagaagacggccatcacgtacgagaagtacgtcagcatggtgaacctcatcgtctcgcgcgttaacgacgacgaagccgctggtgcaggagagggggtcgatggagaagatctcgtagagtggtatctggagcagaaagaagaggagctcgatggcgaggaggattatcatcgagagctgggtattgcgaagatggtgctgaagaagatggtcaaggacaacatcctgatggcagtccggggctctggcctcgcagaagatgccgccgaaggagaagccagtggcactgcctcagcgaagactgtctacgtgttacatcccaactgcgcagttgaagaatactag

SEQ ID NO: 11859 - protein, 744 aa, Muscodor strobelii
  misc_feature: SGI Peptide ID NO. 563824
  misc_feature (250)..(575): Pfam Id: PF00493 Pfam Desc: MCM2/3/5 family
  misc_feature (1)..(744): NCBI GI: 256726038 Blast Desc: NECHADRAFT_11060 [Nectria haematococca mpVI 77-13-4]
  misc_feature (1)..(744): NCBI GI: 46111177 Blast Desc: FG02470.1 [Gibberella zeae PH-1]
  misc_feature (1)..(744): NCBI GI: 116194410 Blast Desc: CHGG_03803 [Chaetomium globosum CBS 148.51] gi|88179716|gb|EAQ87184.1| CHGG_03803 [Chaetomium globosum CBS 148.51]
  misc_feature (1)..(744): NCBI GI: 156032896 Blast Desc: SS1G_13854 [Sclerotinia sclerotiorum 1980] gi|154699256|gb|EDN98994.1| SS1G_13854 [Sclerotinia sclerotiorum 1980]
  misc_feature (1)..(744): NCBI GI: 164429178 Blast Desc: DNA replication licensing factor mcm6 [Neurospora crassa OR74A] gi|157072970|gb|EAA32957.2| DNA replication licensing factor mcm6 [Neurospora crassa OR74A]
  misc_feature (1)..(744): NCBI GI: 40882272 Blast Desc: replication licensing factor [Neurospora crassa]
  misc_feature (1)..(744): NCBI GI: 154294547 Blast Desc: BC1G_13876 [Botryotinia fuckeliana B05.10] gi|150844716|gb|EDN19909.1| BC1G_13876 [Botryotinia fuckeliana B05.10]
  misc_feature (1)..(693): NCBI GI: 171683583 Blast Desc: protein product [Podospora anserina] gi|170941751|emb|CAP67405.1| protein product [Podospora anserina]
  misc_feature (1)..(743): NCBI GI: 169621660 Blast Desc: SNOG_14041 [Phaeosphaeria nodorum SN15] gi|160704306|gb|EAT78666.2| SNOG_14041 [Phaeosphaeria nodorum SN15]
  misc_feature (1)..(743): NCBI GI: 189205917 Blast Desc: DNA replication licensing factor mcm6 [Pyrenophora tritici-repentis Pt-1C-BFP] gi|187975386|gb|EDU42012.1| DNA replication licensing factor mcm6 [Pyrenophora tritici-repentis
QTDKLFAIAFYNLPLVSRVRSLRAKNIGQLLSISGTVTRTSEVRPELSLATFICESCRSVVPNIEQTFRYTEPTQCPNAECGNRLAWQLDIRQSTFVDWQKVRIQENSSEIPTGSMPRTMDVILRGEIVDRAKAGEKCIFTGALIVVPDVSQLGLPGVRPVAVRDDRNASRNNDVGGSGVSGLKSLGARDLTYRLAFLANMLTPDTSTPGQSAGRQVNDIINSMTQASAETAESVEEAQAAVLNSMTPAEIEELREMVHSDHIYSRLVKSLAPTVYGHEIVKKGILLQLMSGVHKTTPEGIALRGDINICIVGDPSTSKSQFLKYVCSFAPRAVYTSGKASSAAGLTAAVIKDEETGEFTIEAGALMLADNGICAIDEFDKMDLADQVAIHEAMEQQTISIAKAGIHATLNARSSILAAANPVSGRYNRKTTLRANINMSAPIMSRFDLFFVVLDECNESVDRHLAEHIVGIHALRDSAIEPEFSTECLQRYIRFARTFRPEFTDEAKERLVNKYKELRADDAQGGIGKNSYRITVRQLESLIRLSEAIAKANCVEEIVPEFVDEAFSLLRQSIISVEHDDVEMDEDYDEPEDSAALIAAADEAAAAASASASQDAEGDDAMTEEEAAAKKKTAITYEKYVSMVNLIVSRVNDDEAAGAGEGVDGEDLVEWYLEQKEEELDGEEDYHRELGIAKMVLKKMVKDNILMAVRGSGLAEDAAEGEASGTASAKTVYVLHPNCAVEEY

SEQ ID NO: 11860 - DNA, 2669 bp, Muscodor strobelii
  misc_feature: SGI EST ID NO. CUFF.28259.0
  misc_feature: Variant of the nucleotide sequence at SEQ ID NO 11858
caaacagacaaactcttcgccatcgctttctacaatctacctctagtctccagagtgcgcagtctgagagccaagaacattggccagctgctttccatctccggcacagtcacacgaacctccgaggtcagacccgagctgtctctggcaaccttcatatgcgagtcttgtcgcagtgtcgtgcccaacatcgagcagacgttcagatacaccgagcctacacaatgtcccaatgccgaatgtggtaatcgcctggcttggcagcttgacattaggcagagtacgtttgtggattggcagaaagtcagaattcaggagaacagttcggaaatccccaccggcagcatgccgcgaactatggatgtcatccttcgtggcgaaatagtcgatcgtgccaaggccggagaaaagtgtatctttacgggtgccttgatcgtggtgccagacgtgagccagctgggtcttcccggtgttcgacccgtagcggtcagagacgatagaaacgcgtcgcgcaataacgatgtcggcggcagcggagtatcaggtctcaagtcgctaggtgcacgcgatctgacgtatcgccttgctttccttgccaacatgctcaccccagatacatcaacccccggtcaatcagcaggccgacaagtgaacgatataattaactccatgacgcaggcatctgccgagactgcagagagtgtagaggaggcgcaggcggctgtcttgaactccatgacaccagctgagattgaagagcttcgtgagatggtccacagtgaccatatatactcgcgattagtcaagtcccttgcacctactgtctacggtcatgagattgtcaagaagggtatcctattgcaactcatgtctggtgtccacaagaccacgccagaaggcattgccctgcgtggtgatatcaatatctgcattgtaggagacccatctacttcgaagtcccaatttctgaaatacgtttgctcttttgctcctcgggcagtatacacatccggcaaagcgtcctccgctgctggtttgacggcagccgtcatcaaagacgaagagaccggcgagttcaccatcgaagccggagctctgatgttagcagacaatggtatctgcgccatcgacgagttcgacaaaatggacctcgccgaccaagtcgccatccacgaagccatggaacagcaaaccatctccatcgcaaaagccggcatccacgcaaccttgaatgcgcgatcgtcgattctggcggctgctaaccctgtaagtggtcggtacaaccgcaagacgacgctgcgcgcaaacatcaacatgtcagcgcccatcatgtcccgtttcgatctcttcttcgtggtgctcgacgaatgtaacgagtccgtcgaccgccacctcgcagagcacatcgtgggcatccacgctctacgcgatagcgccatcgagccggagttcagcaccgagtgtctgcagcgctacatccgcttcgcgcggacctttcgcccagaattcacagacgaggctaaagagcggttggtcaacaagtacaaagagctccgcgccgatgatgcccaaggcggcatcggcaagaacagctaccgtattaccgtccgtcagctcgagtccctgatccgtctatccgaagccattgcaaaagcaaactgtgtggaagaaatcgtccctgagttcgtggacgaggcgttcagcctcttgcgtcagagtatcatctcggtcgagcacgacgacgtagagatggacgaggactacgacgagcccgaagactccgctgcgctcatcgcggctgcggatgaagcggcagcagcggcatctgcatctgcatcccaagacgccgaaggcgacgatgccatgaccgaggaggaagccgccgcgaagaagaagacggccatcacgtacgagaagtacgtcagcatggtgaacctcatcgtctcgcgcgttaacgacgacgaagccgctggtgcaggagagggggtcgatggagaagatctcgtagagtggtatctggagcagaaagaagaggagctcgatggcgaggaggattatcatcgagagctgggtattgcgaagatggtgctgaagaagatggtcaaggtatgtctaccccaacacactctgtttcttttactctgcctctctgtttcgagatggaaagactaacaaacacgaaacaggacaacatcctgatggcagtccggggctctggcctcgcagaagatgccgccgaaggagaagccagtggcactgcctcagcgaagactgtctacgtgttacatcccaactgcgcagttgaagaatactagatttatcaaaataccccaaattaaaggatgagtgggcataggcagtctgggtagtctgtgcagtctgggcataaagtagggtatgagattcaacgacatatagcactggggcgttgggagttttcaaggaatcctccgtaattcagtcttgatgctggagtcatcaattgtcgggaaaacacatgtgatagagagcaacagagggaggaaaatgtatgaatgaagacagccgatgatgaacatagtaatgataccacgcatcaccaagctctatatcgaatctgcatcttaccgttatgtcaatcacctccacatctatgtcatcactttaatgagcatcatttaactgagcag

SEQ ID NO: 11861 - DNA, 3768 bp, Muscodor strobelii
  misc_feature: SGI cDNA ID NO. 563825
  misc_feature: Reduced expression when VOC is produced
  misc_feature: Encodes the peptide sequence at SEQ ID NO 11862
atgcaccctccatcatccacatctgccgcatctgatgcgcatcgcaccatcgtcgcccgagtctcgcctgctgacctgatctcttctgtgccccagatacagtcttctgccgacgacccccccgcccaaaatgtcgactcaccgagtgttgcagtgaacggcggtgctatcgacggcgttgacaatgagattgtggagattgtcgacgagcttatcaactcggccgaggctagtgtgaatggtggttcagacacagaggcatcttccaagcccgatgccaagctaccaggcgacaagggccatgtgcgctcgtcctctgtcgtcaagaagccccagagcttcaagtccgtctccgtcaaccgcacctttcttgccactaagactgctcccaccgcagcatccagacccgactctggcgcgggaacgccgacggctgcaccccagaccacctttgctccctccgcctctcgattaaagctggtcgccaaatctggtagcaacttgggcggcgcatccaagacactgagcacgaatgggaagtctgcaggggcacccgacggtaataccgtgtggaaccgtaacagagctcccgcacagcaagaggtcaagaagcgatcggacgaggaactacagaatgccggtattcacatggcagctcgtctgacgacggaagacatggccaagaatcagtctaactgggccgatatcgaggaggacgatgactgggttcccgacgccataacgtggaccgacggcaccaagatcacgttgccccaggccgacgagatggcaccgagccctgtcacgcaacctgctgtcctcgccgaagagccgactcccgtctccaagcccaagtcgccagctccggttccagctccggctcccgcacccactgttgtcgcaccatctccgtcgactagacccagtggcatgaagggacttgtgctcaaaggtgctccagagaagcctacattggtcgcaaaacctacgcctccttccggcccggccaaatccccatgggctgccctgccaccagtcgagaagctctcgcctgtcgtaatggagataccgagccaacaagcacctccacgctatcccctgcgtgatgcgtctaatactaagggttccacgccgccgcctcccgcaaccaaggaaattgcagctgatgatttccatcgataccgtaatgctgatgccaatcccaaccgcgagctcttcaattctcagtctggccgctacgaacctgtgtcggaccgaagggggtctcgacatgacgtgaacggccgtcaaccagccgtattacagcgcccgtcgcataatgagcagcagggccctgcagagccatcatctgcttttcagacgagtcgaaccagtggccaggaaggtccgtatgggcgccgtcgtggttcgtctaatgttagtgggggaagtggcaactgggcgcaccgcatgggaggaaagagccatgacatgggcttgccctccgagctggtctttcctcaggagcaacttccccaaccccgtgttggttcaatgagcagcgacagccctatcatgtcacatgccacccaacttcctaacaaccttcccagccaacgtcctgtcccacctcctcatccctaccaatccaacctttcacctcaccaggcttatgccgcagctgcacaccccgtgcagccccaagacgcagcaacccccgaggacaaccagaaagagttcatgaagaagcgcagagaggaagctgttcgacgtcgcatggaagaggaggcgcgtgaagaggaagctaagcaggcgcgtatcgctgagaagttgaaagctttaggcccagctcccgagcgcaagagcaccaagaaggaacaacccagtgttgcacctcgcacagatatgcctgcatctctcgccctccgtcccaaaaccactgcagaccaatccccaactaacaaacccgaacccaaaggcgagaagaccccctttgccgctgaagccgcattgccagaggcctctgaagctgactcaagtcctgcacctgtgcctgaatctcgtatcaacggttctgtgcagcgcccattttctcaggacccagcccgtatgtctgctcaggtagttgcagcgtcgggttctcaacccgccccatcgtggcctgaggcgcatccacagctggaacgattccaaccatcatggccttccggtaaccaaaatggaccacgagatgtgtgggccccgcccggcggtggtcgttctttgggcaacggaacatttagtgcagacattggcgccacacccgaagctcgcccagcaccgaacacagcacctgcctcgaatatggcagcccatcatcccgctcccattgggccgccacgttctaatcatatcccccatgcccaatcccagccgagtcgcattgccccaattgctccacctcgcggtgccaatccatgggcggcatttgatgccaaagctgatgacgcggtgagacgggcggagagacttcaggagagcgaccctctggatgacaaccgtgcacccgggttcaatgataagtggcgtcccgttgatctgaacgagagcggcagacgtacgctcaataaatcgcagggaggcgatgttcccaaacaggtatcagagcaggctctacgccctgaatctaaacccgtctcgcgccctgataagactcaacaagctcccgtcagcaatcctaacatgatgccacctaccggtccggctgcccaaactcgatccgggtcgcgtttctttccgccatcatccaaagacatactgcatgaagagacatctccgcagcattctcctcggactaaatcacctactccgcctccgccaactgctgatggacacccggcctacgatggtgacgcatccagacctcatgttgcacttccccctcatagaccgatagtcaagctccctccatctgcacagccaacgatgactggacccaccgcaccgccagccagacaggtccctgtgtcatttgcagctgccgctgcatccaacgctgcatcgagaacctcggaattggctgccgctggtcgccccgttagtcgagggagaggcttcaacggcatccctcagaaaccgcacgagattgcgtcccaagagaactggcagagcaagattaataatcttatggggaagaaatctacttcgccagctaagcctgcaactttgggcggtgcgatgctgccgatcgaatttcctcgatcgcatgattccatggatgtgcccatcctttcaccatcaggaaccgactctactgaggatagcagctacacgagccgggaaatggctgaagaatgtttcggagagcaggagatgggatcgctccctgtcgttcagctgcctaccaagactccggaggccgcatggcaagccgctagtatcaactggaatccgctaagtaagacactgcgtgttaccgctaccgctggcgagccttataagttctttgatgtcgaggatggtgatagaaaccgcgtcattcgcatatctgcgcccggaatgtcggatccgaagaccatacccatacccaatggtcgatctggtagtaaccctaggcgctcaggacctcgcggtggcagcgcccggcattcgtcaaaccgtggcggtcggcgaaatggccgagacgacgttggagagtccacctctgcactctcatctatccgaacatcttcgggtcgcggacgtggcttccgatcacgttctgacaactggggcaggcaggcagccccagccccaacggcacaatcttga

SEQ ID NO: 11862 - protein, 1255 aa, Muscodor strobelii
  misc_feature: SGI Peptide ID NO. 563825
  misc_feature (74)..(1209): NCBI GI: 156032928 Blast Desc: SS1G_13870 [Sclerotinia sclerotiorum 1980] gi|154699272|gb|EDN99010.1| SS1G_13870 [Sclerotinia sclerotiorum 1980]
  misc_feature (50)..(1221): NCBI GI: 154294495 Blast Desc: BC1G_13850 [Botryotinia fuckeliana B05.10] gi|150844690|gb|EDN19883.1| BC1G_13850 [Botryotinia fuckeliana B05.10]
  misc_feature (28)..(1188): NCBI GI: 145607285 Blast Desc: MGG_12158 [Magnaporthe grisea 70-15] gi|145014869|gb|EDJ99437.1| MGG_12158 [Magnaporthe grisea 70-15]
  misc_feature (40)..(1245): NCBI GI: 256725625 Blast Desc: NECHADRAFT_43190 [Nectria haematococca mpVI 77-13-4]
  misc_feature (40)..(1245): NCBI GI: 46111181 Blast Desc: FG02472.1 [Gibberella zeae PH-1]
  misc_feature (33)..(1252): NCBI GI: 171683599 Blast Desc: protein product [Podospora anserina] gi|170941759|emb|CAP67413.1| protein product [Podospora anserina]
  misc_feature (58)..(1212): NCBI GI: 119192754 Blast Desc: CIMG_00754 [Coccidioides immitis RS]
  misc_feature (38)..(497): NCBI GI: 85105066 Blast Desc: NCU05219 [Neurospora crassa OR74A] gi|28923462|gb|EAA32643.1| [Neurospora crassa OR74A]
  misc_feature (58)..(1209): NCBI GI: 240105977 Blast Desc: CPC735_055400 [Coccidioides posadasii C735 delta SOWgp]
  misc_feature (99)..(1212): NCBI GI: 212532935 Blast Desc: conserved [Penicillium marneffei ATCC 18224] gi|210071988|gb|EEA26077.1| conserved [Penicillium marneffei ATCC 18224]
  misc_feature: Useful for introducing or modulating the production of volatile compounds
MHPPSSTSAASDAHRTIVARVSPADLISSVPQIQSSADDPPAQNVDSPSVAVNGGAIDGVDNEIVEIVDELINSAEASVNGGSDTEASSKPDAKLPGDKGHVRSSSVVKKPQSFKSVSVNRTFLATKTAPTAASRPDSGAGTPTAAPQTTFAPSASRLKLVAKSGSNLGGASKTLSTNGKSAGAPDGNTVWNRNRAPAQQEVKKRSDEELQNAGIHMAARLTTEDMAKNQSNWADIEEDDDWVPDAITWTDGTKITLPQADEMAPSPVTQPAVLAEEPTPVSKPKSPAPVPAPAPAPTVVAPSPSTRPSGMKGLVLKGAPEKPTLVAKPTPPSGPAKSPWAALPPVEKLSPVVMEIPSQQAPPRYPLRDASNTKGSTPPPPATKEIAADDFHRYRNADANPNRELFNSQSGRYEPVSDRRGSRHDVNGRQPAVLQRPSHNEQQGPAEPSSAFQTSRTSGQEGPYGRRRGSSNVSGGSGNWAHRMGGKSHDMGLPSELVFPQEQLPQPRVGSMSSDSPIMSHATQLPNNLPSQRPVPPPHPYQSNLSPHQAYAAAAHPVQPQDAATPEDNQKEFMKKRREEAVRRRMEEEAREEEAKQARIAEKLKALGPAPERKSTKKEQPSVAPRTDMPASLALRPKTTADQSPTNKPEPKGEKTPFAAEAALPEASEADSSPAPVPESRINGSVQRPFSQDPARMSAQVVAASGSQPAPSWPEAHPQLERFQPSWPSGNQNGPRDVWAPPGGGRSLGNGTFSADIGATPEARPAPNTAPASNMAAHHPAPIGPPRSNHIPHAQSQPSRIAPIAPPRGANPWAAFDAKADDAVRRAERLQESDPLDDNRAPGFNDKWRPVDLNESGRRTLNKSQGGDVPKQVSEQALRPESKPVSRPDKTQQAPVSNPNMMPPTGPAAQTRSGSRFFPPSSKDILHEETSPQHSPRTKSPTPPPPTADGHPAYDGDASRPHVALPPHRPIVKLPPSAQPTMTGPTAPPARQVPVSFAAAAASNAASRTSELAAAGRPVSRGRGFNGIPQKPHEIASQENWQSKINNLMGKKSTSPAKPATLGGAMLPIEFPRSHDSMDVPILSPSGTDSTEDSSYTSREMAEECFGEQEMGSLPVVQLPTKTPEAAWQAASINWNPLSKTLRVTATAGEPYKFFDVEDGDRNRVIRISAPGMSDPKTIPIPNGRSGSNPRRSGPRGGSARHSSNRGGRRNGRDDVGESTSALSSIRTSSGRGRGFRSRSDNWGRQAAPAPTAQS

SEQ ID NO: 11863 - DNA, 5404 bp, Muscodor strobelii
  misc_feature: SGI EST ID NO. CUFF.28199.0
  misc_feature: Variant of the nucleotide sequence at SEQ ID NO 11861
ctagggcgacatggttgtcgggtaacggcgagtgacacacagcaacagggcaatcaagtaaactgccagctgtcacgtcgggtcagccctctaattacgttgcctacttaggtacatgtacgttagaccaggacctctcaggctgaagagatgcccacttttttctttgccgggctacagtacagagtgctcgactcgcaattcctctgcaagcacgagcaacgttgaggaagacagcagcatcacgctaccctcgtcccttttccttcgtcgtcttgtacatcatcacgttgtccacgggagacggagttactgtttctgccatttgcacagccgacggccacaccctgcgcacgccgctgttttgttttcgcgccccgcctccgacccagaccggccacgcccccaactcgagcactcgagtcaaaccttgaaagcagccgtccaggccgatcccacacacgaccagcattgcacagcacagcaccgctccccggctgcgacctcagctgcgacgacagaacaacagaacaacagattgccgtcacgctcgatctcttctcaacacgcgcgcttgcgtctccaaacacccacatacgttcctgcgtctccacgcaacttgacaaccggatgatggctactgaggccaccgttcaagggcaagttgatgtatctgcaaatgaaccatcacccatacagtcttctgccgacgacccccccgcccaaaatgtcgactcaccgagtgttgcagtgaacggcggtgctatcgacggcgttgacaatgagattgtggagattgtcgacgagcttatcaactcggccgaggctagtgtgaatggtggttcagacacagaggcatcttccaagcccgatgccaagctaccaggcgacaagggccatgtgcgctcgtcctctgtcgtcaagaagccccagagcttcaagtccgtctccgtcaaccgcacctttcttgccactaagactgctcccaccgcagcatccagacccgactctggcgcgggaacgccgacggctgcaccccagaccacctttgctccctccgcctctcgattaaagctggtcgccaaatctggtagcaacttgggcggcgcatccaagacactgagcacgaatgggaagtctgcaggggcacccgacggtaataccgtgtggaaccgtaacagagctcccgcacagcaagaggtcaagaagcgatcggacgaggaactacagaatgccggtattcacatggcagctcgtctgacgacggaagacatggccaagaatcagtctaactgggccgatatcgaggaggacgatgactgggttcccgacgccataacgtggaccgacggcaccaagatcacgttgccccaggccgacgagatggcaccgagccctgtcacgcaacctgctgtcctcgccgaagagccgactcccgtctccaagcccaagtcgccagctccggttccagctccggctcccgcacccactgttgtcgcaccatctccgtcgactagacccagtggcatgaagggacttgtgctcaaaggtgctccagagaagcctacattggtcgcaaaacctacgcctccttccggcccggccaaatccccatgggctgccctgccaccagtcgagaagctctcgcctgtcgtaatggagataccgagccaacaagcacctccacgctatcccctgcgtgatgcgtctaatactaagggttccacgccgccgcctcccgcaaccaaggaaattgcagctgatgatttccatcgataccgtaatgctgatgccaatcccaaccgcgagctcttcaattctcagtctggccgctacgaacctgtgtcggaccgaagggggtctcgacatgacgtgaacggccgtcaaccagccgtattacagcgcccgtcgcataatgagcagcagggccctgcagagccatcatctgcttttcagacgagtcgaaccagtggccaggaaggtccgtatgggcgccgtcgtggttcgtctaatgttagtgggggaagtggcaactgggcgcaccgcatgggaggaaagagccatgacatgggcttgccctccgagctggtctttcctcaggagcaacttccccaaccccgtgttggttcaatgagcagcgacagccctatcatgtcacatgccacccaacttcctaacaaccttcccagccaacgtcctgtcccacctcctcatccctaccaatccaacctttcacctcaccaggcttatgccgcagctgcacaccccgtgcagccccaagacgcagcaacccccgaggacaaccagaaagagttcatgaagaagcgcagagaggaagctgttcgacgtcgcatggaagaggaggcgcgtgaagaggaagctaagcaggcgcgtatcgctgagaagttgaaagctttaggcccagctcccgagcgcaagagcaccaagaaggaacaacccagtgttgcacctcgcacagatatgcctgcatctctcgccctccgtcccaaaaccactgcagaccaatccccaactaacaaacccgaacccaaaggcgagaagaccccctttgccgctgaagccgcattgccagaggcctctgaagctgactcaagtcctgcacctgtgcctgaatctcgtatcaacggttctgtgcagcgcccattttctcaggacccagcccgtatgtctgctcaggtagttgcagcgtcgggttctcaacccgccccatcgtggcctgaggcgcatccacagctggaacgattccaaccatcatggccttccggtaaccaaaatggaccacgagatgtgtgggccccgcccggcggtggtcgttctttgggcaacggaacatttagtgcagacattggcgccacacccgaagctcgcccagcaccgaacacagcacctgcctcgaatatggcagcccatcatcccgctcccattgggccgccacgttctaatcatatcccccatgcccaatcccagccgagtcgcattgccccaattgctccacctcgcggtgccaatccatgggcggcatttgatgccaaagctgatgacgcggtgagacgggcggagagacttcaggagagcgaccctctggatgacaaccgtgcacccgggttcaatgataagtggcgtcccgttgatctgaacgagagcggcagacgtacgctcaataaatcgcagggaggcgatgttcccaaacaggtatcagagcaggctctacgccctgaatctaaacccgtctcgcgccctgataagactcaacaagctcccgtcagcaatcctaacatgatgccacctaccggtccggctgcccaaactcgatccgggtcgcgtttctttccgccatcatccaaagacatactgcatgaagagacatctccgcagcattctcctcggactaaatcacctactccgcctccgccaactgctgatggacacccggcctacgatggtgacgcatccagacctcatgttgcacttccccctcatagaccgatagtcaagctccctccatctgcacagccaacgatgactggacccaccgcaccgccagccagacaggtccctgtgtcatttgcagctgccgctgcatccaacgctgcatcgagaacctcggaattggctgccgctggtcgccccgttagtcgagggagaggcttcaacggcatccctcagaaaccgcacgagattgcgtcccaagagaactggcagagcaagattaataatcttatggggaagaaatctacttcgccagctaagcctgcaactttgggcggtgcgatgctgccgatcgaatttcctcgatcgcatgattccatggatgtgcccatcctttcaccatcaggaaccgactctactgaggatagcagctacacgagccgggaaatggctgaagaatgtttcggagagcaggagatgggatcgctccctgtcgttcagctgcctaccaagactccggaggccgcatggcaagccgctagtatcaactggaatccgctaagtaagacactgcgtgttaccgctaccgctggcgagccttataagttctttgatgtcgaggatggtgatagaaaccgcgtcattcgcatatctgcgcccggaatgtcggatccgaagaccatacccatacccaatggtcgatctggtagtaaccctaggcgctcaggacctcgcggtggcagcgcccggcattcgtcaaaccgtggcggtcggcgaaatggccgagacgacgttggagagtccacctctgcactctcatctatccgaacatcttcgggtcgcggacgtggcttccgatcacgttctgacaactggggcaggcaggcagccccagccccaacggcacaatcttgaactgaaacttatgagtcttgtggtccgtgagaacgagacagctcggagacaagcgctcgtatttcgaacaacagctcgcaacgtttcgacatatcatatacaacaactggtctgcatgactgttctgcggatgctcagatttactgttgtacacaatactatacgacagtgtgtacaaacaattgattaggcgcaacacttattactacgcacaagtttcagttgcctgcgccacttttctttcttctctatttctccggtatccagcgttacttccctgtccattgcagaacggggttgattaggagagatctggtcagcatgttgcctgcaaatgaatggagcgtcagctctggcggtgatcagtgtctgggcttctcattggagtaacgagggcacgaacgctgcacagtataccaggcggatgcacatatttgtttttcggcgacaggttcagaatacctctcctggtagatctgatatggtcaatgtggaatggttccacaacacacaaagcatgaaggcttcttttcccggctgcggtccattatctgtttctcgatcgcttgtccgcgtcgcttcggaaaggaaaatgacccggcttgtctaatggttgcgaagcaagaaaggaaaagcaattggtggttgaatgaaacttggatgccccgtgctggagggttcgagatttcatgctacttgctatacatagttgcctttttgccgtttgcgaaaggtccggtatccaatgtaagggttcggatgaggtatgcaaatcaggctctggacaaggaaatcggaacgagcactcagatagcgaggtggaagaattgaaaatccattttaaaattctttgtgactatttgttgagtgttgttgcatgaaatgaagaccggtttgaagtgatatcgatgtcaagatagtgtttctgcgtgacagcaaccatatccattcatatgtgctaccctcgcaggctatgaatgaagaagatgatacacgcgctctatataattcggatagatatgagacaacactctagata

SEQ ID NO: 11864 - DNA, 1065 bp, Muscodor strobelii
  misc_feature: SGI cDNA ID NO. 563826
  misc_feature: Encodes the peptide sequence at SEQ ID NO 11865
atgccacctaccggtccggctgcccaaactcgatccgggtcgcgtttctttccgccatcatccaaagacatactgcatgaagagacatctccgcagcattctcctcggactaaatcacctactccgcctccgccaactgctgatggacacccggcctacgatggtgacgcatccagacctcatgttgcacttccccctcatagaccgatagtcaagctccctccatctgcacagccaacgatgactggacccaccgcaccgccagccagacaggtccctgtgtcatttgcagctgccgctgcatccaacgctgcatcgagaacctcggaattggctgccgctggtcgccccgttagtcgagggagaggcttcaacggcatccctcagaaaccgcacgagattgcgtcccaagagaactggcagagcaagattaataatcttatggggaagaaatctacttcgccagctaagcctgcaactttgggcggtgcgatgctgccgatcgaatttcctcgatcgcatgattccatggatgtgcccatcctttcaccatcaggaaccgactctactgaggatagcagctacacgagccgggaaatggctgaagaatgtttcggagagcaggagatgggatcgctccctgtcgttcagctgcctaccaagactccggaggccgcatggcaagccgctagtatcaactggaatccgctaagtaagacactgcgtgttaccgctaccgctggcgagccttataagttctttgatgtcgaggatggtgatagaaaccgcgtcattcgcatatctgcgcccggaatgtcggatccgaagaccatacccatacccaatggtcgatctggtagtaaccctaggcgctcaggacctcgcggtggcagcgcccggcattcgtcaaaccgtggcggtcggcgaaatggccgagacgacgttggagagtccacctctgcactctcatctatccgaacatcttcgggtcgcggacgtggcttccgatcacgttctgacaactggggcaggcaggcagccccagccccaacggcacaatcttga

SEQ ID NO: 11865 - protein, 354 aa, Muscodor strobelii
  misc_feature: SGI Peptide ID NO. 563826
  misc_feature (1)..(344): NCBI GI: 256725625 Blast Desc: NECHADRAFT_43190 [Nectria haematococca mpVI 77-13-4]
  misc_feature (8)..(344): NCBI GI: 116194388 Blast Desc: CHGG_03792 [Chaetomium globosum CBS 148.51] gi|88179705|gb|EAQ87173.1| CHGG_03792 [Chaetomium globosum CBS 148.51]
  misc_feature (14)..(281): NCBI GI: 46111181 Blast Desc: FG02472.1 [Gibberella zeae PH-1]
  misc_feature (1)..(313): NCBI GI: 261359800 Blast Desc: conserved [Verticillium albo-atrum VaMs.102]
  misc_feature (14)..(308): NCBI GI: 156032928 Blast Desc: SS1G_13870 [Sclerotinia sclerotiorum 1980] gi|154699272|gb|EDN99010.1| SS1G_13870 [Sclerotinia sclerotiorum 1980]
  misc_feature (3)..(287): NCBI GI: 145607285 Blast Desc: MGG_12158 [Magnaporthe grisea 70-15] gi|145014869|gb|EDJ99437.1| MGG_12158 [Magnaporthe grisea 70-15]
  misc_feature (3)..(350): NCBI GI: 171683599 Blast Desc: protein product [Podospora anserina] gi|170941759|emb|CAP67413.1| protein product [Podospora anserina]
  misc_feature (11)..(289): NCBI GI: 85105066 Blast Desc: NCU05219 [Neurospora crassa OR74A] gi|28923462|gb|EAA32643.1| [Neurospora crassa OR74A]
  misc_feature (7)..(313): NCBI GI: 154294495 Blast Desc: BC1G_13850 [Botryotinia fuckeliana B05.10] gi|150844690|gb|EDN19883.1| BC1G_13850 [Botryotinia fuckeliana B05.10]
  misc_feature (14)..(298): NCBI GI: 145234292 Blast Desc: An02g13860 [Aspergillus niger] gi|134057462|emb|CAK37970.1| protein product [Aspergillus niger]
MPPTGPAAQTRSGSRFFPPSSKDILHEETSPQHSPRTKSPTPPPPTADGHPAYDGDASRPHVALPPHRPIVKLPPSAQPTMTGPTAPPARQVPVSFAAAAASNAASRTSELAAAGRPVSRGRGFNGIPQKPHEIASQENWQSKINNLMGKKSTSPAKPATLGGAMLPIEFPRSHDSMDVPILSPSGTDSTEDSSYTSREMAEECFGEQEMGSLPVVQLPTKTPEAAWQAASINWNPLSKTLRVTATAGEPYKFFDVEDGDRNRVIRISAPGMSDPKTIPIPNGRSGSNPRRSGPRGGSARHSSNRGGRRNGRDDVGESTSALSSIRTSSGRGRGFRSRSDNWGRQAAPAPTAQS

SEQ ID NO: 11866 - DNA, 5404 bp, Muscodor strobelii; identical to SEQ ID NO: 11863
  misc_feature: SGI EST ID NO. CUFF.28199.0
  misc_feature: Variant of the nucleotide sequence at SEQ ID NO 11864

SEQ ID NO: 11867 - DNA, 306 bp, Muscodor strobelii
  misc_feature: SGI cDNA ID NO. 563827
  misc_feature: Reduced expression when VOC is produced
  misc_feature: Encodes the peptide sequence at SEQ ID NO 11868
atgagtttcgtcactcgccggggtctctccaccctcatccctcccaaggttgcctcgccttctgccatcggcgccgcccccgatgctgtccgcatgaagcgcgtcgtcaacttctacgagaagctcccccgaggccccgcccccgaggccaaggccagcggtctcttcggccgctaccaggccaagcactttggcaagaacccgaccgccaagcccatcatccacgccatcggcatcgtgctgctgatcggataccccatgacctattacttccacttgcgccaccacaagaacaacgcccactaa

SEQ ID NO: 11868 - protein, 101 aa, Muscodor strobelii
  misc_feature: SGI Peptide ID NO. 563827
  misc_feature (1)..(101): NCBI GI: 145607287 Blast Desc: mitochondrial F1F0 ATP synthase subunit F Atp17 [Magnaporthe grisea 70-15] gi|145014870|gb|EDJ99438.1| mitochondrial F1F0 ATP synthase subunit F Atp17 [Magnaporthe
  misc_feature (1)..(101): NCBI GI: 256725624 Blast Desc: NECHADRAFT_61885 [Nectria haematococca mpVI 77-13-4]
  misc_feature (1)..(101): NCBI GI: 226284644 Blast Desc: mitochondrial F1F0 ATP synthase subunit [Paracoccidioides brasiliensis Pb01]
  misc_feature (1)..(101): NCBI GI: 171683601 Blast Desc: protein product [Podospora anserina] gi|170941760|emb|CAP67414.1| protein product [Podospora anserina]
  misc_feature (1)..(101): NCBI GI: 164429199 Blast Desc: NCU05220 [Neurospora crassa OR74A] gi|157072980|gb|EAA32644.2| [Neurospora crassa OR74A]
  misc_feature (1)..(101): NCBI GI: 261188682 Blast Desc: mitochondrial F1F0 ATP synthase subunit F [Ajellomyces dermatitidis SLH14081] gi|239593113|gb|EEQ75694.1| mitochondrial F1F0 ATP synthase subunit F [Ajellomyces dermatitidis SLH14081]
  misc_feature (1)..(101): NCBI GI: 239606267 Blast Desc: mitochondrial F1F0 ATP synthase subunit F [Ajellomyces dermatitidis ER-3]
  misc_feature (1)..(101): NCBI GI: 225558460 Blast Desc: mitochondrial ATP synthase subunit F [Ajellomyces capsulatus G186AR] gi|240274893|gb|EER38408.1| mitochondrial F1F0 ATP synthase subunit F Atp17 [Ajellomyces capsulatus H143]
  misc_feature (1)..(101): NCBI GI: 154286264 Blast Desc: mitochondrial F1F0 ATP synthase subunit F [Ajellomyces capsulatus NAm1] gi|150407568|gb|EDN03109.1| mitochondrial F1F0 ATP synthase subunit F [Ajellomyces capsulatus NAm1]
  misc_feature (1)..(101): NCBI GI: 238501850 Blast Desc: mitochondrial F1F0 ATP synthase subunit F (Atp17), [Aspergillus flavus NRRL3357] gi|220692396|gb|EED48743.1| mitochondrial F1F0 ATP synthase subunit F (Atp17), [Aspergillus
  misc_feature: Useful for introducing or modulating the production of volatile compounds
MSFVTRRGLSTLIPPKVASPSAIGAAPDAVRMKRVVNFYEKLPRGPAPEAKASGLFGRYQAKHFGKNPTAKPIIHAIGIVLLIGYPMTYYFHLRHHKNNAH

SEQ ID NO: 11869 - DNA, 1544 bp, Muscodor strobelii
  misc_feature: SGI EST ID NO. CUFF.28963.1
  misc_feature: Variant of the nucleotide sequence at SEQ ID NO 11867
gaaacacgtacgacgtagccttgtcgatgtgagcagcgtagtcgggggcattgggcgaggagactgcaggagtggcaggcttagtcttgctgagggctgtggttgcgtcgtcggacttccatcgtcgttgaggttggactcggggcgtgacgggggcggaggcgcgcaggagtcgggctgcggcgggggatctgagagacggcatgtttcctgtgtggccgagccggatcggcggatcaattggtgtggtagggtgtgaaatgaagctgtaactacgtcgtaggcgttgcggcgaggtcgaagcttggagggtgggcaggtcggcagctgtgggggcgtatgcatgggcactgattggctgcggcgggcacagagccttgccggactcagcgttgcgaggtcttttctgctcagtgctcacctcacctccaacagctgcccgacttcaaatccactgctgaacggcatccctccatcccagacactcaattgcctgcctcggtcgctggtcaattgatatttgtctttttctttcattcctcttccctcctttctgtcgcccactacccgccaacatgagtttcgtcactcgccggggtctctccaccctcatccctcccaaggttgcctcgccttctgtacgtatatcttgcatcatatcgctagcatgcattcgccttgagtcaccgtaactctccgagtctttccaccgagatgaacacgagacgaaccgccgtttcgagcgaccgttccgaaaagccccgatttcacataaaccgcccactccatcacgaagaaaacgtagctagaatatagatcagaagaaagaatgtctaacgaggaacacaggccatcggcgccgcccccgatgctgtccgcatgaagcgcgtcgtcaacttctacgagaagctcccccgaggccccgcccccgaggccaaggccagcggtctcttcggccgctaccaggccaagcactttggcaagaacccgaccgccaagcccatcatccacgccatcggcatcgtgctgctgatcggataccccatgacctattacttccacttgcgccaccacaagaacaacgcccactaagcgagctctcgaatctgggaggttgggatgggaggaggaaagaagctgggcaggtaccttcggcccagcggtgcataattgtacataagatcgatggtcctggcatgagctttctatattgccatgctgccaatgttctaaagaaggcgaggtgacctcacattgtattagaaataaagttcttttgtccaattacctctctgagaaagatggtaaaaaggagtgtgagacgatctatcttgaggagtcaaatatcagatgtctgattctggggacttggttattcatggctgctgtgacttcctcgatggcatataaccaacggcattccaatgcagttctcgagctctggatgtggtgctagcaagacttgtgctacttatttcctggcgatatgtcatgatatgggaccgtaagttaagtttatgctacttgatattattcgaggtaaa

SEQ ID NO: 11870 - DNA, 615 bp, Muscodor strobelii
  misc_feature: SGI cDNA ID NO. 563828
  misc_feature: Reduced expression when VOC is produced
  misc_feature: Encodes the peptide sequence at SEQ ID NO 11871
atgccgtctctcagatcccccgccgcagcccgactcctgcgcgcctccgcccccgtcacgccccgagtccaacctcaacgacgatggaagtccgacgacgcaaccacagccctcagcaagactaagcctgccactcctgcagtctcctcgcccaatgcccccgactacgctgctcacatcgacaaggctacgtcgaccttcactccagtgcctaagcgactcatggacggaagcgaagacaccgatatcctccccgccgccgttctctccaaggcccccatcgagctccaggccagaaccgttcgcatctaccagccctccaaacccgccacacaatctggcaactggggcagccaccactggcgcatggactgggatgttctccccaagggccacagatgggagaaccccctgatgggttggcaatcgtcgggtgatttcatgcaaggcaccaagatcgagttcaagtctaaggaggacgctatccgcttcgccgaaaagcagggctacgagtactttgtccaagagcccaaagagcgctccttcacccctaaggcctacgccaacaacttcctctacacccccaacaagctcaagctcatccgcgcaaagtag

SEQ ID NO: 11871 - protein, 204 aa, Muscodor strobelii
  misc_feature: SGI Peptide ID NO. 563828
  misc_feature (99)..(201): Pfam Id: PF04800 Pfam Desc: ETC complex I subunit conserved region
  misc_feature (1)..(204): NCBI GI: 39944250 Blast Desc: MGG_04136 [Magnaporthe grisea 70-15] gi|145014871|gb|EDJ99439.1| MGG_04136 [Magnaporthe grisea 70-15]
  misc_feature (1)..(204): NCBI GI: 46111185 Blast Desc: FG02474.1 [Gibberella zeae PH-1]
  misc_feature (1)..(204): NCBI GI: 256726037 Blast Desc: [Nectria haematococca mpVI 77-13-4]
  misc_feature (1)..(204): NCBI GI: 156032924 Blast Desc: SS1G_13868 [Sclerotinia sclerotiorum 1980] gi|154699270|gb|EDN99008.1| SS1G_13868 [Sclerotinia sclerotiorum 1980]
  misc_feature (1)..(204): NCBI GI: 154294499 Blast Desc: NADH-ubiquinone oxidoreductase 21kDa subunit [Botryotinia fuckeliana B05.10] gi|150844692|gb|EDN19885.1| NADH-ubiquinone oxidoreductase 21kDa subunit [Botryotinia B05.10]
  misc_feature (54)..(204): NCBI GI: 242776963 Blast Desc: NADH-ubiquinone oxidoreductase 18 kDa subunit, [Talaromyces stipitatus ATCC 10500] gi|218722556|gb|EED21974.1| NADH-ubiquinone oxidoreductase 18 kDa subunit, [Talaromyces ATCC
  misc_feature (4)..(204): NCBI GI: 119192750 Blast Desc: CIMG_00752 [Coccidioides immitis RS]
  misc_feature (4)..(204): NCBI GI: 240105979 Blast Desc: NADH-ubiquinone oxidoreductase 21 kDa subunit, mitochondrial precursor, [Coccidioides posadasii C735 delta SOWgp]
  misc_feature (8)..(204): NCBI GI: 70989659 Blast Desc: NADH-ubiquinone oxidoreductase 18 kDa subunit [Aspergillus fumigatus Af293] gi|66847310|gb|EAL87641.1| NADH-ubiquinone oxidoreductase 18 kDa subunit, [Aspergillus 18
  misc_feature (1)..(204): NCBI GI: 116194386 Blast Desc: CHGG_03791 [Chaetomium globosum CBS 148.51] gi|88179704|gb|EAQ87172.1| CHGG_03791 [Chaetomium globosum CBS 148.51]
  misc_feature: Useful for introducing or modulating the production of volatile compounds
MPSLRSPAAARLLRASAPVTPRVQPQRRWKSDDATTALSKTKPATPAVSSPNAPDYAAHIDKATSTFTPVPKRLMDGSEDTDILPAAVLSKAPIELQARTVRIYQPSKPATQSGNWGSHHWRMDWDVLPKGHRWENPLMGWQSSGDFMQGTKIEFKSKEDAIRFAEKQGYEYFVQEPKERSFTPKAYANNFLYTPNKLKLIRAK

SEQ ID NO: 11872 - DNA, 3604 bp, Muscodor strobelii
  misc_feature: SGI EST ID NO. CUFF.28962.0
  misc_feature: Variant of the nucleotide sequence at SEQ ID NO 11870
tttacctcgaataatatcaagtagcataaacttaacttacggtcccatatcatgacatatcgccaggaaataagtagcacaagtcttgctagcaccacatccagagctcgagaactgcattggaatgccgttggttatatgccatcgaggaagtcacagcagccatgaataaccaagtccccagaatcagacatctgatatttgactcctcaagatagatcgtctcacactcctttttaccatctttctcagagaggtaattggacaaaagaactttatttctaatacaatgtgaggtcacctcgccttctttagaacattggcagcatggcaatatagaaagctcatgccaggaccatcgatcttatgtacaattatgcaccgctgggccgaaggtacctgcccagcttctttcctcctcccatcccaacctcccagattcgagagctcgcttagtgggcgttgttcttgtggtggcctagtcggaaactgtcagccttgttgtctcaacgtagagatctcatcagagtcctgttcttacgcaagtggaagtaataggtcatggggtatccgatcagcagcacgatgccgatggcgtggatgatgggcttggcggtcgggttcttgccaaagtgcttggcctggtagcggccgaagagaccgctggccttggcctcgggggcggggcctcgggggagcttctcgtagaagttgacgacgcgcttcatgcggacagcatcgggggcggcgccgatggcctgtgttcctcgttagacattctttcttctgatctatattctagctacgttttcttcgtgatggagtgggcggtttatgtgaaatcggggcttttcggaacggtcgctcgaaacggcggttcgtctcgtgttcatctcggtggaaagactcggagagttacggtgactcaaggcgaatgcatgctagcgatatgatgcaagatatacgtacagaaggcgaggcaacctgtcatacattaattagcagtcgtcaaagcattgtctggagacgtccacgaaccttgggagggatgagggtggagagaccccggcgagtgacgaaactcatgttggcgggtagtgggcgacagaaaggagggaagaggaatgaaagaaaaagacaaatatcaattgaccagcgaccgaggcaggcaattgagtgtctgggatggagggatgccgttcagcagtggatttgaagtcgggcagctgttggaggtgaggtgagcactgagcagaaaagacctcgcaacgctgagtccggcaaggctctgtgcccgccgcagccaatcagtgcccatgcatacgcccccacagctgccgacctgcccaccctccaagcttcgacctcgccgcaacgcctacgacgtagttacagcttcatttcacaccctaccacaccaattgatccgccgatccggctcggccacacaggaaacatgccgtctctcagatcccccgccgcagcccgactcctgcgcgcctccgcccccgtcacgccccgagtccaacctcaacgacgatggaagtccgacgacgcaaccacagccctcagcaagactaagcctgccactcctgcagtctcctcgcccaatgcccccgactacgctgctcacatcgacaaggctacgtcgaccttcactccagtgcctaagcgactcatggacggaagcgaagacaccgatatcctccccgccgccgttctctccaaggcccccatcgagctccaggccagaaccgttcgcatctaccagccctccaaacccgccacacaatctggcaactggggcagccaccactggcgcatggactgggatgttctccccaagggccacagatgggagaaccccctgatgggttggcaatcgtcgggtgatttcatgcaaggcaccaagatcgagttcaagtctaaggaggacgctatccgcttcgccgaaaagcagggctacgagtactttgtccaagagcccaaagagcgctccttcacccctaaggcctacgccaacaacttcctctacacccccaacaagctcaagctcatccgcgcaaagtagaggttcaagaggaatggagtattcacatgtcactttataccaatagaatcgcaagaaccattagggaaaaattgtacatataatctaagcagtggtatcatgaggccgggcgccgtcccctttcctttccttgccgtaatgaaggcatgttatgaaaagcgatatgcaatgacagtccgtcgcccaagcatgtggcgactttaggctctcccgtggttgcgagacctcctgtccacgttcgtcaatggacttgttgcggctccttatccatgcctagtaccccacccccaacgccaattgtacagaaaagacctgcgccttatagccctatattgtctgcaggtcgtgggaagaagccacgtccctatccctgcgaaacgcctgtgtcatcaagtcatgcatatcgtactgattcgcaaataaactgccaattgttgcccatccgcagttttcaaagcagccctcgctcgcaccaacgccagtaatatcaaaggagatagccacccgtcacaatgagttcaagtcgtaatcattggttcgtggccattctggtggtgatcaggcgagtctacgccgcagctgtcaagacccaagtcgatattggaagggaggtccttcttggtctctttcctcaccacctcttctgtccatgctctcatctggacgagctggcgaatcgctgcttctttgcgctgttgctgcgactccagtatggcctggtttacctggtcggcaacctctcgcctgagacccggctggagaagagcagacagagacgggtcgagggactcgctatggggaaagacgagaagcgacatagttttctcgagatcctccaggaatttggggctggtcacagccttgggtcctagtttactctgggcgaattgcagtgcagccgtgatatcgccctcggggctattgttacattcccgaatcaactcgaccaattgcaggcgaagtagtgcaaagttcaaaggctgattgttgtcgagtatcttttcaacggtcagacatttcatatccacgtcatagatcaaggcaagcgattttggaatgacaaatgctcatagaaaagtggttgttcctcatcaataacccgaaggtctatgagtggtgcatgtaaaactcgtgttcaaatcacagcaagcagcgtttgcagggaataaggggatcacagtctggggaacttaccgaggggtctatttcattgagttcttgaatagcattgtccatctcacccttgaggatgaaggcgttgactttcgtcctctgttggattgcggaggtaggttgctggggaggcaggtttgcctcggcggaaaacttggctgcggcatttggatacccagcgacggtaaggtaatctagaatgagcgcattgatatcactttaccgccagaaataatgttagtaacggtgatttgcttgcgtgctcagcaaaggggaaaaaaagtcaaggctattggtcagaaacttaagaagtttgaaatcgctctccgcatggttttctcagagagattcccattgata

SEQ ID NO: 11873 - DNA, 756 bp, Muscodor strobelii
  misc_feature: SGI cDNA ID NO. 563829
  misc_feature: Encodes the peptide sequence at SEQ ID NO 11874
atgacttcgtcaacggcaactgccactcccatgcggcatgccttcaacaggcaggccgaagccgtcagaacgcccaagagtgatatcaatgcgctcattctagattaccttaccgtcgctgggtatccaaatgccgcagccaagttttccgccgaggcaaacctgcctccccagcaacctacctccgcaatccaacagaggacgaaagtcaacgccttcatcctcaagggtgagatggacaatgctattcaagaactcaatgaaatagacccctcgatactcgacaacaatcagcctttgaactttgcactacttcgcctgcaattggtcgagttgattcgggaatgtaacaatagccccgagggcgatatcacggctgcactgcaattcgcccagagtaaactaggacccaaggctgtgaccagccccaaattcctggaggatctcgagaaaactatgtcgcttctcgtctttccccatagcgagtccctcgacccgtctctgtctgctcttctccagccgggtctcaggcgagaggttgccgaccaggtaaaccaggccatactggagtcgcagcaacagcgcaaagaagcagcgattcgccagctcgtccagatgagagcatggacagaagaggtggtgaggaaagagaccaagaaggacctcccttccaatatcgacttgggtcttgacagctgcggcgtagactcgcctgatcaccaccagaatggccacgaaccaatgattacgacttga

SEQ ID NO: 11874 - protein, 251 aa, Muscodor strobelii
  misc_feature: SGI Peptide ID NO. 563829
  misc_feature (27)..(53): Pfam Id: PF08513 Pfam Desc: LisH
  misc_feature (1)..(251): NCBI GI: 46111187 Blast Desc: FG02475.1 [Gibberella zeae PH-1]
  misc_feature (1)..(251): NCBI GI: 116194384 Blast Desc: CHGG_03790 [Chaetomium globosum CBS 148.51] gi|88179703|gb|EAQ87171.1| CHGG_03790 [Chaetomium globosum CBS 148.51]
  misc_feature (2)..(251): NCBI GI: 261359802 Blast Desc: conserved [Verticillium albo-atrum VaMs.102]
  misc_feature (3)..(241): NCBI GI: 145245247 Blast Desc: An11g09330 [Aspergillus niger] gi|134079589|emb|CAK40806.1| protein product [Aspergillus niger]
  misc_feature (1)..(251): NCBI GI: 171683605 Blast Desc: protein product [Podospora anserina] gi|170941762|emb|CAP67416.1| protein product [Podospora anserina]
  misc_feature (13)..(243): NCBI GI: 169769370 Blast Desc: [Aspergillus oryzae RIB40] gi|238501838|ref|XP_002382153.1| conserved [Aspergillus flavus NRRL3357] gi|83767013|dbj|BAE57153.1| protein product oryzae]
  misc_feature (13)..(244): NCBI GI: 115400645 Blast Desc: conserved [Aspergillus terreus NIH2624] gi|114191577|gb|EAU33277.1| conserved [Aspergillus terreus NIH2624]
  misc_feature (13)..(231): NCBI GI: 154286252 Blast Desc: conserved [Ajellomyces capsulatus NAm1] gi|150407562|gb|EDN03103.1| conserved [Ajellomyces capsulatus NAm1]
  misc_feature (13)..(231): NCBI GI: 225558454 Blast Desc: CTLH domain-containing protein [Ajellomyces capsulatus G186AR] gi|240274884|gb|EER38399.1| conserved [Ajellomyces capsulatus H143]
  misc_feature (13)..(244): NCBI GI: 261188670 Blast Desc: CTLH domain-containing protein [Ajellomyces dermatitidis SLH14081] gi|239593107|gb|EEQ75688.1| CTLH domain-containing protein [Ajellomyces dermatitidis SLH14081]
MTSSTATATPMRHAFNRQAEAVRTPKSDINALILDYLTVAGYPNAAAKFSAEANLPPQQPTSAIQQRTKVNAFILKGEMDNAIQELNEIDPSILDNNQPLNFALLRLQLVELIRECNNSPEGDITAALQFAQSKLGPKAVTSPKFLEDLEKTMSLLVFPHSESLDPSLSALLQPGLRREVADQVNQAILESQQQRKEAAIRQLVQMRAWTEEVVRKETKKDLPSNIDLGLDSCGVDSPDHHQNGHEPMITT

SEQ ID NO: 11875 - DNA, 2014 bp, Muscodor strobelii
  misc_feature: SGI EST ID NO. CUFF.28963.2
  misc_feature: Variant of the nucleotide sequence at SEQ ID NO 11873
gcattttccacacacacctcctccaaatccagaccacacgcagccgctatcatttctctctgctttaccatcactatccacgagggccaacgtcctagagtgcctgccgggatcggcagcacctctccgatcactgcttgcattgccgtgtttcgtttcctgtgtttcattccttgtagcgttgtgattgcctgcgtatactcgtcgccttttctccatgccgacggcctcgcggatcgcgccgggctaacaatctagaatcatgacttcgtcaacggcaactgccactcccatgcggcatgccttcaacaggcaggccgaagccgtcagaacgcccaagagtgatatcaatgcgctcattctagattaccttaccgtcgctgggtatccaaatgccgcagccaagttttccgccgaggcaaacctgcctccccagcaacctacctccgcaatccaacagaggacgaaagtcaacgccttcatcctcaagggtgagatggacaatgctattcaagaactcaatgaaatagacccctcgatactcgacaacaatcagcctttgaactttgcactacttcgcctgcaattggtcgagttgattcgggaatgtaacaatagccccgagggcgatatcacggctgcactgcaattcgcccagagtaaactaggacccaaggctgtgaccagccccaaattcctggaggatctcgagaaaactatgtcgcttctcgtctttccccatagcgagtccctcgacccgtctctgtctgctcttctccagccgggtctcaggcgagaggttgccgaccaggtaaaccaggccatactggagtcgcagcaacagcgcaaagaagcagcgattcgccagctcgtccagatgagagcatggacagaagaggtggtgaggaaagagaccaagaaggacctcccttccaatatcgacttgggtcttgacagctgcggcgtagactcgcctgatcaccaccagaatggccacgaaccaatgattacgacttgaactcattgtgacgggtggctatctcctttgatattactggcgttggtgcgagcgagggctgctttgaaaactgcggatgggcaacaattggcagtttatttgcgaatcagtacgatatgcatgacttgatgacacaggcgtttcgcagggatagggacgtggcttcttcccacgacctgcagacaatatagggctataaggcgcaggtcttttctgtacaattggcgttgggggtggggtactaggcatggataaggagccgcaacaagtccattgacgaacgtggacaggaggtctcgcaaccacgggagagcctaaagtcgccacatgcttgggcgacggactgtcattgcatatcgcttttcataacatgccttcattacggcaaggaaaggaaaggggacggcgcccggcctcatgataccactgcttagattatatgtacaatttttccctaatggttcttgcgattctattggtataaagtgacatgtgaatactccattcctcttgaacctctactttgcgcggatgagcttgagcttgttgggggtgtagaggaagttgttggcgtaggccttaggggtgaaggagcgctctttgggctcttggacaaagtactcgtagccctgcttttcggcgaagcggatagcgtcctccttagacttgaactcgatcttggtgccttgcatgaaatcacccgacgattgccaacccatcagggggttctcccatctgtggcccttggggagaacatcccagtccatgcgccagtggtggctgccccagttgccagattgtgtggcgggtttggagggctggtagatgctggagattggttagagagttatgtagcgtggtgctggacaagcatagtgtgagacaaaccgaacggttctggcctggagctcgatgggggccttggagagaacggcggcggggaggatatcggtgtcttcgcttccgtccatgagtcgcttaggcactggagtgaag

SEQ ID NO: 11876 - DNA, 1386 bp, Muscodor strobelii
  misc_feature: SGI cDNA ID NO. 563830
  misc_feature: Encodes the peptide sequence at SEQ ID NO 11877
atgaacacgggaattggctcgccagccctggctgctggccagacctctgacaccattgcaaaacgagtccattatagccctccatgggctgacctcagtattattggcattgctggtagctcggggtcgggaaagtcgaccctctcacatgctattgtgagcaagatgaatttaccgtgggttgtaatcttgtcgatggactcgtattataaaccattagatgccgagtcctccaagaaagctttcttaaacgagtatgactttgactcgcccgaggctatagatttcgatgcactgttggacaacttgaaagacttgaaggccggtaaacgtgcagatatccccgtatactcatttgaaaagcaccagcgcatggaacaaacgacaaccatttactcacctcacgttctaattcttgagggtatctttgcgctgtacgacgagagaatcatggatctcatggacatgaaaatttattgcgaagcggacgcagatacctgtctctctcgacgaattttaagagatgtgagagaccgcggccgtacagttgaggggtgtatcaagcagtggtttggatatgtgaaacccaattatgaaaagtatgttgttcctcagaggatgaatgcagacatcatcgtgcctcggggtatcgagaatcgtgtcgcaatgaccatggtgacccaatacatagagagaaagctgttggaaaagtccacccaccatcgggccgcattgaaaagtctggaagcgggcttcgagagcgaaccgctttcagaacgagtagttatcctaaaagagactcctcagctcaaaggcatgaacaccttaattcatgacatcgacacctctagcgaagattatatcttttatttcgatagattttcctgtctactcattgagcaggcattgaataacgtacacttcaaagagttgactgtccagacatctgccggggccccatatcacggcctagcaccgaagggagaagtcagcgcggtactcgttctccgcggaggtgctacatttgaagctgggctgcggagggtcatcccggattgtcgtactgggcgtctcctgattcagtccaacgtcaggacaggcgagccagagcttcactatttaaagttgcccaaggatattgagcaacatgacagcgtgctacttttagattcacagatgtcaagtggtggatcggcactgatggctgttcaagtcctcgttgaccacggagtccctcaggaacgaatagttttcgccacttattcagctggacgagtgggattacatcgccttactagagtgttcccagagattgcaatagtggtcggacatatggtacctgattttgaagaaagatgggtggagagtagatatttccgctgttaa

SEQ ID NO: 11877 - protein, 461 aa, Muscodor strobelii
  misc_feature: SGI Peptide ID NO. 563830
  misc_feature (34)..(222): Pfam Id: PF00485 Pfam Desc: Phosphoribulokinase / Uridine kinase family
  misc_feature (18)..(461): NCBI GI: 85105083 Blast Desc: NCU05224 [Neurospora crassa OR74A] gi|28923467|gb|EAA32648.1| NCU05224 [Neurospora crassa OR74A]
  misc_feature (11)..(460): NCBI GI: 116194382 Blast Desc: CHGG_03789 [Chaetomium globosum CBS 148.51] gi|88179702|gb|EAQ87170.1| CHGG_03789 [Chaetomium globosum CBS 148.51]
  misc_feature (12)..(461): NCBI GI: 171683607 Blast Desc: protein product [Podospora anserina] gi|170941763|emb|CAP67417.1| protein product [Podospora anserina]
  misc_feature (10)..(461): NCBI GI: 261359803 Blast Desc: uridine kinase [Verticillium albo-atrum VaMs.102]
  misc_feature (8)..(461): NCBI GI: 256726036 Blast Desc: [Nectria haematococca mpVI 77-13-4]
  misc_feature (8)..(460): NCBI GI: 46111189 Blast Desc: FG02476.1 [Gibberella zeae PH-1]
  misc_feature (20)..(461): NCBI GI: 189205893 Blast Desc: uridine-cytidine kinase 2 [Pyrenophora tritici-repentis Pt-1C-BFP] gi|187975374|gb|EDU42000.1| uridine-cytidine kinase 2 [Pyrenophora tritici-repentis
  misc_feature (16)..(461): NCBI GI: 70989647 Blast Desc: uridine kinase [Aspergillus fumigatus Af293] gi|66847304|gb|EAL87635.1| uridine kinase, [Aspergillus fumigatus Af293] gi|159129080|gb|EDP54194.1| uridine kinase, [Aspergillus
  misc_feature (16)..(461): NCBI GI: 119480277 Blast Desc: uridine kinase, [Neosartorya fischeri NRRL 181] gi|119408321|gb|EAW18270.1| uridine kinase, [Neosartorya fischeri NRRL 181]
  misc_feature (25)..(461): NCBI GI: 121710090 Blast Desc: uridine kinase, [Aspergillus clavatus NRRL 1] gi|119400811|gb|EAW11235.1| uridine kinase, [Aspergillus clavatus NRRL 1]
  misc_feature (45)..(442): SWISSPROT Homolog: EC 2.7.1.48 Uridine kinase
MNTGIGSPALAAGQTSDTIAKRVHYSPPWADLSIIGIAGSSGSGKSTLSHAIVSKMNLPWVVILSMDSYYKPLDAESSKKAFLNEYDFDSPEAIDFDALLDNLKDLKAGKRADIPVYSFEKHQRMEQTTTIYSPHVLILEGIFALYDERIMDLMDMKIYCEADADTCLSRRILRDVRDRGRTVEGCIKQWFGYVKPNYEKYVVPQRMNADIIVPRGIENRVAMTMVTQYIERKLLEKSTHHRAALKSLEAGFESEPLSERVVILKETPQLKGMNTLIHDIDTSSEDYIFYFDRFSCLLIEQALNNVHFKELTVQTSAGAPYHGLAPKGEVSAVLVLRGGATFEAGLRRVIPDCRTGRLLIQSNVRTGEPELHYLKLPKDIEQHDSVLLLDSQMSSGGSALMAVQVLVDHGVPQERIVFATYSAGRVGLHRLTRVFPEIAIVVGHMVPDFEERWVESRYFRC

SEQ ID NO: 11878 - DNA, 1890 bp, Muscodor strobelii
  misc_feature: SGI EST ID NO. CUFF.28966.0
  misc_feature: Variant of the nucleotide sequence at SEQ ID NO 11876
acagttcaaaatatttatttcggcttctcaatttggctcattgaatactcacattctattccatgtgatataccctagatcatcccttttttgatgtagcttctgcgagatacggctccctccgtcgcacttctccgccgtctgcttctcagctgttactgggcgtgtatcttcaagctgtctaggcgggcacgcgacctcccaaaggtttgcttcgtgcaggtaggacatcattgtttgaaagccgcctattgtctatttcctggcctcactcgcgatttttctctcatgtccaacacaataccaacaaccgagctggaggaatttccgttcacgtcttcaagtgaatcaaaatgaacacgggaattggctcgccagccctggctgctggccagacctctgacaccattgcaaaacgagtccattatagccctccatgggctgacctcagtattattggcattgctggtagctcggggtcgggaaagtcgaccctctcacatgctattgtgagcaagatgaatttaccgtgggttgtaatcttgtcgatggtcagttctgtagttcaaggcattgggtgtggcaagctatgctgaccccgtcgtaggactcgtattataaaccattagatgccgagtcctccaagaaagctttcttaaacgagtatgactttgactcgcccgaggctatagatttcgatgcactgttggacaacttgaaagacttgaaggccggtaaacgtgcagatatccccgtatactcatttgaaaagcaccagcgcatggaacaaacgacaaccatttactcacctcacgttctaattcttgagggtatctttgcgctgtacgacgagagaatcatggatctcatggacatgaaaatttattgcgaagcggacgcagatacctgtctctctcgacgaattttaagagatgtgagagaccgcggccgtacagttgaggggtgtatcaagcagtggtttggatatgtgaaacccaattatgaaaagtatgttgttcctcagaggatgaatgcagacatcatcgtgcctcggggtatcgagaatcgtgtcgcaatgaccatggtgacccaatacatagagagaaagctgttggaaaagtccacccaccatcgggccgcattgaaaagtctggaagcgggcttcgagagcgaaccgctttcagaacgagtagttatcctaaaagagactcctcagctcaaaggcatgaacaccttaattcatgacatcgacacctctagcgaagattatatcttttatttcgatagattttcctgtctactcattgagcaggcattgaataacgtacacttcaaagagttgactgtccagacatctgccggggccccatatcacggcctagcaccgaagggagaagtcagcgcggtactcgttctccgcggaggtgctacatttgaagctgggctgcggagggtcatcccggattgtcgtactgggcgtctcctgattcagtccaacgtcaggacaggcgagccagagcttcactatttaaagttgcccaaggatattgagcaacatgacagcgtgctacttttagattcacagatgtcaagtggtggatcggcactgatggctgttcaagtcctcgttgaccacggagtccctcaggaacgaatagttttcgccacttattcagctggacgagtgggattacatcgccttactagagtgttcccagagattgcaatagtggtcggacatatggtacctgattttgaagaaagatgggtggagagtagatatttccgctgttaaatactcgacctctatgatctacatatgtagggttgtgtttgcatataacatctccatcagcatagcgtttcaattcgacagaacctacacaagac

SEQ ID NO: 11879 - DNA, 414 bp, Muscodor strobelii
  misc_feature: SGI cDNA ID NO. 563831
  misc_feature: Encodes the peptide sequence at SEQ ID NO 11880
atgtctgaccagaacgctgtggttgtgtattacgatgcacttgttacaaccttcttgcagcagcttcacaacgagttggacgccatcacaatggtcttcaatgagatcgagcacttgcgtcaatctgttgaggcaatcatgcgatccccagccagtggtcgacccgttggcaagttgagtcaggccatcacggagatggcactcgctttacagtccttccatcctctcttgtcggcatacactgcacgactgacagacgcctcgaccctgcatgagattatcgccatctatcgagacccggctcgcctgtacggcaatctcatggctgcttttggctatctctgcattgccatggctaagatcagagaggccattcacgagtacaacaacgccgctgccgccaacaacaactaa

SEQ ID NO: 11880 - protein, 137 aa, Muscodor strobelii
  misc_feature: SGI Peptide ID NO. 563831
MSDQNAVVVYYDALVTTFLQQLHNELDAITMVFNEIEHLRQSVEAIMRSPASGRPVGKLSQAITEMALALQSFHPLLSAYTARLTDASTLHEIIAIYRDPARLYGNLMAAFGYLCIAMAKIREAIHEYNNAAAANNN

SEQ ID NO: 11881 - DNA, 1365 bp, Muscodor strobelii
  misc_feature: SGI cDNA ID NO. 563832
  misc_feature: Encodes the peptide sequence at SEQ ID NO 11882
atgagtgacccttacaacccaaataccactcagcgtactacacctcaatggggtctataccaacgagaacttttctgggctccaaacgaagggaaacacccgcccttcaataccgatcctcagaagttgcgtgagttagcgaaacagcggttgtcagagggtggatggcactacgcatcatgtaacgctggtgcctcctggacgcactacgcaaatcgccaggcattttatagacatcaaatcattccacgcacgctggttgatacacaacaccgcgatactgcgacaagtatatttggacatcgcgtcgcagctcctatcggatttgcgcccattggtatcaatagaatctaccatgccacgggcgagctctcgccagctaaagtggccggcgagctcaacctgccgtactgtctaagctcagctgggagctacagcatcgaggccgttgcaaaagctaatgatgcactcgctagcgattccaactcatcgtcatctcctgactcaggcgggaacaatagcagcggcggcggacacaacggtcaacatactaatcaaggtggcgtgcgattctatcagctgtactggagtccggacgaaaatgtgacccttagtatgctcgagagggctgcgaaacatggctacaccgccctgatcctcacaacagatacctggcaactgggatggcgacacgatgatatcgccatggggaactacgccttctaccacgagcatggggctggtgatctgggtcttcaagatgcagcatttcagcaacagttcgagcggttgcatctagacccgggaaaggatccgaagcaagtcggtgcacaatggatcgacggcaatatctggcatggccactccttctcttgggacaaactgccttggctcatggacaactggaaacgtatcagtggcagcaagcccttcgtactaaagggattacaaagtgtagcggacgcgaagaaagccgttgagatgggtgttgacggtatcattgtctcgaaccacgcaggtcgtcaggtcgatggcgctatagggagtctggatgcactggagaagattgtgaatgccgttggagacaagactttcgttatgttcgactcgggtatccgcggtggagctgatgtcttcaaggctctcgctctgggcgcaaaatttgttttcatcggccgtctttgggtatacgcactcggttctggcggtgaagagggagtgcgtcatgtcgttaaaggccttctagccgaccttgacatcttgatgaacgttgccgggtatcccaccttagaagatatcgatcgtgatgctttggattccatgccccgaggctgttattttccctccactgagaatatggtctga

SEQ ID NO: 11882 - protein, 454 aa, Muscodor strobelii
  misc_feature: SGI Peptide ID NO. 563832
  misc_feature (47)..(440): Pfam Id: PF01070 Pfam Desc: FMN-dependent dehydrogenase
  misc_feature (287)..(440): Pfam Id: PF01070 Pfam Desc: FMN-dependent dehydrogenase
  misc_feature (47)..(153): Pfam Id: PF01070 Pfam Desc: FMN-dependent dehydrogenase
  misc_feature (190)..(234): Pfam Id: PF01070 Pfam Desc: FMN-dependent dehydrogenase
  misc_feature (1)..(442): NCBI GI: 154322401 Blast Desc: BC1G_00543 [Botryotinia fuckeliana B05.10] gi|150847877|gb|EDN23070.1| BC1G_00543 [Botryotinia fuckeliana B05.10]
  misc_feature (1)..(442): NCBI GI: 156065353 Blast Desc: SS1G_00687 [Sclerotinia sclerotiorum 1980] gi|154691546|gb|EDN91284.1| SS1G_00687 [Sclerotinia sclerotiorum 1980]
  misc_feature (1)..(443): NCBI GI: 115398191 Blast Desc: conserved [Aspergillus terreus NIH2624] gi|114192878|gb|EAU34578.1| conserved [Aspergillus terreus NIH2624]
  misc_feature (3)..(444): NCBI GI: 169604484 Blast Desc: SNOG_05255 [Phaeosphaeria nodorum SN15] gi|111066526|gb|EAT87646.1| SNOG_05255 [Phaeosphaeria nodorum SN15]
  misc_feature (1)..(448): NCBI GI: 242766336 Blast Desc: L-lactate dehydrogenase [Talaromyces stipitatus ATCC 10500] gi|218724346|gb|EED23763.1| L-lactate dehydrogenase [Talaromyces stipitatus ATCC 10500]
  misc_feature (1)..(448): NCBI GI: 67528446 Blast Desc: AN4421.2 [Aspergillus nidulans FGSC A4] gi|40741148|gb|EAA60338.1| AN4421.2 [Aspergillus nidulans FGSC A4] gi|259482765|tpe|CBF77557.1| TPA: L-lactate dehydrogenase A4]
  misc_feature (3)..(443): NCBI GI: 189196666 Blast Desc: L-lactate dehydrogenase [Pyrenophora tritici-repentis Pt-1C-BFP] gi|187980550|gb|EDU47176.1| L-lactate dehydrogenase [Pyrenophora tritici-repentis Pt-1C-BFP]
  misc_feature (1)..(438): NCBI GI: 121706688 Blast Desc: L-lactate dehydrogenase [Aspergillus clavatus NRRL 1] gi|119399744|gb|EAW10170.1| L-lactate dehydrogenase [Aspergillus clavatus NRRL 1]
  misc_feature (1)..(438): NCBI GI: 145256771 Blast Desc: An04g01450 [Aspergillus niger] gi|134058420|emb|CAK47907.1| protein product [Aspergillus niger]
  misc_feature (1)..(438): NCBI GI: 119501128 Blast Desc: L-lactate dehydrogenase [Neosartorya fischeri NRRL 181] gi|119415486|gb|EAW25424.1| L-lactate dehydrogenase [Neosartorya fischeri NRRL 181]
  misc_feature (20)..(438): SWISSPROT Homolog: EC 1.13.12.4 Lactate 2-monooxygenase
MSDPYNPNTTQRTTPQWGLYQRELFWAPNEGKHPPFNTDPQKLRELAKQRLSEGGWHYASCNAGASWTHYANRQAFYRHQIIPRTLVDTQHRDTATSIFGHRVAAPIGFAPIGINRIYHATGELSPAKVAGELNLPYCLSSAGSYSIEAVAKANDALASDSNSSSSPDSGGNNSSGGGHNGQHTNQGGVRFYQLYWSPDENVTLSMLERAAKHGYTALILTTDTWQLGWRHDDIAMGNYAFYHEHGAGDLGLQDAAFQQQFERLHLDPGKDPKQVGAQWIDGNIWHGHSFSWDKLPWLMDNWKRISGSKPFVLKGLQSVADAKKAVEMGVDGIIVSNHAGRQVDGAIGSLDALEKIVNAVGDKTFVMFDSGIRGGADVFKALALGAKFVFIGRLWVYALGSGGEEGVRHVVKGLLADLDILMNVAGYPTLEDIDRDALDSMPRGCYFPSTENMV

SEQ ID NO: 11883 - DNA, 1819 bp, Muscodor strobelii
  misc_feature: SGI EST ID NO. CUFF.28207.0
  misc_feature: Variant of the nucleotide sequence at SEQ ID NO 11881
agcaattgtgtactttgcattagttcctgtacctagcaaaaatggcgttgtgctatgaacccacctcggatcattattacacttgcttgcgtcgtcttaacgtcatacatatacattcatattcccacaggacagtgcaacactctgtgttgtacctatcctcaatcaacacttagttctcgaccattagaatccggccataactcagctagcttctgcttcgtgactgtcatcatgagtgacccttacaacccaaataccactcagcgtactacacctcaatggggtctataccaacgagaacttttctgggctccaaacgaagggaaacacccgcccttcaataccgatcctcagaagttgcgtgagttagcgaaacagcggttgtcagagggtggatggcactacgcatcatgtaacgctggtgcctcctggacgcactacgcaaatcgccaggcattttatagacatcaaatcattccacgcacgctggttgatacacaacaccgcgatactgcgacaagtatatttggacatcgcgtcgcagctcctatcggatttgcgcccattggtatcaatagaatctaccatgccacgggcgagctctcgccagctaaagtggccggcgagctcaacctgccgtactgtctaagctcagctgggagctacagcatcgaggccgttgcaaaagctaatgatgcactcgctagcgattccaactcatcgtcatctcctgactcaggcgggaacaatagcagcggcggcggacacaacggtcaacatactaatcaaggtggcgtgcgattctatcagctgtactggagtccggacgaaaatgtgacccttagtatgctcgagagggctgcgaaacatggctacaccgccctgatcctcacaacagatacctggcaactgggatggcgacacgatgatatcgccatggggaactacgccttctaccacgagcatggggctggtgatctgggtcttcaagatgcagcatttcagcaacagttcgagcggttgcatctagacccgggaaaggatccgaagcaagtcggtgcacaatggatcgacggcaatatctggcatggccactccttctcttgggacaaactgccttggctcatggacaactggaaacgtatcagtggcagcaagcccttcgtactaaagggattacaaagtgtagcggacgcgaagaaagccgttgagatgggtgttgacggtatcattgtctcgaaccacgcaggtcgtcaggtcgatggcgctatagggagtctggatgcactggagaagattgtgaatgccgttggagacaagactttcgttatgttcgactcgggtatccgcggtggagctgatgtcttcaaggctctcgctctgggcgcaaaatttgttttcatcggccgtctttgggtatacgcactcggttctggcggtgaagagggagtgcgtcatgtcgttaaaggccttctagccgaccttgacatcttgatgaacgttgccgggtatcccaccttagaagatatcgatcgtgatgctttggattccatgccccgaggctgttattttccctccactgagaatatggtctgagacaaaatgagcacttcgacactattcagtacaagagggctgtgagctcaaaattaagtgatcaatcactctccgtgcgtgaagtttaatagaagagaagaacataattgtgggaatatgtcatacagatgggcaacgattgtacgggttagactgcggccgaatagtgccttcattccctatcacctagtcatagcacaagaataactctttattaaag

SEQ ID NO: 11884 - DNA, 762 bp, Muscodor strobelii
  misc_feature: SGI cDNA ID NO. 563833
  misc_feature: Encodes the peptide sequence at SEQ ID NO 11885
atgtcggctcagaaaccacttctcgtcttctgtccaggcgcatggtgcaagccagcctacttcaagccaacaactgacatcctcgagaagtctggatatacctgtctaaccacagcccttcctggttgtgcaagcgaagaacgacctgctgacgcaccacctattgatcacggtctccagacagatgccaaagcacttcgagacgtcttagtccctcaattagatgctggaaatgatgtcgtggtcgtagctcactcctacggcggcgtggtgacaagcgaagccgtcaaggggcttgatcgagcttctcgtggccctggaacgggcgctgtaatctatctggtatacgtggcggccatcttgctcgacgttgggaataaggtctggcccgatggcatcgctgaaggatttgtcgccaagggtgatctttgctggaaagatccagccactacagatttcgatgtttggcttgctggtacaaacgaagagggaagaaagctcttgttcgcgtcagtcggtacccatcagtggaagtgcttcgatgagccaacgacctacgacgcctggcgtcacattcccggaacctatgtgcgagccaaactggacttgatgcctaacatgatagaggcagcacccaaaggtcacaagtttgaagaaatgctcgagtgtaatggtgatcactttgcatttggcagtgccgccgaggaggtggccaagatcatacagaatgctgctgagaaagtagtagcaggtcgtgcttga

SEQ ID NO: 11885 - protein, 253 aa, Muscodor strobelii
  misc_feature: SGI Peptide ID NO. 563833
  misc_feature (8)..(247): NCBI GI: 145251583 Blast Desc: An15g07840 [Aspergillus niger] gi|134082840|emb|CAK42671.1| protein product [Aspergillus niger]
  misc_feature (4)..(247): NCBI GI: 169616230 Blast Desc: SNOG_11286 [Phaeosphaeria nodorum SN15] gi|111059874|gb|EAT80994.1| SNOG_11286 [Phaeosphaeria nodorum SN15]
  misc_feature (8)..(250): NCBI GI: 145242936 Blast Desc: An11g00150 [Aspergillus niger] gi|134078686|emb|CAK48248.1| protein product [Aspergillus niger]
  misc_feature (4)..(209): NCBI GI: 255955955 Blast Desc: Pc21g17320 [Penicillium chrysogenum Wisconsin 54-1255] gi|211590441|emb|CAP96629.1| Pc21g17320 [Penicillium chrysogenum Wisconsin 54-1255]
  misc_feature (1)..(249): NCBI GI: 154319608 Blast Desc: BC1G_02285 [Botryotinia fuckeliana B05.10] gi|150855943|gb|EDN31135.1| BC1G_02285 [Botryotinia fuckeliana B05.10]
  misc_feature (3)..(253): NCBI GI: 145235585 Blast Desc: An03g05620 [Aspergillus niger] gi|134058128|emb|CAK38322.1| protein product [Aspergillus niger]
  misc_feature (1)..(253): NCBI GI: 256720361 Blast Desc: NECHADRAFT_56035 [Nectria haematococca mpVI 77-13-4]
  misc_feature (5)..(218): NCBI GI: 145247060 Blast Desc: An12g07260 [Aspergillus niger] gi|134080506|emb|CAK46354.1| protein product [Aspergillus niger]
  misc_feature (3)..(126): NCBI GI: 169772501 Blast Desc: [Aspergillus oryzae RIB40] gi|83768580|dbj|BAE58717.1| protein product [Aspergillus oryzae]
  misc_feature (5)..(218): NCBI GI: 238506295 Blast Desc: AFLA_116420 [Aspergillus flavus NRRL3357] gi|220689062|gb|EED45413.1| AFLA_116420 [Aspergillus flavus NRRL3357]
MSAQKPLLVFCPGAWCKPAYFKPTTDILEKSGYTCLTTALPGCASEERPADAPPIDHGLQTDAKALRDVLVPQLDAGNDVVVVAHSYGGVVTSEAVKGLDRASRGPGTGAVIYLVYVAAILLDVGNKVWPDGIAEGFVAKGDLCWKDPATTDFDVWLAGTNEEGRKLLFASVGTHQWKCFDEPTTYDAWRHIPGTYVRAKLDLMPNMIEAAPKGHKFEEMLECNGDHFAFGSAAEEVAKIIQNAAEKVVAGRA

SEQ ID NO: 11886 - DNA, 1590 bp, Muscodor strobelii
  misc_feature: SGI EST ID NO. CUFF.28212.0
  misc_feature: Variant of the nucleotide sequence at SEQ ID NO 11884
ccgggctcttaaaattgtatataatcttggaatatgtcttcttcgttccattatttagagtcgcaatgtcttccatctttctacacacccgtaaatttgtaacaaaatttcctttccaaggttcaagaccagcaaagatatccatcagtaacttgtcccgtcatcattcaactatgtcggctcagaaaccacttctcgtcttctgtccaggcgcatggtgcaagccagcctacttcaagccaacaactgacatcctcgagaagtctggatatacctgtctaaccacagcccttcctggttgtgcaagcgaagaacgacctgctgacgcaccacctattgatcacggtctccagacagatgccaaagcacttcgagacgtcttagtccctcaattagatgctggaaatgatgtcgtggtcgtagctcactcctacggcggcgtggtgacaagcgaagccgtcaaggggcttgatcgagcttctcgtggccctggaacgggcgctgtaatctatctggtatacgtggcggccatcttgctcgacgttgggaataaggtctggcccgatggcatcgctgaaggatttgtcgccaagggtgatctttgctggaaagatccagccactacagatttcgatgtttggcttgctggtacaaacgaagagggaagaaagctcttgttcgcgtcagtcggtacccatcagtggaagtgcttcgatgagccaacgacctacgacgcctggcgtcacattcccggaacctatgtgcgagccaaactggacttgatgcctaacatgatagaggcagcacccaaaggtcacaagtttgaagaaatgctcgagtgtaatggtgatcactttgcatttggcagtgccgccgaggaggtggccaagatcatacagaatgctgctgagaaagtagtagcaggtcgtgcttgaagcgaagtacctcttgtgtccatttgaatcagcacgagtcccaacacgcaaataggacatccgacaaatttcattcctccaattcatgtaaagtatttcaggtgacaccagcatacgtcacatatactgtatctttagtcctggatcatagccatgattaagccaagccaatcactacttaaacttcactcgatcaataccttgtctatatggccagaacgttccccccctgagtcgcatctctccttggagacctagatatcaatatgcagttagttgcaatattcctttaggtagcaatagaaatacgacagtgattttgctctttatcggatctccagattaatttcaccacagcagaagtctatcacgcgattatgctttgcgtaatcccttgtatatgggcagtaaagcaagataacctaagttgatagtgaaacgacttcccgaagactcaagttggccgtctgacttttaagactgaggcgataagtaaggcttggatagatggagtaagcatacaagtttgcgtgaaagacaaacaagcgggacttgctcaaatcaacaatttaggcagccccatgacaagctcgccgatcgcaaatgaagtttagttgtcttgaacgatggacatgtacaccctaatgagccttgc

SEQ ID NO: 11887 - DNA, 975 bp, Muscodor strobelii
  misc_feature: SGI cDNA ID NO. 563834
  misc_feature: Encodes the peptide sequence at SEQ ID NO 11888
atggataatttcaaggcttttggcagcgccttcaccagcaacatcaacaacctcgggtctcagatcacgccttttgcctcgcgcacctttcagtacaccaaggagcagctgggccaagctgaagacaagacccagctccctcccgactacatcgaccttgagaagcgcgtcgatgccctcaagcaggtccatcagaagctgctcgccgtgacctcccagtactccaacgaggcctacgactacccgcccaacatcaaggagaccttccaggaccttggccgtaccgtcagcgagaaggtccagctcctgtctaccgcttcctcgcccgccgaggcacaggccgctctgactgctcctccctccgcgaagcctcagcccaagaccttcaaccacgccatcgctcgcgccagcttggccagctcccagctcctccaccagcagcacaccgccgccggcgaggatcccctggccactgccctcgagaagtatgctctcgccgaggagcgcgttggcgaggcccgtctggcccaggatgcccagatccagagcagattcttggctggctggaataccactctgaacaccaacttgatgttcgccacccgtgcgcgcaagaatgtcgagaaatctcgcttgaccttggactccgtcaaatcccgcgtcaagggcaccacctggaagatgggaggcgccgctcatgagcagcaccaatcggaagagctcagcgccgaggcccaggaggagatcgagaaggctgaggatgagtttgtcacccagactgaagaggctgttggtgtcatgaagaacgtcctggatactcctgagccccttcgcaacctggctgagcttattgccgcccaggttgagtatcacaagaaggcctacgagatcctgaatgaacttgcccctgttatcgagggcttgcaagtcgagcaagaggccaactaccgcaagagccgtgagaatgcctcttaa

SEQ ID NO: 11888 - protein, 324 aa, Muscodor strobelii
  misc_feature: SGI Peptide ID NO. 563834
  misc_feature (22)..(307): Pfam Id: PF03114 Pfam Desc: BAR domain
  misc_feature (238)..(307): Pfam Id: PF03114 Pfam Desc: BAR domain
  misc_feature (1)..(324): NCBI GI: 116196216 Blast Desc: CHGG_04706 [Chaetomium globosum CBS 148.51] gi|88180619|gb|EAQ88087.1| CHGG_04706 [Chaetomium globosum CBS 148.51]
  misc_feature (1)..(315): NCBI GI: 171690400 Blast Desc: protein product [Podospora anserina] gi|170945148|emb|CAP71259.1| protein product [Podospora anserina]
  misc_feature (1)..(313): NCBI GI: 256720968 Blast Desc: [Nectria haematococca mpVI 77-13-4]
  misc_feature (15)..(315): NCBI GI: 257815204 Blast Desc: [Glomerella acutata]
  misc_feature (9)..(324): NCBI GI: 261355812 Blast Desc: BAR domain-containing protein [Verticillium albo-atrum VaMs.102]
  misc_feature (3)..(313): NCBI GI: 46110116 Blast Desc: FG01940.1 [Gibberella zeae PH-1]
  misc_feature (3)..(315): NCBI GI: 39951731 Blast Desc: MGG_01508 [Magnaporthe grisea 70-15] gi|145020648|gb|EDK04777.1| MGG_01508 [Magnaporthe grisea 70-15]
  misc_feature (10)..(315): NCBI GI: 164423834 Blast Desc: NCU11369 [Neurospora crassa OR74A] gi|157070250|gb|EDO64996.1| conserved [Neurospora crassa OR74A]
  misc_feature (4)..(324): NCBI GI: 156032585 Blast Desc: SS1G_13990 [Sclerotinia sclerotiorum 1980] gi|154699392|gb|EDN99130.1| SS1G_13990 [Sclerotinia sclerotiorum 1980]
  misc_feature (1)..(323): NCBI GI: 119481171 Blast Desc: BAR domain protein [Neosartorya fischeri NRRL 181] gi|146322926|ref|XP_001481669.1| BAR domain protein [Aspergillus fumigatus Af293] gi|119408768|gb|EAW18717.1| BAR domain protein
MDNFKAFGSAFTSNINNLGSQITPFASRTFQYTKEQLGQAEDKTQLPPDYIDLEKRVDALKQVHQKLLAVTSQYSNEAYDYPPNIKETFQDLGRTVSEKVQLLSTASSPAEAQAALTAPPSAKPQPKTFNHAIARASLASSQLLHQQHTAAGEDPLATALEKYALAEERVGEARLAQDAQIQSRFLAGWNTTLNTNLMFATRARKNVEKSRLTLDSVKSRVKGTTWKMGGAAHEQHQSEELSAEAQEEIEKAEDEFVTQTEEAVGVMKNVLDTPEPLRNLAELIAAQVEYHKKAYEILNELAPVIEGLQVEQEANYRKSRENAS

SEQ ID NO: 11889 - DNA, 1635 bp, Muscodor strobelii
  misc_feature: SGI EST ID NO. CUFF.28220.0
  misc_feature: Variant of the nucleotide sequence at SEQ ID NO 11887
cggcagcctacagcacttcttgaggctatcaacgtcaacttcaacaatccaattcctctttctttatatcctccttcgagctgtccatcttccgagaaacacatcgctatcgtccacgcctttctttgcaaataaatagcccgcccaagatggataatttcaaggcttttggcagcgccttcaccagcaacatcaacaacctcgggtctcagatcacgccttttgcctcgcgcacctttcagtacaccaaggagcagctgggccaagctgaagacaagacccagctccctcccgactacatcgaccttgagaagcgcgtcgatgccctcaagcaggtccatcagaagctgctcgccgtgacctcccagtactccaacgaggcctacgactacccgcccaacatcaaggagaccttccaggaccttggccgtaccgtcagcgagaaggtccagctcctgtctaccgcttcctcgcccgccgaggcacaggccgctctgactgctcctccctccgcgaagcctcagcccaagaccttcaaccacgccatcgctcgcgccagcttggccagctcccagctcctccaccagcagcacaccgccgccggcgaggatcccctggccactgccctcgagaagtatgctctcgccgaggagcgcgttggcgaggcccgtctggcccaggatgcccagatccagagcagattcttggctggctggaataccactctgaacaccaacttgatgttcgccacccgtgcgcgcaagaatgtcgagaaatctcgcttgaccttggactccgtcaaatcccgcgtcaagggcaccacctggaagatgggaggcgccgctcatgagcagcaccaatcggaagagctcagcgccgaggcccaggaggagatcgagaaggctgaggatgagtttgtcacccagactgaagaggctgttggtgtcatgaagaacgtcctggatactcctgagccccttcgcaacctggctgagcttattgccgcccaggttgagtatcacaagaaggcctacgagatcctgaatgaacttgcccctgttatcgagggcttgcaagtcgagcaagaggccaactaccgcaagagccgtgagaatgcctcttaaacgatggatatacataggacttgagagatgaggtttccattacgttgtagtcaaagttccactgattgattatcaatatgatgctgagtagtcgggaattcgagggcagctatgctttatgctgtcctgaagctcaacttgaaaaagtttcatctgtgccgtcgaacgaaccatatgatggaatttgtccaagaagatcggccatccactgcagtcgaaattgcaaagaagatgaagactgatcggtgtagctatggtcggtggtggatatttcaattctttcatgtttccccatccccttttctatctttgacgtgtaagttttgagaaataccccaggaattatagagacaaagtagccagggtcggtctacggagcacttttgataaatgaccccccgatcttgcttcctaccttgctgaaattccaattgaaattcactgaacagttgagtgagcatattttatgcatgtgttgggtgtttgtttttgttcgtagtagttgcctgag

SEQ ID NO: 11890 - DNA, 723 bp, Muscodor strobelii
  misc_feature: SGI cDNA ID NO. 563835
  misc_feature: Reduced expression when VOC is produced
  misc_feature: Encodes the peptide sequence at SEQ ID NO 11891
atgagggccgcactccgactgctcgccaatgtcaagccggcccgctacctcgaggccggcaacccgactggtctgaccggcctgtacacgcacagctcgccgcgcagcaccctgctctccgtctactcccagaccctcgacaagctcaagaacttccccgaatcctcactctaccgccagtccaccgaggctctgaccaagcaccgcatggccatcgtcgaggccgccgaacccccgggactcaaggaatggcaggagaaggcgagcaagatcctcaaagagtctcctgagactatcgccgatctcagaggcgatcgcgcacgtgtagagagcgtaaatggaagtgtattcctccaccgcagcgacccccaggagaaggatatccggtacacagagtggaacggtgagagcgatgaaggtgacggcagagaaggtctacgtggtgaggaggatcgcaccgctacaagtttatttgggtctcgcccggatgagaagtcctcagaagtacctagagcagtttgggaggccgagcctcagatgactgccgaccaagttgaggaaatcgagaataagattggcgcaggccttatcgaggaggttgttcagatggcagagagcgagctcaagctcgttgatgttctgtacgaggctaaggtatgggagagcttagaagagaagcccgcagagggtcaatgggaatattttgagcgcaagacctcgtaa

SEQ ID NO: 11891 - protein, 240 aa, Muscodor strobelii
  misc_feature: SGI Peptide ID NO. 563835
  misc_feature (32)..(88): Pfam Id: PF04716 Pfam Desc: ETC complex I subunit conserved region
  misc_feature (32)..(75): Pfam Id: PF04716 Pfam Desc: ETC complex I subunit conserved region
  misc_feature (1)..(240): NCBI GI: 261355813 Blast Desc: NADH-ubiquinone oxidoreductase 29.9 kDa subunit [Verticillium albo-atrum VaMs.102]
  misc_feature (1)..(240): NCBI GI: 39976087 Blast Desc: MGG_06030 [Magnaporthe grisea 70-15] gi|145011695|gb|EDJ96351.1| MGG_06030 [Magnaporthe grisea 70-15]
  misc_feature (1)..(237): NCBI GI: 154291807 Blast Desc: NADH-ubiquinone oxidoreductase 29.9 kDa subunit [Botryotinia fuckeliana B05.10] gi|150846588|gb|EDN21781.1| NADH-ubiquinone oxidoreductase 29.9 kDa subunit [Botryotinia
  misc_feature (1)..(237): NCBI GI: 171688510 Blast Desc: protein product [Podospora anserina] gi|170944217|emb|CAP70327.1| protein product [Podospora anserina]
  misc_feature (1)..(239): NCBI GI: 116196484 Blast Desc: CHGG_04840 [Chaetomium globosum CBS 148.51] gi|88180753|gb|EAQ88221.1| CHGG_04840 [Chaetomium globosum CBS 148.51]
  misc_feature (1)..(237): NCBI GI: 256720967 Blast Desc: [Nectria haematococca mpVI 77-13-4]
  misc_feature (1)..(239): NCBI GI: 67539602 Blast Desc: AN5971.2 [Aspergillus nidulans FGSC A4] gi|40738530|gb|EAA57720.1| AN5971.2 [Aspergillus nidulans FGSC A4] gi|259479848|tpe|CBF70447.1| TPA: NADH-ubiquinone 299 kDa A4]
  misc_feature (1)..(240): NCBI GI: 169783458 Blast Desc: [Aspergillus oryzae RIB40] gi|238493253|ref|XP_002377863.1| NADH-ubiquinone oxidoreductase 299 kDa subunit, [Aspergillus flavus NRRL3357] protein product
  misc_feature (1)..(239): NCBI GI: 212543697 Blast Desc: NADH-ubiquinone oxidoreductase 299 kDa subunit, [Penicillium marneffei ATCC 18224] gi|210066910|gb|EEA21003.1| NADH-ubiquinone oxidoreductase 299 kDa subunit, [Penicillium ATCC
  misc_feature (1)..(239): NCBI GI: 145232563 Blast Desc: An02g05880 [Aspergillus niger] gi|134056642|emb|CAK44203.1| protein product [Aspergillus niger]
  misc_feature: Useful for introducing or modulating the production of volatile compounds
MRAALRLLANVKPARYLEAGNPTGLTGLYTHSSPRSTLLSVYSQTLDKLKNFPESSLYRQSTEALTKHRMAIVEAAEPPGLKEWQEKASKILKESPETIADLRGDRARVESVNGSVFLHRSDPQEKDIRYTEWNGESDEGDGREGLRGEEDRTATSLFGSRPDEKSSEVPRAVWEAEPQMTADQVEEIENKIGAGLIEEVVQMAESELKLVDVLYEAKVWESLEEKPAEGQWEYFERKTS

SEQ ID NO: 11892 - DNA, 1050 bp, Muscodor strobelii
  misc_feature: SGI EST ID NO. CUFF.28217.0
  misc_feature: Variant of the nucleotide sequence at SEQ ID NO 11890
taacaggtggaaatgacctgtagggacccactcacgtgattccgacctagctgcgacggggagcttcactggcgctgagcaacggagctttcgatatctcgacccgcgagcaattgtccggaattggcctcacgatccacgcaattgagcttcacaactacgaaaaatgagggccgcactccgactgctcgccaatgtcaagccggcccgctacctcgaggccggcaacccgactggtctgaccggcctgtacacgcacagctcgccgcgcagcaccctgctctccgtctactcccagaccctcgacaagctcaagaacttccccgaatcctcactctaccgccagtccaccgaggctctgaccaagcaccgcatggccatcgtcgaggccgccgaacccccgggactcaaggaatggcaggagaaggcgagcaagatcctcaaagagtctcctgagactatcgccgatctcagaggcgatcgcgcacgtgtagagagcgtaaatggaagtgtattcctccaccgcagcgacccccaggagaaggatatccggtacacagagtggaacggtgagagcgatgaaggtgacggcagagaaggtctacgtggtgaggaggatcgcaccgctacaagtttatttgggtctcgcccggatgagaagtcctcagaagtacctagagcagtttgggaggccgagcctcagatgactgccgaccaagttgaggaaatcgagaataagattggcgcaggccttatcgaggaggttgttcagatggcagagagcgagctcaagctcgttgatgttctgtacgaggctaaggtatgggagagcttagaagagaagcccgcagagggtcaatgggaatattttgagcgcaagacctcgtaactttctccataaccaacccaaaaaaactccaaccaccagagccttagagcccattgtaacctactagatacatcacaatgcattgtatatagagatatgcggttctccgtaagaacttgcattgccaataatcaatctgcttccgttatgttcaaccggtc

SEQ ID NO: 11893 - DNA, 1455 bp, Muscodor strobelii
  misc_feature: SGI cDNA ID NO. 563836
  misc_feature: Encodes the peptide sequence at SEQ ID NO 11894
atgggaccattcgccctctcagtcccaggctacgccttaggcgtgcactcgcgcaaacgacccagacgaccacttgccgtgcaacagcaagaggagtcacccgctcctgaagtagaagcaaccttaaaatctcaaaagtcgtcccttccttcaagctccatcaatcgattaagtcacccaccagatgttctacagcagtttgcgctagtcggcctctcgcctgaagacgagctaccgtctacttttcacccgtcattccctcatacacggctgccaaccgggaagaagaagagtcgtggaagcacagctaagggaagaatgagtggtacggagagcggcacggagacggatgctacgtctaggagtatcagggggcatagagaggatgaacggaagcaacataccgcgaaggttcatcatctgaacaccatgacggcaatcatgcaccgctgtctcaaggagggcgatatcgaacgcgccaagcgggcgtttagcttacttatacggagcaggaatgtcgatctgcgaatcgataatctctgggccatcggatctgagatattgatgcgggacggggagtcctcttcttcacgctcagcaccacctgagtcaccgatgcagcaaggagacgagaaccaacacgatgaagtcgcgcggcccccaaagcgctggggctccgcggcaaatatcgaagtagtgaagacgtacttcgaaaacctcatctcgcaatatccctacgatgtaacacggcaacatctagtaaccgccagccagcgacaaggcgacggccgtctagcagacgcggtcgacttctggcccgcgctgtacagcatcgagatatataatctcgacgccgagtatcaaacggcaaaacaccaagtctatctcgaattcggcgctcctcccaccccatcctcatccagagcctcgtctccgagtggcgcgaggataaaaggagaccccgatgtcgacgaaatggacatcgactccttttcccatcaaagcgtcatggaacaagacagcgacgcagaagacgagcacgaagacagacaccgagcaatcgacaccctgcgctccgaaactcgccgcggcgcactggaaatcgccacaaggatggatacgacgatggagaaccagccctatgtcaaacacgccgaactgttacgtctcaggggtcatatgtcgttgttcatcgcggatttatacctaccctcgcgactcacggagcggtccagagcgagaaatggagtcacggataagatgaggaaactctcgttgcaaggggtggatcttagagcgagtgctagtagaccggaggaatatgttgcgctgggcaagtatagacaggagcaggatggggctcggggtttctttaggagggcgttggctaatgggggggtgttggaggagtggattatgggtttcttgaattcggatgatgaggaagggaattga

SEQ ID NO: 11894 - protein, 484 aa, Muscodor strobelii
  misc_feature: SGI Peptide ID NO. 563836
  misc_feature (137)..(197): Pfam Id: PF04090 Pfam Desc: RNA polymerase I specific initiation factor
  misc_feature (42)..(477): NCBI GI: 39976089 Blast Desc: MGG_06029 [Magnaporthe grisea 70-15] gi|145011696|gb|EDJ96352.1| MGG_06029 [Magnaporthe grisea 70-15]
  misc_feature (15)..(482): NCBI GI: 256720966 Blast Desc: NECHADRAFT_50250 [Nectria haematococca mpVI 77-13-4]
  misc_feature (24)..(484): NCBI GI: 46110120 Blast Desc: FG01942.1 [Gibberella zeae PH-1]
  misc_feature (48)..(458): NCBI GI: 154293092 Blast Desc: [Botryotinia fuckeliana B05.10] gi|150845645|gb|EDN20838.1| [Botryotinia fuckeliana B05.10]
  misc_feature (57)..(403): NCBI GI: 71001478 Blast Desc: conserved [Aspergillus fumigatus Af293] gi|66853058|gb|EAL93382.1| conserved [Aspergillus fumigatus Af293]
  misc_feature (57)..(403): NCBI GI: 159129493 Blast Desc: conserved [Aspergillus fumigatus A1163]
  misc_feature (57)..(403): NCBI GI: 119481065 Blast Desc: NFIA_086190 [Neosartorya fischeri NRRL 181] gi|119408715|gb|EAW18664.1| conserved [Neosartorya fischeri NRRL 181]
  misc_feature (61)..(416): NCBI GI: 154272169 Blast Desc: [Ajellomyces capsulatus NAm1] gi|150408924|gb|EDN04380.1| [Ajellomyces capsulatus NAm1]
  misc_feature (61)..(405): NCBI GI: 239615207 Blast Desc: conserved [Ajellomyces dermatitidis ER-3]
  misc_feature (61)..(463): NCBI GI: 119180074 Blast Desc: CIMG_08707 [Coccidioides immitis RS]
MGPFALSVPGYALGVHSRKRPRRPLAVQQQEESPAPEVEATLKSQKSSLPSSSINRLSHPPDVLQQFALVGLSPEDELPSTFHPSFPHTRLPTGKKKSRGSTAKGRMSGTESGTETDATSRSIRGHREDERKQHTAKVHHLNTMTAIMHRCLKEGDIERAKRAFSLLIRSRNVDLRIDNLWAIGSEILMRDGESSSSRSAPPESPMQQGDENQHDEVARPPKRWGSAANIEVVKTYFENLISQYPYDVTRQHLVTASQRQGDGRLADAVDFWPALYSIEIYNLDAEYQTAKHQVYLEFGAPPTPSSSRASSPSGARIKGDPDVDEMDIDSFSHQSVMEQDSDAEDEHEDRHRAIDTLRSETRRGALEIATRMDTTMENQPYVKHAELLRLRGHMSLFIADLYLPSRLTERSRARNGVTDKMRKLSLQGVDLRASASRPEEYVALGKYRQEQDGARGFFRRALANGGVLEEWIMGFLNSDDEEGN

SEQ ID NO: 11895 - DNA, 900 bp, Muscodor strobelii
  misc_feature: SGI cDNA ID NO. 563837
  misc_feature: Encodes the peptide sequence at SEQ ID NO 11896
atggcctcttcaagccaccactacagcagtccacagatcgacgacgacgacctgattgatcccgatgatgccgatctgaatgacttcgacgaccctctctccaacgccgaatcccagcgcgccccgttgacaggcaacatcggctcatcctcctcctcctcccgccccctcaacgaatcctacctcacatcgcgcatccccggcgacgaccgacgcgccccgcaaaacaccatcgacgaatcggtgtgggaaacagtccggcgcgacctactcgccgtatggtccaaaatgcgcgaggtgctgtacccacggtatctcttcggaggctccatgctagagtccggcggcggaatcagaggcgcatacgccaacctacgcggcgccggtttctcaggggctcgcgaggaactacagtccctagctggccgtgtcatggacccggagtcgttgctcaaccagaataacatgacgcccggcctacgggattgggatctatggggtccgcttatcttctgtttgctccttgctgtgctgttgagtatttgcggtaaggcggatcagaagaatactatattctctggtgtgtttgcgcttgtgtgggttggtgaggcggttgttacgttgcagattaagctgttgggtgggaatatatcgttcatgcagagcatctgcatcatcggatacaccctcttcccactcgtcatcgctgcgcttctctcagcagtcggtctgcaccccatcccgcgaatccctatctatctcgtgctggtcggctgggcaatggctgctggtgttagtatcctgggcggaagcggcgtggtcagcaatcgtgtcggcattgctgtctaccccctatttatattctacattgggttgggatgtctctgctttatcagctga

SEQ ID NO: 11896 - protein, 299 aa, Muscodor strobelii
  misc_feature: SGI Peptide ID NO. 563837
  misc_feature (86)..(281): Pfam Id: PF04893 Pfam Desc: Yip1 domain
  misc_feature (160)..(281): Pfam Id: PF04893 Pfam Desc: Yip1 domain
  misc_feature (24)..(299): NCBI GI: 145603480 Blast Desc: MGG_06025 [Magnaporthe grisea 70-15] gi|145011699|gb|EDJ96355.1| MGG_06025 [Magnaporthe grisea 70-15]
  misc_feature (2)..(299): NCBI GI: 46110124 Blast Desc: FG01944.1 [Gibberella zeae PH-1]
  misc_feature (32)..(299): NCBI GI: 261352233 Blast Desc: YIPF6 [Verticillium albo-atrum VaMs.102]
  misc_feature (32)..(299): NCBI GI: 256720964 Blast Desc: [Nectria haematococca mpVI 77-13-4]
  misc_feature (58)..(299): NCBI GI: 85107561 Blast Desc: NCU06367 [Neurospora crassa OR74A] gi|28924006|gb|EAA33165.1| NCU06367 [Neurospora crassa OR74A]
  misc_feature (1)..(285): NCBI GI: 156034741 Blast Desc: SS1G_13306 [Sclerotinia sclerotiorum 1980] gi|154698709|gb|EDN98447.1| SS1G_13306 [Sclerotinia sclerotiorum 1980]
  misc_feature (1)..(285): NCBI GI: 154311234 Blast Desc: BC1G_06735 [Botryotinia fuckeliana B05.10] gi|150851139|gb|EDN26332.1| BC1G_06735 [Botryotinia fuckeliana B05.10]
  misc_feature (1)..(299): NCBI GI: 121715530 Blast Desc: nuclear protein export protein Yrb2, [Aspergillus clavatus NRRL 1] gi|119403531|gb|EAW13948.1| nuclear protein export protein Yrb2, [Aspergillus clavatus NRRL 1]
  misc_feature (5)..(299): NCBI GI: 171688502 Blast Desc: protein product [Podospora anserina] gi|170944213|emb|CAP70323.1| protein product [Podospora anserina]
  misc_feature (14)..(299): NCBI GI: 225556231 Blast Desc: Yip1 domain-containing protein [Ajellomyces capsulatus G186AR]
MASSSHHYSSPQIDDDDLIDPDDADLNDFDDPLSNAESQRAPLTGNIGSSSSSSRPLNESYLTSRIPGDDRRAPQNTIDESVWETVRRDLLAVWSKMREVLYPRYLFGGSMLESGGGIRGAYANLRGAGFSGAREELQSLAGRVMDPESLLNQNNMTPGLRDWDLWGPLIFCLLLAVLLSICGKADQKNTIFSGVFALVWVGEAVVTLQIKLLGGNISFMQSICIIGYTLFPLVIAALLSAVGLHPIPRIPIYLVLVGWAMAAGVSILGGSGVVSNRVGIAVYPLFIFYIGLGCLCFIS

SEQ ID NO: 11897 - DNA, 3136 bp, Muscodor strobelii
  misc_feature: SGI EST ID NO. CUFF.28224.0
  misc_feature: Variant of the nucleotide sequence at SEQ ID NO 11895
tagcaggggacttggggcagcttcgatatcatcagctcgccgccatccaacgtcataacgacctgttggcaacttcacacgatcacacatatgcccgtctagtactatactagactctgtgtctctcagagcgatcaccacgcaacatcgtcctcttccaacacctttctctggctgtagcgagcgagcttgaagctccgctaggcacccagaatggcctcttcaagccaccactacagcagtccacagatcgacgacgacgacctgattgatcccgatgatgccgatctgaatgacttcgacgaccctctctccaacgccgaatcccagcgcgccccgttgacaggcaacatcggctcatcctcctcctcctcccgccccctcaacgaatcctacctcacatcgcgcatccccggcgacgaccgacgcgccccgcaaaacaccatcgacgaatcggtgtgggaaacagtccggcgcgacctactcgccgtatggtccaaaatgcgcgaggtgctgtacccacggtatctcttcggaggctccatgctagagtccggcggcggaatcagaggcgcatacgccaacctacgcggcgccggtttctcaggggctcgcgaggaactacagtccctagctggccgtgtcatggacccggagtcgttgctcaaccagaataacatgacgcccggcctacgggattgggatctatggggtccgcttatcttctgtttgctccttgctgtgctgttgagtatttgcggtaaggcggatcagaagaatactatattctctggtgtgtttgcgcttgtgtgggttggtgaggcggttgttacgttgcagattaagctgttgggtgggaatatatcgttcatgcagagcatctgcatcatcggatacaccctcttcccactcgtcatcgctgcgcttctctcagcagtcggtctgcaccccatcccgcgaatccctatctatctcgtgctggtcggctgggcaatggctgctggtgttagtatcctgggcggaagcggcgtggtcagcaatcgtgtcggcattgctgtctaccccctatttatattctacattgggttgggatgtctctgctttatcagctgagttatctgacgatatctaagcctccgcattaatggctacttcttgaactaaggccattgtttcaagaaacagtttctcttcaggggtaaaattgtacagctcatgagatgggatagagcgctgcccagtacctccttgtgatattgtactttatgaacgatgcaattgtaactctagtttgtccccacaagcttgtacgatcatgaaggcagcgctgttgaatttgatgagaatattcccagtacgagacagccgatgagatctgtgttttgtgactataaaatttctgcccttactttacgtaggctcgaaatgctgctctataagggcacaaagtcattgtaaacggataatactagtagcaatcatcttataaagcaatgcgcctacctatgtaatgggtatctcaaacacacaaatacgactttacagccccctgttcacaacacaaccacaatactcaattcccttcctcatcatccgaattcaagaaacccataatccactcctccaacacccccccattagccaacgccctcctaaagaaaccccgagccccatcctgctcctgtctatacttgcccagcgcaacatattcctccggtctactagcactcgctctaagatccaccccttgcaacgagagtttcctcatcttatccgtgactccatttctcgctctggaccgctccgtgagtcgcgagggtaggtataaatccgcgatgaacaacgacatatgacccctgagacgtaacagttcggcgtgtttgacatagggctggttctccatcgtcgtatccatccttgtggcgatttccagtgcgccgcggcgagtttcggagcgcagggtgtcgattgctcggtgtctgtcttcgtgctcgtcttctgcgtcgctgtcttgttccatgacgctttgatgggaaaaggagtcgatgtccatttcgtcgacatcggggtctccttttatcctcgcgccactcggagacgaggctctggatgaggatggggtgggaggagcgccgaattcgagatagacttggtgttttgccgtttgatactcggcgtcgagattatatatctcgatgctgtacagcgcgggccagaagtcgaccgcgtctgctagacggccgtcgccttgtcgctggctggcggttactagatgttgccgtgttacatcgtagggatattgcgagatgaggttttcgaagtacgtcttcactacttcgatatttgccgcggagccccagcgctttgggggccgcgcgacttcatcgtgttggttctcgtctccttgctgcatcggtgactcaggtggtgctgagcgtgaagaagaggactccccgtcccgcatcaatatctcagatccgatggcccagagattatcgattcgcagatcgacattcctgctccgtataagtaagctaaacgcccgcttggcgcgttcgatatcgccctccttgagacagcggtgcatgattgccgtcatggtgttcagatgatgaaccttcgcggtatgttgcttccgttcatcctctctatgccccctgatactcctagacgtagcatccgtctccgtgccgctctccgtaccactcattcttcccttagctgtgcttccacgactcttcttcttcccggttggcagccgtgtatgagggaatgacgggtgaaaagtagacggtagctcgtcttcaggcgagaggccgactagcgcaaactgctgtagaacatctggtgggtgacttaatcgattgatggagcttgaaggaagggacgacttttgagattttaaggttgcttctacttcaggagcgggtgactcctcttgctgttgcacggcaagtggtcgtctgggtcgtttgcgcgagtgcacgcctaaggcgtagcctgggactgagagggcgaatggtcccattctggtcgtctttggcacaaattagatgtaatggagcaaattagtaacggctgaatgagtctctgaacttttgcaaccgctttgcaggtaagattgcttggccgcata

SEQ ID NO: 11898 - DNA, 1272 bp, Muscodor strobelii
  misc_feature: SGI cDNA ID NO. 563838
  misc_feature: Encodes the peptide sequence at SEQ ID NO 11899
atgttcgcaacgaatgctgtttcatccatactcggcgtagctcctgaccaactgcgggacaaaagtttctacgaatgtatcgcggaaagctacttggctaatgctatcaagtgtctcgagagcgcgaaagcaaacgattccattgcctacctacgcttttggtcgcgtgatccacgaaggcgaggggattttgacgatgacgaggaaggcgactctatcaaggaagaagacagcgagtctgaaagcgcggagagtgaagtggacgttagagatcgtatagaaaacgcattgagatttgacacaggcgatgtcgcgggatttcctgtcaactctgagggctttggtggactggaaatgccaatatcgagaaatttggtgaactcgacgccaacacaaccacgaatatcctctgtcacagcacgtggaagacaagcagcaccaagaataccacgtacccgccgtagagcaatgccaacatctgagcttgaagctgtggtgtcctgtacctcggatgggctagttgtggtactgagaagagcaagaccgcagatcccctctttacatccgccaatgctcccaacggctatggaaaacggacttttcgctgctccatggagtgaccagtctattcacccacacaactactcacccgagtaccgcgcctttcagccatcacggcagcctccatacatgcctttgcaagatgaccatgtgaagggagtcgggggcccgcccgcagatcaactcatgaagtcgatccgagaaccctttgcagatgtggcagtatttgcgtgggctgtcgtaggcataaacggtaatggtcttgagccgtggattcgcaaaatcgtggacacaagagctaacacaggatgtttttctctgtatcagcttgcctcgttcagcggcggtacgccaaggggcgagtcccaacctaccgatggtcttcctatctgggatccaaacgctccgagcacctcgtatcttggacctgaggcaccatcatcgagtcgctggagtggcacgtcgactgcagagtattcggccgagcccgatctctcaaatcaagctcaatatgtaccagacttcactggtcacacaacgaatctacatcggtcgaatagtctagggcttggccagactgaatctggtcatgcaagcactggcccttggcctagctcagcatctactccttgctcgcagacccgggcttattctcaagtcgaacaacatccccaagtccccgcacgccagtttcacaattggacaaactag

SEQ ID NO: 11899 - protein, 423 aa, Muscodor strobelii
  misc_feature: SGI Peptide ID NO. 563838
  misc_feature (1)..(339): NCBI GI: 261352271 Blast Desc: conserved [Verticillium albo-atrum VaMs.102]
  misc_feature (1)..(337): NCBI GI: 116196488 Blast Desc: CHGG_04842 [Chaetomium globosum CBS 148.51] gi|88180755|gb|EAQ88223.1| CHGG_04842 [Chaetomium globosum CBS 148.51]
  misc_feature (143)..(339): NCBI GI: 256720965 Blast Desc: NECHADRAFT_72336 [Nectria haematococca mpVI 77-13-4]
  misc_feature (1)..(373): NCBI GI: 39976095 Blast Desc: MGG_06026 [Magnaporthe grisea 70-15] gi|145011698|gb|EDJ96354.1| MGG_06026 [Magnaporthe grisea 70-15]
  misc_feature (147)..(419): NCBI GI: 46110122 Blast Desc: FG01943.1 [Gibberella zeae PH-1]
  misc_feature (1)..(320): NCBI GI: 189210381 Blast Desc: conserved [Pyrenophora tritici-repentis Pt-1C-BFP] gi|187977615|gb|EDU44241.1| conserved [Pyrenophora tritici-repentis Pt-1C-BFP]
  misc_feature (1)..(320): NCBI GI: 242787255 Blast Desc: conserved [Talaromyces stipitatus ATCC 10500] gi|218721115|gb|EED20534.1| conserved [Talaromyces stipitatus ATCC 10500]
  misc_feature (159)..(322): NCBI GI: 171688504 Blast Desc: protein product [Podospora anserina] gi|170944214|emb|CAP70324.1| protein product [Podospora anserina]
  misc_feature (1)..(323): NCBI GI: 156034739 Blast Desc: SS1G_13305 [Sclerotinia sclerotiorum 1980] gi|154698708|gb|EDN98446.1| SS1G_13305 [Sclerotinia sclerotiorum 1980]
  misc_feature (161)..(273): NCBI GI: 85106672 Blast Desc: NCU06390 [Neurospora crassa OR74A] gi|28923828|gb|EAA32992.1| [Neurospora crassa OR74A]
MFATNAVSSILGVAPDQLRDKSFYECIAESYLANAIKCLESAKANDSIAYLRFWSRDPRRRGDFDDDEEGDSIKEEDSESESAESEVDVRDRIENALRFDTGDVAGFPVNSEGFGGLEMPISRNLVNSTPTQPRISSVTARGRQAAPRIPRTRRRAMPTSELEAVVSCTSDGLVVVLRRARPQIPSLHPPMLPTAMENGLFAAPWSDQSIHPHNYSPEYRAFQPSRQPPYMPLQDDHVKGVGGPPADQLMKSIREPFADVAVFAWAVVGINGNGLEPWIRKIVDTRANTGCFSLYQLASFSGGTPRGESQPTDGLPIWDPNAPSTSYLGPEAPSSSRWSGTSTAEYSAEPDLSNQAQYVPDFTGHTTNLHRSNSLGLGQTESGHASTGPWPSSASTPCSQTRAYSQVEQHPQVPARQFHNWTN

SEQ ID NO: 11900 - DNA, 4294 bp, Muscodor strobelii
  misc_feature: SGI EST ID NO. CUFF.28233.0
  misc_feature: Variant of the nucleotide sequence at SEQ ID NO 11898
cgagaacgcagtggtcagtgatgaaatattggtaatcggccgagtgtcttcaacggatgtcaataagaccggcacggctggggttgttagcgcgggaccaggtcaggaccaggtgcagatcatcaacatggtgtctaaaattgacagggtagtgactcgtgaggatagcaagcagccgaggcccccagcgcttcgactctcctgagcaacatacttgtaacggtgcgataggcttgagaataataagctgatgttgcgagtgtagcttatgtcagcaaggaaccgaagaccagaagacacgaatagagcttaatagcaaattctcagctgggccaacacctgaatatccgacattaggctatgatacatacccatgaacttttatgtagtaaaaatcccctgttaccaggaatgaaaaggcacgtcaggccgcaagtgcataggccaaaagcaatggctctgtcggatggatccttaaatttgctaggcagtgggaacgacttcttcagccaacttcagctcgcatggttcaacgacgtgtgatcgcaaatactttacattaattcttgtaattacctcgtcagtttagtattacttgcgatgggtatgcattctaaaacagtggtttgcatggtagagggatctacttttggaggcgcgaacaggtacatgcgcttttaccgagagtagcaaagctacaggggagattagagcaagagaattggcaaatagcatcatttctagctcccgccatgcaatcatgaactggtctatttgagtctctgatatcaaggtcttctattgctcaactaaatacttgtagcaagccatatttatatgaacccgtcagcgtctttggagtttcccgtccttattgtcagtcttcttgaccaagccgtatacatgacagaacaacctggacatactaaattcagctcgcaaatcctatctccaccaaccatccacctcgaaaccgttggctctcccaacctcgtttgacctttatatcggccgcgaaatcactatccgcaccaaaaatacctagcgatatcagtcgctaggtataggaatcgactcgtgacattatctgtggcttcttattctataggcgtactgtctgcgtatacattcaccattcaccattcaccacatcgttttctaaccaagctcgacactgcatcaagccgaaggacaaaaaaggacccgtcacacgattcgaagtcctctcgcgccttagcatacttgttttgggcagcgttttgacgcgtaatcctcttccagtcaactttctgcactctgccgtcgtcccaaggctctaatccattgtctcttggccattacaccacttggtgctgggacgctgctggtcacactgcgacttttgccgacggtcgcggtggagttctgtcctacagcactcggttattcagagacatccagttggctcatttgccttatgctctaccaaacggccgactcccctatccagtgaaacagtgcaagagtgtcccggaacctgccgcctcgacagtgctcttgcgtcaaatcatcgaaggccgtctcaatacttactcgatgacagatgccttcgttgttatccgaatgccaaactgacactcatttaccgtataattaatcacaaaccttgtgcatatgctcttgatattgcgctcgaatacattcctacgccgtaaatttaccccaacgctgcaacgcattcatccatggagcaaacctttataaccattcacaatttgtcacctgatgccaatattctatttgcgtcagactcgataattgacatactcggatatcttccgcaagatgttcagggcagatcgtgtttcgattacttccatccagatgaactcccttttgcgcgatccgtccataacaggggcgtgctgttagataaagctgcagtcttgcattatgtccgcatcatgtcaagtgatgggcgatggatcagttgcgaatgctgcttcacgatagtccatgatgtattagtagccagcatcagcatataccgaaggggagagaagagcgaaaggcgagccattgaggccccccagatccgacgcatattttcttcttcgccaagagaccctcggtatcacatgctggaacatctatcgcccaaattcaggatgcaaccgacggagagagaaccacgtgcggccctgattctgaataggtttactcgaactctaaccatcatgttcgcaacgaatgctgtttcatccatactcggcgtagctcctgaccaactgcgggacaaaagtttctacgaatgtatcgcggaaagctacttggctaatgctatcaagtgtctcgagagcgcgaaagcaaacgattccattgcctacctacgcttttggtcgcgtgatccacgaaggcgaggggattttgacgatgacgaggaaggcgactctatcaaggaagaagacagcgagtctgaaagcgcggagagtgaagtggacgttagagatcgtatagaaaacgcattgagatttgacacaggcgatgtcgcgggatttcctgtcaactctgagggctttggtggactggaaatgccaatatcgagaaatttggtgaactcgacgccaacacaaccacgaatatcctctgtcacagcacgtggaagacaagcagcaccaagaataccacgtacccgccgtagagcaatgccaacatctgagcttgaagctgtggtgtcctgtacctcggatgggctagttgtggtactgagaagagcaagaccgcagatcccctctttacatccgccaatgctcccaacggctatggaaaacggacttttcgctgctccatggagtgaccagtctattcacccacacaactactcacccgagtaccgcgcctttcagccatcacggcagcctccatacatgcctttgcaagatgaccatgtgaagggagtcgggggcccgcccgcagatcaactcatgaagtcgatccgaggtaggtgatggcagcgtcgttttggagttgccacgtcgcgggtccgtgcagctcgtgtcaattcgacccgcaacggatctatcctctttgttccgtaactccaatggtcttgcgaaatagcggctgcgaatctgaccagaaccctttgcagatgtggcagtatttgcgtgggctgtcgtaggcataaacggtaatgtaagtcgtctacctatggactccaccagacggccttatctaaggtcttgagccgtggattcgcaaaatcgtggacacaagagctaacacaggatgtttttctctgtatcagcttgcctcgttcagcggcggtacgccaaggggcgagtcccaacctaccgatggtcttcctatctgggatccaaacgctccgagcacctcgtatcttggacctgaggcaccatcatcgagtcgctggagtggcacgtcgactgcagagtattcggccgagcccgatctctcaaatcaagctcaatatgtaccagacttcactggtcacacaacgaatctacatcggtcgaatagtctagggcttggccagactgaatctggtcatgcaagcactggcccttggcctagctcagcatctactccttgctcgcagacccgggcttattctcaagtcgaacaacatccccaagtccccgcacgccagtttcacaattggacaaactagggttggaggcctcgcctgtggcaccgagtttgtcaagtatatctccagaaaatacacaagcgtacgatattgccttggaatcggatggttctctgcgtacaagctcgggtgatctagcaaccccagattgttgcctacatatgatccaccatagcctccaaggcccgaaatgcccgagggctcggatggcgcttgaaagaggagaagaaggcgggataatttattcagacagcagtaaacaggagacaccactgcgtttagccaggacaagaacaagaaattttgggacgtgtcgatgggattgtcagcctatcgaggcgcacacattcgacttatggctctagtgagcttagcatcaggcattcaaacgagacgagatgattccctcttgtatcatgaaatattcgaaagataccccgtctaggtagtaggtaaaactatttaatagagcttccgaaatgaaatccttcaattgtcgttgcgcctcaagcctcaattagtcaaggaaggagctagactcgatcaaagaaagtcgccagaacgcagacatataaagtccatgtactaataaacacaactaagaaagagtctttcacggcatttcgcctgaactgtaagcaataa

SEQ ID NO: 11901 - DNA, 1515 bp, Muscodor strobelii
  misc_feature: SGI cDNA ID NO. 563839
  misc_feature: Encodes the peptide sequence at SEQ ID NO 11902
atgccttccgctgtgaaccacgacgagtgggatctacctcgtctacgagcatccattggatttgaggatgatttccagtacctttcctcggatgaccaagataccgagttcttcgatgtcaaattttatccgtatgccgcagataccacggatgcaatttttgctgcagtaagcaagaaacatgtcgtcatatatcgcctctccaatacgtgcaatcctccttgggagttggtccaattgataagagacgacgatcaagataccgtgaattgtagctgcacgtggtccaaagagcctgagaccgaaaagccttggctttgcgtggctggtcgagacgccaagatcaaagtctacgatccgatagaaggcaaattggttcaggttctcgttggtcacggtggagaaatcaatgatattgtcacaagccctactgatcccctgctcattgcatcggcatccgatgatacaacaattcggatatggagtctcgatcccgcttgggcaaaacagccttgtgtatgcctactcgcaggagagggacattccgcaaatattttgacagtggtgtttcacagcacaggcagatacgtcctttcagctggtcaggataatgttgtttgcttgtggaccttacctgatttaccgcccgcgcgaagtagcaaaaatccaccagagcctgttgttatacattatccgcacttcttcacagcagaggttcacagtggcattgttgactgtgttgcttttttcggtgatctggtcctatcgagagcatgtcatgaagacatcatcgtactctggcgcatagaaggattctcttctcgagatccgcctcctactgtctccgaagctccaacaacaagtgacccagagcgattgacacgatcagcattcgcaccggttaccgcttcgtcatgccctccacagtacacccgcttattgcaattttatacacctaattgtggtcatcagttctacctccgcttcaagttgtatcatgtagaaggaaagcacccggtgctcgccttcggcaatgctcattcaactattttcttctgggatctcgcgcgcttattggggtatcatgacttcatgcaagatgtgacagaaccctctcgggaaaagacaaagcccattcatcggccaggctggttagtgccaattcagcaccgccacaaaggtgatgccgtcaacaaactcaaggatgccgccagcgacagggattcggagttctctggccgtacgggtagcgtagacactgatacgcacgttgacctcaatgcagactatggacaggaaacccttgagtcttgggagggcagatacgatttgactcgtgtggacgaaccgataaaggcccattcgcagagtaacatcactgtcagagactttgtcggccggcaagtggcttggagttcccaaggcgattggtgtgtgatcgtagggagcaaaaaccttgctgtggtcatgcagcgctggtataagaaggataaggcagacgataaagaaaagtaa

SEQ ID NO: 11902 - protein, 504 aa, Muscodor strobelii
  misc_feature: SGI Peptide ID NO. 563839
  misc_feature (123)..(162): Pfam Id: PF00400 Pfam Desc: WD domain, G-beta repeat
  misc_feature (172)..(210): Pfam Id: PF00400 Pfam Desc: WD domain, G-beta repeat
  misc_feature (36)..(496): NCBI GI: 256720750 Blast Desc: NECHADRAFT_50174 [Nectria haematococca mpVI 77-13-4]
  misc_feature (8)..(492): NCBI GI: 171688506 Blast Desc: protein product [Podospora anserina] gi|170944215|emb|CAP70325.1| protein product [Podospora anserina]
  misc_feature (1)..(385): NCBI GI: 85105958 Blast Desc: NCU05300 [Neurospora crassa OR74A] gi|28923665|gb|EAA32835.1| [Neurospora crassa OR74A]
  misc_feature (42)..(447): NCBI GI: 261352269 Blast Desc: conserved [Verticillium albo-atrum VaMs.102]
  misc_feature (161)..(497): NCBI GI: 145603478 Blast Desc: MGG_06028 [Magnaporthe grisea 70-15] gi|145011697|gb|EDJ96353.1| MGG_06028 [Magnaporthe grisea 70-15]
  misc_feature (9)..(493): NCBI GI: 189210379 Blast Desc: PTRG_11190 [Pyrenophora tritici-repentis Pt-1C-BFP] gi|187977614|gb|EDU44240.1| PTRG_11190 [Pyrenophora tritici-repentis Pt-1C-BFP]
  misc_feature (92)..(378): NCBI GI: 156034737 Blast Desc: SS1G_13304 [Sclerotinia sclerotiorum 1980] gi|154698707|gb|EDN98445.1| SS1G_13304 [Sclerotinia sclerotiorum 1980]
  misc_feature (145)..(492): NCBI GI: 169620856 Blast Desc: SNOG_13633 [Phaeosphaeria nodorum SN15] gi|160704121|gb|EAT79080.2| SNOG_13633 [Phaeosphaeria nodorum SN15]
  misc_feature (31)..(355): NCBI GI: 195350951 Blast Desc: GM26690 [Drosophila sechellia] gi|194123824|gb|EDW45867.1| GM26690 [Drosophila sechellia]
  misc_feature (25)..(355): NCBI GI: 195053067 Blast Desc: GH13063 [Drosophila grimshawi] gi|193900511|gb|EDV99377.1| GH13063 [Drosophila grimshawi]
MPSAVNHDEWDLPRLRASIGFEDDFQYLSSDDQDTEFFDVKFYPYAADTTDAIFAAVSKKHVVIYRLSNTCNPPWELVQLIRDDDQDTVNCSCTWSKEPETEKPWLCVAGRDAKIKVYDPIEGKLVQVLVGHGGEINDIVTSPTDPLLIASASDDTTIRIWSLDPAWAKQPCVCLLAGEGHSANILTVVFHSTGRYVLSAGQDNVVCLWTLPDLPPARSSKNPPEPVVIHYPHFFTAEVHSGIVDCVAFFGDLVLSRACHEDIIVLWRIEGFSSRDPPPTVSEAPTTSDPERLTRSAFAPVTASSCPPQYTRLLQFYTPNCGHQFYLRFKLYHVEGKHPVLAFGNAHSTIFFWDLARLLGYHDFMQDVTEPSREKTKPIHRPGWLVPIQHRHKGDAVNKLKDAASDRDSEFSGRTGSVDTDTHVDLNADYGQETLESWEGRYDLTRVDEPIKAHSQSNITVRDFVGRQVAWSSQGDWCVIVGSKNLAVVMQRWYKKDKADDKEK

SEQ ID NO: 11903 - DNA, 2095 bp, Muscodor strobelii
  misc_feature: SGI EST ID NO. CUFF.28268.0
  misc_feature: Variant of the nucleotide sequence at SEQ ID NO 11901
gacagatatctccttcaaatcaaggtgcctagaacggcgattgaagcacgctacaattagcaaggagtgcaaacacctctctaaagatcgcgatgtcatgcttagattgactgccacggtctgaaaaacgtcgacattcccgtatcccaatgtgcgcatgcttaagtgcatcctgtccacatggtcaagaaatgaaaaaccagtgccaatgccttccgctgtgaaccacgacgagtgggatctacctcgtctacgagcatccattggatttgaggatgatttccagtacctttcctcggatgaccaagataccgagttcttcgatgtcaaattttatccgtatgccgcagataccacggatgcaatttttgctgcagtaagcaagaaacatgtcgtcatatatcgcctctccaatacgtgcaatcctccttgggagttggtccaattgataagagacgacgatataccgtgaattgtagctgcacgtggtccaaagagcctgagaccgaaaagccttggctttgcgtggctggtcgagacgccaagatcaaagtctacgatccgatagaaggcaaattggttcaggttctcgttggtcacggtggagaaatcaatgatattgtcacaagccctactgatcccctgctcattgcatcggcatccgatgatacaacaattcggatatggagtctcgatcccgcttgggcaaaacagccttgtgtatgcctactcgcaggagagggacattccgcaaatattttgacagtggtgtttcacagcacaggcagatacgtcctttcagctggtcaggataatgttgtttgcttgtggaccttacctgatttaccgcccgcgcgaagtagcaaaaatccaccagagcctgttgttatacattatccgcacttcttcacagcagaggttcacagtggcattgttgactgtgttgcttttttcggtgatctggtcctatcgagagcatgtcatgaagacatcatcgtactctggcgcatagaaggattctcttctcgagatccgcctcctactgtctccgaagctccaacaacaagtgacccagagcgattgacacgatcagcattcgcaccggttaccgcttcgtcatgccctccacagtacacccgcttattgcaattttatacacctaattgtggtcatcagttctacctccgcttcaagttgtatcatgtagaaggaaagcacccggtgctcgccttcggcaatgctcattcaactattttcttctgggatctcgcgcgcttattggggtatcatgacttcatgcaagatgtgacagaaccctctcgggaaaagacaaagcccattcatcggccaggctggttagtgccaattcagcaccgccacaaaggtgatgccgtcaacaaactcaaggatgccgccagcgacagggattcggagttctctggccgtacgggtagcgtagacactgatacgcacgttgacctcaatgcagactatggacaggaaacccttgagtcttgggagggcagatacgatttgactcgtgtggacgaaccgataaaggcccattcgcagagtaacatcactgtcagagactttgtcggccggcaagtggcttggagttcccaaggcgattggtgtgtgatcgtagggagcaaaaaccttgctgtggtcatgcagcgctggtataagaaggataaggcagacgataaagaaaagtaagggggctcatagagggaagaaaaaggtcaagcggaagcaaccggcgcaatagtacaatatgataccaacagaactcgatgattttttaaaaacgtcagctatcctacagccacggcgacctgcacttgtagctgaggccaagccaacccgaacgccatatatcctcattggttgccgctcttagctcaatccaccccattcgcccatttcatctcgtatttgtgcaggtttcataattagaacaatatcaacaacgcatccacgtaagtcaattcgagaacgccaaacaactccttcgcaatgctgcgagtcagcgtgcagtactcttccaaatgccattaggtaattcaaaacgtgccgcatttgtaggactcgg

SEQ ID NO: 11904 - DNA, 1509 bp, Muscodor strobelii
  misc_feature: SGI cDNA ID NO. 563840
  misc_feature: Elevated expression when VOC is produced
  misc_feature: Encodes the peptide sequence at SEQ ID NO 11905
atgccttccgctgtgaaccacgacgagtgggatctacctcgtctacgagcatccattggatttgaggatgatttccagtacctttcctcggatgaccaagataccgagttcttcgatgtcaaattttatccgtatgccgcagataccacggatgcaatttttgctgcagtaagcaagaaacatgtcgtcatatatcgcctctccaatacgtgcaatcctccttgggagttggtccaattgataagagacgacgatcaagataccgtgaattgtagctgcacgtggtccaaagagcctgagaccgaaaagccttggctttgcgtggctggtcgagacgccaagatcaaagtctacgatccgatagaaggcaaattggttcagctcactgctacccaggaaatcaatgatattgtcacaagccctactgatcccctgctcattgcatcggcatccgatgatacaacaattcggatatggagtctcgatcccgcttgggcaaaacagccttgtgtatgcctactcgcaggagagggacattccgcaaatattttgacagtggtgtttcacagcacaggcagatacgtcctttcagctggtcaggataatgttgtttgcttgtggaccttacctgatttaccgcccgcgcgaagtagcaaaaatccaccagagcctgttgttatacattatccgcacttcttcacagcagaggttcacagtggcattgttgactgtgttgcttttttcggtgatctggtcctatcgagagcatgtcatgaagacatcatcgtactctggcgcatagaaggattctcttctcgagatccgcctcctactgtctccgaagctccaacaacaagtgacccagagcgattgacacgatcagcattcgcaccggttaccgcttcgtcatgccctccacagtacacccgcttattgcaattttatacacctaattgtggtcatcagttctacctccgcttcaagttgtatcatgtagaaggaaagcacccggtgctcgccttcggcaatgctcattcaactattttcttctgggatctcgcgcgcttattggggtatcatgacttcatgcaagatgtgacagaaccctctcgggaaaagacaaagcccattcatcggccaggctggttagtgccaattcagcaccgccacaaaggtgatgccgtcaacaaactcaaggatgccgccagcgacagggattcggagttctctggccgtacgggtagcgtagacactgatacgcacgttgacctcaatgcagactatggacaggaaacccttgagtcttgggagggcagatacgatttgactcgtgtggacgaaccgataaaggcccattcgcagagtaacatcactgtcagagactttgtcggccggcaagtggcttggagttcccaaggcgattggtgtgtgatcgtagggagcaaaaaccttgctgtggtcatgcagcgctggtataagaaggataaggcagacgataaagaaaagtaa

SEQ ID NO: 11905 - protein, 502 aa, Muscodor strobelii
  misc_feature: SGI Peptide ID NO. 563840
  misc_feature (170)..(208): Pfam Id: PF00400 Pfam Desc: WD domain, G-beta repeat
  misc_feature (121)..(160): Pfam Id: PF00400 Pfam Desc: WD domain, G-beta repeat
  misc_feature (36)..(494): NCBI GI: 256720750 Blast Desc: NECHADRAFT_50174 [Nectria haematococca mpVI 77-13-4]
  misc_feature (8)..(490): NCBI GI: 171688506 Blast Desc: protein product [Podospora anserina] gi|170944215|emb|CAP70325.1| protein product [Podospora anserina]
  misc_feature (1)..(383): NCBI GI: 85105958 Blast Desc: NCU05300 [Neurospora crassa OR74A] gi|28923665|gb|EAA32835.1| [Neurospora crassa OR74A]
  misc_feature (42)..(445): NCBI GI: 261352269 Blast Desc: conserved [Verticillium albo-atrum VaMs.102]
  misc_feature (9)..(495): NCBI GI: 145603478 Blast Desc: MGG_06028 [Magnaporthe grisea 70-15] gi|145011697|gb|EDJ96353.1| MGG_06028 [Magnaporthe grisea 70-15]
  misc_feature (9)..(491): NCBI GI: 189210379 Blast Desc: PTRG_11190 [Pyrenophora tritici-repentis Pt-1C-BFP] gi|187977614|gb|EDU44240.1| PTRG_11190 [Pyrenophora tritici-repentis Pt-1C-BFP]
  misc_feature (92)..(376): NCBI GI: 156034737 Blast Desc: SS1G_13304 [Sclerotinia sclerotiorum 1980] gi|154698707|gb|EDN98445.1| SS1G_13304 [Sclerotinia sclerotiorum 1980]
  misc_feature (143)..(490): NCBI GI: 169620856 Blast Desc: SNOG_13633 [Phaeosphaeria nodorum SN15] gi|160704121|gb|EAT79080.2| SNOG_13633 [Phaeosphaeria nodorum SN15]
  misc_feature (244)..(494): NCBI GI: 116196486 Blast Desc: CHGG_04841 [Chaetomium globosum CBS 148.51] gi|88180754|gb|EAQ88222.1| CHGG_04841 [Chaetomium globosum CBS 148.51]
  misc_feature (31)..(353): NCBI GI: 195350951 Blast Desc: GM26690 [Drosophila sechellia] gi|194123824|gb|EDW45867.1| GM26690 [Drosophila sechellia]
  misc_feature: Useful for introducing or modulating the production of volatile compounds
MPSAVNHDEWDLPRLRASIGFEDDFQYLSSDDQDTEFFDVKFYPYAADTTDAIFAAVSKKHVVIYRLSNTCNPPWELVQLIRDDDQDTVNCSCTWSKEPETEKPWLCVAGRDAKIKVYDPIEGKLVQLTATQEINDIVTSPTDPLLIASASDDTTIRIWSLDPAWAKQPCVCLLAGEGHSANILTVVFHSTGRYVLSAGQDNVVCLWTLPDLPPARSSKNPPEPVVIHYPHFFTAEVHSGIVDCVAFFGDLVLSRACHEDIIVLWRIEGFSSRDPPPTVSEAPTTSDPERLTRSAFAPVTASSCPPQYTRLLQFYTPNCGHQFYLRFKLYHVEGKHPVLAFGNAHSTIFFWDLARLLGYHDFMQDVTEPSREKTKPIHRPGWLVPIQHRHKGDAVNKLKDAASDRDSEFSGRTGSVDTDTHVDLNADYGQETLESWEGRYDLTRVDEPIKAHSQSNITVRDFVGRQVAWSSQGDWCVIVGSKNLAVVMQRWYKKDKADDKEK

SEQ ID NO: 11906 - DNA, 2095 bp, Muscodor strobelii; identical to SEQ ID NO: 11903
  misc_feature: SGI EST ID NO. CUFF.28268.0
  misc_feature: Variant of the nucleotide sequence at SEQ ID NO 11904

SEQ ID NO: 11907 - DNA, 228 bp, Muscodor strobelii
  misc_feature: SGI cDNA ID NO. 563841
  misc_feature: Encodes the peptide sequence at SEQ ID NO 11908
atgaagttcttccttgccgtcactgctcttgcaaccaccgctcttgcggctactaccggattagacgcgagaggaggctaccccgagtgcacacctccttcttacgcttgcaagcccgattactcaggctggctcgtctgcaatgttgatggaaaatacttggatggcggagtatgcccgaagcacactacgtgcaagaccatcaataacctgccatactgcgtttaa

SEQ ID NO: 11908 - protein, 75 aa, Muscodor strobelii
  misc_feature: SGI Peptide ID NO. 563841
  misc_feature (1)..(75): NCBI GI: 85074759 Blast Desc: NCU00607 [Neurospora crassa OR74A] gi|28927560|gb|EAA36511.1| [Neurospora crassa OR74A] gi|38567301|emb|CAE76589.1| [Neurospora crassa]
  misc_feature (1)..(75): NCBI GI: 46105264 Blast Desc: FG00260.1 [Gibberella zeae PH-1]
  misc_feature (5)..(75): NCBI GI: 256731908 Blast Desc: NECHADRAFT_73723 [Nectria haematococca mpVI 77-13-4]
MKFFLAVTALATTALAATTGLDARGGYPECTPPSYACKPDYSGWLVCNVDGKYLDGGVCPKHTTCKTINNLPYCV

SEQ ID NO: 11909 - DNA, 526 bp, Muscodor strobelii
  misc_feature: SGI EST ID NO. CUFF.28235.0
  misc_feature: Variant of the nucleotide sequence at SEQ ID NO 11907
tataaaagttcagatatctcctagagaatagttgctttctgtgctcttcacctctttcgctacaatctcactaagaccactccagtgccttgtcttctccaagcgcctatactcaacatcatctaaagactttcaatagccaaaatgaagttcttccttgccgtcactgctcttgcaaccaccgctcttgcggctactaccggattagacgcgagaggaggctaccccgagtgcacacctccttcttacgcttgcaagcccgattactcaggctggctcgtctgcaatgttgatggaaaatacttggatggcggagtatgcccgaagcacactacgtgcaagaccatcaataacctgccatactgcgtttaaggtctttacttatgggcagccgctgttggtctatgaaacgactgtaggcgtggtgaaagtgcagtcatgacaatattaacagctcatgtacgcaactatgtcgattagtggtagttcatacaatttgcgtaataaaccagaagctgcgggtcca

SEQ ID NO: 11910 - DNA, 669 bp, Muscodor strobelii
  misc_feature: SGI cDNA ID NO. 563842
  misc_feature: Encodes the peptide sequence at SEQ ID NO 11911
atggaatacgctttcgaccgcgagccgagatcgctttcggagaagccccagcaagaataccacacgaaatacttcgctttgggcatcgttcgacgcgggcaagccttcatctctcaatggcactgggctctcctgctctgcgcttcacacgtcggtcaagcaacacgagcttcactgcaggtcaaatatctgggccatgaccctgcaacatcaccgtcactatccctcggtaacgcattaccgccatatataatagcctgggccttttggatattacgcctagcgttaacctcgccgttaatgcgtctgaacaataccccaagtcaacttgaaaaatggcagcgtacatcattgagcctctcgcgctcgggacggaggagagtcttcatgctctcggggtctgcacttgtgggcatcaggttcctcttgcaggttgcctatattcttctcatggttggagagatatacagttgggcactgacgcccagtcaccttcacaaggctatatcgcttgattggagcgctatgcttgatcagagatcgcccgtatggcttaagatgctaagcacactgatgttggctggtaatgccgcgggtgttgcgtatgctgctattgcgcttatggtgcttacgttacacctatatctttggttaccattcctggactag

SEQ ID NO: 11911 - protein, 222 aa, Muscodor strobelii
  misc_feature: SGI Peptide ID NO. 563842
MEYAFDREPRSLSEKPQQEYHTKYFALGIVRRGQAFISQWHWALLLCASHVGQATRASLQVKYLGHDPATSPSLSLGNALPPYIIAWAFWILRLALTSPLMRLNNTPSQLEKWQRTSLSLSRSGRRRVFMLSGSALVGIRFLLQVAYILLMVGEIYSWALTPSHLHKAISLDWSAMLDQRSPVWLKMLSTLMLAGNAAGVAYAAIALMVLTLHLYLWLPFLD

SEQ ID NO: 11912 - DNA, 144 bp, Muscodor strobelii
  misc_feature: SGI EST ID NO. CUFF.28241.0
  misc_feature: Variant of the nucleotide sequence at SEQ ID NO 11910
ttcgctttgggcatcgttcgacgcgggcaagccttcatctctcaatggcactgggctctcctgctctgcgcttcacacgtcggtcaagcaacacgagcttcactgcaggtcaaatatctgggccatgaccctgcaacatcaccg

SEQ ID NO: 11913 - DNA, 2997 bp, Muscodor strobelii
  misc_feature: SGI cDNA ID NO. 563843
  misc_feature: Encodes the peptide sequence at SEQ ID NO 11914
atgacagacgcgagcgatttcaacggcagcaagaccaacggacagcccgcgcagccaaccagcatcacgaaccaagccgcagaggcgcaagacgagctctcggagctctcgcctcacgagcctcttgcctctcagtcgagccaacattctttccctcttctgcagaacaacgctagtagcgaaaccctcctgcaggatgccaaggcgcgcaaccgcagtgccgtcgaggacgacaacgatgaagagccctctgtcgcccggcccttcatccgcaccaacagccccgagaccctgtcacgagagatcacgccgcccgacgacgaacagacgccacccttcatgccctacaagatgcacaagttcaccctctacgagacggccagtcgatactacatcgtgggcggtgacgtcgccgagaagcgcttccgcattctcaaggtcgaccgcaacacccaccaagacccggacttatccatcaccgacgacaagaccatctatgggcgcaaggagatgaactctctgctcgacaccatcgaccacggcaacaagggcaccggtggcatcaagcagcgctgcactgcctgggggctcttgggtttcatcaaattcaccggcccctactacatgatgctgatcactaagaagagcaccgttgccatgatagggggccattacgtctaccaggttgacggtaccgagctagtccctctgactcctcccaagtacaaggccgacacgcgaaacccggaagagtctcgctttctcggtatcctcaatcatctggatctcaccaggtccttctacttcagctactcgtacgatatcaccagggcccttcagcacaatatcactcgagaacgcctagccgtgatgggcggatcaccaggcaagacctaccacgactataacgagatgttcgtctggaacagtcatcttttgcagccagcagcagacaatctgagcgaccccttcgactggtgtcgccccatcatacatggctacatagaccaagctgccatctctgtgtacgggaggacggcgcatatcaccatcattgctcgtcgttcgcgtttctttgccggtgcacgtttcctgaagcgtggggctaacgatcttggttatgtcgctaatgacgtcgagacagagcagattgtctcggaatcacagaccacttcgtttcactcgcccagccacaaactattcgctaatccccagtacacctcgtacgtgcagcacagaggcagcattcctctatactggacgcaagacaacattggtgttacgccgaaaccgccaatcgagctcaatcttgtagatcccttttatacagcggcggcgctacacttcaatcacttgttcgagcgctatggctcgccgatatatgtcttgaacctagtcaagtcaagggagcggacaccgcgagagtccaagcttctgaaggaatataccaatgcgatccactatctcaatcaatttctccccaccgagcacaaaatcattcacaaggcatgggacatgagcagggccgctaaaagccgggatcaagatgtcattagtaccctagagagtatcgccgagtctgttgttactacgacaggatttttccaaaatggtgatggggacgtaaaccccagcagagttcagaacggcgtagcaagaacaaactgtattgactgtctcgaccgtactaatgccgctcagtttgtcattggtaaacgagcgctcggacaccagttgcatgctctaggcatactcgaagacacctctatcgaatatgacacggatgcagtaaatctcttcacccacatgtatcacgaccatggagacacaatcgccgtacaatacggcggctctcaacttgtgaacacgatggaaacctatcggaaaatcaaccagtggacaagccattctcgcgatatgatcgaaagcttcaaacgctactacaacaattcatttctcgatagccagagacaagaagcctataatctctttctgggaaactatatctttgctcagggacagccgatgctgtgggatctgtctacggactattacttgcaccacgtagatccacgttcatggtccgagaagcgacagagtgactacattcagtggtacaatccggactatctcaaaaggaaatcattgccagtttatattccaccaagagatatcttgagtgagaagcccatttcattttttgatgactattggctcgagtactaccgaccagctacactctcgtcgtttccgaagatgttctcatataagatgaattccaccatcaagtacataccactcagatcgactcaggagggcaaatacgacctcagccctttccgggtccggacagagggtgaccaagagaacgtcgagagaaagaggcctgtagctaagaaagaagtgaccattgtggatcctcatgattctatcaagtctcctgacagcaatacgacagcccaaacagagctagcaacggagaaagcagccgcgagaggaatctctattcagcgctggctgcagcctatgcaagcggatagggtgccaatggtaccccacagcatcatgaaagaaacactggacacacctatcgacggtcccaaactcaaacagacaccgcaggaaaagtccaaggcagcgcaatggactttcactaaagtcgtccacgagtctctgaacccgtctgtcagtgcactggaagccgaagactacacgcgatacgtcacccatccacagagtcttcctctcgtagtatcgaacgaggcgccgacagatgttgactcatcagagtaccaagactatctcaacgggagctggcaaaccgatggtctagcaccaaacggtacagaagaggatattgcggcgtattatgagcttctgcgcgttggcgataatccgctaacggtcacggaagaggatctgcccaagaaacggtacaaggcatataagaaatggcttcgtgggaaatccctctttaaacaacagccggtcgactag

SEQ ID NO: 11914 - protein, 998 aa, Muscodor strobelii
  misc_feature: SGI Peptide ID NO. 563843
  misc_feature (194)..(518): Pfam Id: PF02383 Pfam Desc: SacI homology domain
  misc_feature (51)..(998): NCBI GI: 46116876 Blast Desc: FG04280.1 [Gibberella zeae PH-1]
  misc_feature (19)..(998): NCBI GI: 256725949 Blast Desc: [Nectria haematococca mpVI 77-13-4]
  misc_feature (51)..(998): NCBI GI: 171690558 Blast Desc: protein product [Podospora anserina] gi|170945227|emb|CAP71338.1| protein product [Podospora anserina]
  misc_feature (51)..(998): NCBI GI: 116195952 Blast Desc: CHGG_04574 [Chaetomium globosum CBS 148.51] gi|88180487|gb|EAQ87955.1| CHGG_04574 [Chaetomium globosum CBS 148.51]
  misc_feature (8)..(998): NCBI GI: 39971551 Blast Desc: MGG_07091 [Magnaporthe grisea 70-15] gi|145019558|gb|EDK03786.1| MGG_07091 [Magnaporthe grisea 70-15]
  misc_feature (51)..(840): NCBI GI: 164426365 Blast Desc: NCU08689 [Neurospora crassa OR74A] gi|157071307|gb|EAA32532.2| conserved [Neurospora crassa OR74A]
  misc_feature (81)..(994): NCBI GI: 119175116 Blast Desc: CIMG_09460 [Coccidioides immitis RS]
  misc_feature (81)..(994): NCBI GI: 258566836 Blast Desc: UREG_04851 [Uncinocarpus reesii 1704] gi|237905608|gb|EEP80009.1| UREG_04851 [Uncinocarpus reesii 1704]
  misc_feature (81)..(994): NCBI GI: 240107039 Blast Desc: CPC735_018300 [Coccidioides posadasii C735 delta SOWgp]
  misc_feature (52)..(995): NCBI GI: 226279980 Blast Desc: polyphosphoinositide phosphatase [Paracoccidioides brasiliensis Pb01]
MTDASDFNGSKTNGQPAQPTSITNQAAEAQDELSELSPHEPLASQSSQHSFPLLQNNASSETLLQDAKARNRSAVEDDNDEEPSVARPFIRTNSPETLSREITPPDDEQTPPFMPYKMHKFTLYETASRYYIVGGDVAEKRFRILKVDRNTHQDPDLSITDDKTIYGRKEMNSLLDTIDHGNKGTGGIKQRCTAWGLLGFIKFTGPYYMMLITKKSTVAMIGGHYVYQVDGTELVPLTPPKYKADTRNPEESRFLGILNHLDLTRSFYFSYSYDITRALQHNITRERLAVMGGSPGKTYHDYNEMFVWNSHLLQPAADNLSDPFDWCRPIIHGYIDQAAISVYGRTAHITIIARRSRFFAGARFLKRGANDLGYVANDVETEQIVSESQTTSFHSPSHKLFANPQYTSYVQHRGSIPLYWTQDNIGVTPKPPIELNLVDPFYTAAALHFNHLFERYGSPIYVLNLVKSRERTPRESKLLKEYTNAIHYLNQFLPTEHKIIHKAWDMSRAAKSRDQDVISTLESIAESVVTTTGFFQNGDGDVNPSRVQNGVARTNCIDCLDRTNAAQFVIGKRALGHQLHALGILEDTSIEYDTDAVNLFTHMYHDHGDTIAVQYGGSQLVNTMETYRKINQWTSHSRDMIESFKRYYNNSFLDSQRQEAYNLFLGNYIFAQGQPMLWDLSTDYYLHHVDPRSWSEKRQSDYIQWYNPDYLKRKSLPVYIPPRDILSEKPISFFDDYWLEYYRPATLSSFPKMFSYKMNSTIKYIPLRSTQEGKYDLSPFRVRTEGDQENVERKRPVAKKEVTIVDPHDSIKSPDSNTTAQTELATEKAAARGISIQRWLQPMQADRVPMVPHSIMKETLDTPIDGPKLKQTPQEKSKAAQWTFTKVVHESLNPSVSALEAEDYTRYVTHPQSLPLVVSNEAPTDVDSSEYQDYLNGSWQTDGLAPNGTEEDIAAYYELLRVGDNPLTVTEEDLPKKRYKAYKKWLRGKSLFKQQPVD

SEQ ID NO: 11915 - DNA, 2370 bp, Muscodor strobelii
  misc_feature: SGI cDNA ID NO. 563844
  misc_feature: Encodes the peptide sequence at SEQ ID NO 11916
atgctgatcactaagaagagcaccgttgccatgatagggggccattacgtctaccaggttgacggtaccgagctagtccctctgactcctcccaagtacaaggccgacacgcgaaacccggaagagtctcgctttctcggtatcctcaatcatctggatctcaccaggtccttctacttcagctactcgtacgatatcaccagggcccttcagcacaatatcactcgagaacgcctagccgtgatgggcggatcaccaggcaagacctaccacgactataacgagatgttcgtctggaacagtcatcttttgcagccagcagcagacaatctgagcgaccccttcgactggtgtcgccccatcatacatggctacatagaccaagctgccatctctgtgtacgggaggacggcgcatatcaccatcattgctcgtcgttcgcgtttctttgccggtgcacgtttcctgaagcgtggggctaacgatcttggttatgtcgctaatgacgtcgagacagagcagattgtctcggaatcacagaccacttcgtttcactcgcccagccacaaactattcgctaatccccagtacacctcgtacgtgcagcacagaggcagcattcctctatactggacgcaagacaacattggtgttacgccgaaaccgccaatcgagctcaatcttgtagatcccttttatacagcggcggcgctacacttcaatcacttgttcgagcgctatggctcgccgatatatgtcttgaacctagtcaagtcaagggagcggacaccgcgagagtccaagcttctgaaggaatataccaatgcgatccactatctcaatcaatttctccccaccgagcacaaaatcattcacaaggcatgggacatgagcagggccgctaaaagccgggatcaagatgtcattagtaccctagagagtatcgccgagtctgttgttactacgacaggatttttccaaaatggtgatggggacgtaaaccccagcagagttcagaacggcgtagcaagaacaaactgtattgactgtctcgaccgtactaatgccgctcagtttgtcattggtaaacgagcgctcggacaccagttgcatgctctaggcatactcgaagacacctctatcgaatatgacacggatgcagtaaatctcttcacccacatgtatcacgaccatggagacacaatcgccgtacaatacggcggctctcaacttgtgaacacgatggaaacctatcggaaaatcaaccagtggacaagccattctcgcgatatgatcgaaagcttcaaacgctactacaacaattcatttctcgatagccagagacaagaagcctataatctctttctgggaaactatatctttgctcagggacagccgatgctgtgggatctgtctacggactattacttgcaccacgtagatccacgttcatggtccgagaagcgacagagtgactacattcagtggtacaatccggactatctcaaaaggaaatcattgccagtttatattccaccaagagatatcttgagtgagaagcccatttcattttttgatgactattggctcgagtactaccgaccagctacactctcgtcgtttccgaagatgttctcatataagatgaattccaccatcaagtacataccactcagatcgactcaggagggcaaatacgacctcagccctttccgggtccggacagagggtgaccaagagaacgtcgagagaaagaggcctgtagctaagaaagaagtgaccattgtggatcctcatgattctatcaagtctcctgacagcaatacgacagcccaaacagagctagcaacggagaaagcagccgcgagaggaatctctattcagcgctggctgcagcctatgcaagcggatagggtgccaatggtaccccacagcatcatgaaagaaacactggacacacctatcgacggtcccaaactcaaacagacaccgcaggaaaagtccaaggcagcgcaatggactttcactaaagtcgtccacgagtctctgaacccgtctgtcagtgcactggaagccgaagactacacgcgatacgtcacccatccacagagtcttcctctcgtagtatcgaacgaggcgccgacagatgttgactcatcagagtaccaagactatctcaacgggagctggcaaaccgatggtctagcaccaaacggtacagaagaggatattgcggcgtattatgagcttctgcgcgttggcgataatccgctaacggtcacggaagaggatctgcccaagaaacggtacaaggcatataagaaatggcttcgtgggaaatccctctttaaacaacagccggtcgactag

SEQ ID NO: 11916 - protein, 789 aa, Muscodor strobelii
  misc_feature: SGI Peptide ID NO. 563844
  misc_feature (1)..(309): Pfam Id: PF02383 Pfam Desc: SacI homology domain
  misc_feature (2)..(309): Pfam Id: PF02383 Pfam Desc: SacI homology domain
  misc_feature (1)..(789): NCBI GI: 46116876 Blast Desc: FG04280.1 [Gibberella zeae PH-1]
  misc_feature (1)..(789): NCBI GI: 256725949 Blast Desc: [Nectria haematococca mpVI 77-13-4]
  misc_feature (1)..(789): NCBI GI: 171690558 Blast Desc: protein product [Podospora anserina] gi|170945227|emb|CAP71338.1| protein product [Podospora anserina]
  misc_feature (1)..(789): NCBI GI: 39971551 Blast Desc: MGG_07091 [Magnaporthe grisea 70-15] gi|145019558|gb|EDK03786.1| MGG_07091 [Magnaporthe grisea 70-15]
  misc_feature (1)..(789): NCBI GI: 116195952 Blast Desc: CHGG_04574 [Chaetomium globosum CBS 148.51] gi|88180487|gb|EAQ87955.1| CHGG_04574 [Chaetomium globosum CBS 148.51]
  misc_feature (1)..(631): NCBI GI: 164426365 Blast Desc: NCU08689 [Neurospora crassa OR74A] gi|157071307|gb|EAA32532.2| conserved [Neurospora crassa OR74A]
  misc_feature (1)..(785): NCBI GI: 119175116 Blast Desc: CIMG_09460 [Coccidioides immitis RS]
  misc_feature (1)..(785): NCBI GI: 258566836 Blast Desc: UREG_04851 [Uncinocarpus reesii 1704] gi|237905608|gb|EEP80009.1| UREG_04851 [Uncinocarpus reesii 1704]
  misc_feature (1)..(786): NCBI GI: 212530832 Blast Desc: polyphosphoinositide phosphatase Fig4 [Penicillium marneffei ATCC 18224] gi|210074971|gb|EEA29058.1| polyphosphoinositide phosphatase Fig4 [Penicillium marneffei ATCC
  misc_feature (1)..(785): NCBI GI: 240107039 Blast Desc: CPC735_018300 [Coccidioides posadasii C735 delta SOWgp]
  misc_feature (1)..(460): SWISSPROT Homolog: EC 3.1.3.36 Phosphoinositide 5-phosphatase
MLITKKSTVAMIGGHYVYQVDGTELVPLTPPKYKADTRNPEESRFLGILNHLDLTRSFYFSYSYDITRALQHNITRERLAVMGGSPGKTYHDYNEMFVWNSHLLQPAADNLSDPFDWCRPIIHGYIDQAAISVYGRTAHITIIARRSRFFAGARFLKRGANDLGYVANDVETEQIVSESQTTSFHSPSHKLFANPQYTSYVQHRGSIPLYWTQDNIGVTPKPPIELNLVDPFYTAAALHFNHLFERYGSPIYVLNLVKSRERTPRESKLLKEYTNAIHYLNQFLPTEHKIIHKAWDMSRAAKSRDQDVISTLESIAESVVTTTGFFQNGDGDVNPSRVQNGVARTNCIDCLDRTNAAQFVIGKRALGHQLHALGILEDTSIEYDTDAVNLFTHMYHDHGDTIAVQYGGSQLVNTMETYRKINQWTSHSRDMIESFKRYYNNSFLDSQRQEAYNLFLGNYIFAQGQPMLWDLSTDYYLHHVDPRSWSEKRQSDYIQWYNPDYLKRKSLPVYIPPRDILSEKPISFFDDYWLEYYRPATLSSFPKMFSYKMNSTIKYIPLRSTQEGKYDLSPFRVRTEGDQENVERKRPVAKKEVTIVDPHDSIKSPDSNTTAQTELATEKAAARGISIQRWLQPMQADRVPMVPHSIMKETLDTPIDGPKLKQTPQEKSKAAQWTFTKVVHESLNPSVSALEAEDYTRYVTHPQSLPLVVSNEAPTDVDSSEYQDYLNGSWQTDGLAPNGTEEDIAAYYELLRVGDNPLTVTEEDLPKKRYKAYKKWLRGKSLFKQQPVD

SEQ ID NO: 11917 - DNA, 1314 bp, Muscodor strobelii
  misc_feature: SGI cDNA ID NO. 563845
  misc_feature: Encodes the peptide sequence at SEQ ID NO 11918
atgtttgaccaactgctcaaggcggccgggcgtctaaccgatgcagaactgtccgctgacgtacccgccagtctcttacaagcggtgcccaaagaagtttctattaaggatgtaaacgaattggtgttgcagaaacgggacacagaggatcatactagcatcctgtgggctgtttacgctgtgctgaaaaccagagatcacgatgagttggcacttggggaagaggccgatatggaggcatcgattaagcatctcttcatttctattggagggttaatcaagccggtctgttccggcgcctcctttgacgaagacaccacagactatgcagaattatcgcgaaatggtgtcatcggtcttcacattatcacactattagccaagcttggctcgagagaagcccaagttctacctcaagagacactatactccatcataggatacaccaacccagctgacccctggacaacagcttcgtgcgcagagcttgcacatgaactaatcacgacgcacttccagaactctactcagaatgttgccgttcgagatccaccaccttcattctaccgctcagcagaacggagctcaaaagaacagaagccgaaatctgaacgagaacgcttcataaccgaggatctgatacttgagttcctacggcctatctttgctaaatcacgtcccacgaacataactgcctccggacgaccagccgcgtacccagagcaaccttcgcgatacacgcaaggcgaaggctttggaggctctggcaacgatgtaaccaccactaaaccgtggaagtatacccaacaatatgcagtcacggtattcgaatgggcagtgaagaatgcagatacatccctcctaaccaagtactggtcactctacacacccatccttctaacactcctcgatgaattccagcccttctctctaaagctccgctctctatcaatcttccggctcttctggtctaaatgcccagacggactcatgtcacgtacaggactcactgaagtcttcgaacaagctgtctttcccacagttctcagcctacctagtctcacccctccagctgaatcccttacgttgctgacagcagcataccctgccttatttgatatcgcaggtataaacgcccaggaagaaggcaatcaagagcgtgagcaaaaacagttcaccgagtcacagcgaaagtccctagacaagatcatgagagaaggcatcatggtcggatttcatcatgcgaaagagcatgtccgacttgcggaattttttgccagattctatgtcgtcttgtcaatggcatgggtatag

SEQ ID NO: 11918 - protein, 437 aa, Muscodor strobelii
  misc_feature: SGI Peptide ID NO. 563845
  misc_feature (119)..(427): NCBI GI: 164426367 Blast Desc: NCU08688 [Neurospora crassa OR74A] gi|157071308|gb|EAA32531.2| [Neurospora crassa OR74A]
  misc_feature (2)..(432): NCBI GI: 116195954 Blast Desc: CHGG_04575 [Chaetomium globosum CBS 148.51] gi|88180488|gb|EAQ87956.1| CHGG_04575 [Chaetomium globosum CBS 148.51]
  misc_feature (201)..(427): NCBI GI: 171690556 Blast Desc: protein product [Podospora anserina] gi|170945226|emb|CAP71337.1| protein product [Podospora anserina]
  misc_feature (32)..(425): NCBI GI: 46116878 Blast Desc: FG04281.1 [Gibberella zeae PH-1]
  misc_feature (123)..(425): NCBI GI: 256725552 Blast Desc: NECHADRAFT_43650 [Nectria haematococca mpVI 77-13-4]
  misc_feature (138)..(418): NCBI GI: 242817420 Blast Desc: conserved [Talaromyces stipitatus ATCC 10500] gi|218713416|gb|EED12840.1| conserved [Talaromyces stipitatus ATCC 10500]
  misc_feature (116)..(414): NCBI GI: 240107038 Blast Desc: CPC735_018290 [Coccidioides posadasii C735 delta SOWgp]
  misc_feature (115)..(414): NCBI GI: 119175114 Blast Desc: CIMG_09459 [Coccidioides immitis RS]
  misc_feature (118)..(414): NCBI GI: 115387875 Blast Desc: conserved [Aspergillus terreus NIH2624] gi|114195527|gb|EAU37227.1| conserved [Aspergillus terreus NIH2624]
  misc_feature (123)..(425): NCBI GI: 156049171 Blast Desc: SS1G_08292 [Sclerotinia sclerotiorum 1980] gi|154692691|gb|EDN92429.1| SS1G_08292 [Sclerotinia sclerotiorum 1980]
MFDQLLKAAGRLTDAELSADVPASLLQAVPKEVSIKDVNELVLQKRDTEDHTSILWAVYAVLKTRDHDELALGEEADMEASIKHLFISIGGLIKPVCSGASFDEDTTDYAELSRNGVIGLHIITLLAKLGSREAQVLPQETLYSIIGYTNPADPWTTASCAELAHELITTHFQNSTQNVAVRDPPPSFYRSAERSSKEQKPKSERERFITEDLILEFLRPIFAKSRPTNITASGRPAAYPEQPSRYTQGEGFGGSGNDVTTTKPWKYTQQYAVTVFEWAVKNADTSLLTKYWSLYTPILLTLLDEFQPFSLKLRSLSIFRLFWSKCPDGLMSRTGLTEVFEQAVFPTVLSLPSLTPPAESLTLLTAAYPALFDIAGINAQEEGNQEREQKQFTESQRKSLDKIMREGIMVGFHHAKEHVRLAEFFARFYVVLSMAWV

SEQ ID NO: 11919 - DNA, 5186 bp, Muscodor strobelii
  misc_feature: SGI EST ID NO. CUFF.28266.0
  misc_feature: Variant of the nucleotide sequence at SEQ ID NO 11917
ttcgggttgtttttgaattttgcccataaacccaactgttgacagctgacagctgcaggttaccggctttcagtcactcgctttctaaataaggtgctctggatgcaacacggatcatcacatgatattcccatgtatctggataccgatcggacgagtgacatggtctgacgggggaaatgtccagaaatgtttgaccaactgctcaaggcggccgggcgtctaaccgatgcagaactgtccgctgacgtacccgccagtctcttacaagcggtgcccaaagaagtttctattaaggatgtaaacgaattggtgttgcagaaacgggacacagaggtattcttctagtctctaagcgtgagactatagattagtggactgatgcagtgcttgttggcaacaggatcatactagcatcctgtgggctgtttacgctgtgctgaaaaccagagatcacgatgagttggcacttggggaagaggccgatatggaggcatcgattaagcatctcttcatttctattggagggttaatcaagccggtctgttccggcgcctcctttgacgaagacaccacagactatgcagaattatcgcgaaatggtgtcatcggtcttcacattatcacactattagccaagcttggctcgagagaagcccaagttctacctcaagagacactatactccatcataggatacaccaacccagctgacccctggacaacagcttcgtgcgcagagcttgcacatgaactaatcacgacgcacttccagaactctactcagaatgttgccgttcgagatccaccaccttcattctaccgctcagcagaacggagctcaaaagaacagaagccgaaatctgaacgagaacgcttcataaccgaggatctgatacttgagttcctacggcctatctttgctaaatcacgtcccacgaacataactgcctccggacgaccagccgcgtacccagagcaaccttcgcgatacacgcaaggcgaaggctttggaggctctggcaacgatgtaaccaccactaaaccgtggaagtatacccaacaatatgcagtcacggtattcgaatgggcagtgaagaatgcagatacatccctcctaaccaagtactggtcactctacacacccatccttctaacactcctcgatgaattccagcccttctctctaaagctccgctctctatcaatcttccggctcttctggtctaaatgcccagacggactcatgtcacgtacaggactcactgaagtcttcgaacaagctgtctttcccacagttctcagcctacctagtctcacccctccagctgaatcccttacgttgctgacagcagcataccctgccttatttgatatcgcaggtataaacgcccaggaagaaggcaatcaagagcgtgagcaaaaacagttcaccgagtcacagcgaaagtccctagacaagatcatgagagaaggcatcatggtcggatttcatcatgcgaaagagcatgtccgacttgcggaattttttgccagattctatgtcgtcttgtcaatggcatgggtatagttacggtcaaatatcttaaggacataatgccccttatctcggaacttttatgcgaccccttcggcacaaagtacccaccgacacttctatccgccacccacctcttacaagcagtcttgcaaaactgttggccccggatgccttactactgtaacgaagtcatcaaagtgacaatggtctgttatctcaacatcgcggacgaggagtccttcgcaagtggccaaccaactagggccgagctaaaccatgaactctcaaagagctttcagatgctctcagccatcatgtcagcatccgacgaggatatagccacccgcgtcgacccacttatcgcgaaagagccccggcttgccatgctcttcaagaatgcagaagcgagatgaaccgctttccaagaacaagtcggaatttgtatcttacgaaggacctgactaagtaatcaaatcttcaaaaacatcactcagaggagttgccaactcagcggacgaattctagtcgaccggctgttgtttaaagagggatttcccacgaagccatttcttatatgccttgtaccgtttcttgggcagatcctcttccgtgaccgttagcggattatcgccaacgcgcagaagctcataatacgccgcaatatcctcttctgtaccgtttggtgctagaccatcggtttgccagctcccgttgagatagtcttggtactctgatgagtcaacatctgtcggcgcctcgttcgatactacgagaggaagactctgtggatgggtgacgtatcgcgtgtagtcttcggcttccagtgcactgacagacgggttcagagactcgtggacgactttagtgaaagtccattgcgctgccttggacttttcctgcggtgtctgtttgagtttgggaccgtcgataggtgtgtccagtgtttctttcatgatgctgtggggtaccattggcaccctatccgcttgcataggctgcagccagcgctgaatagagattcctctcgcggctgctttctccgttgctagctctgtttgggctgtcgtattgctgtcaggagacttgatagaatcatgaggatccacaatggtcacttctttcttagctacaggcctctttctctcgacgttctcttggtcaccctctgtccggacccggaaagggctgaggtcgtatttgccctcctgagtcgatctgagtggtatgtacttgatggtggaattcatcttatatgagaacatcttcggaaacgacgagagtgtagctggtcggtagtactcgagccaatagtcatcaaaaaatgaaatgggcttctcactcaagatatctcttggtggaatataaactggcaatgatttccttttgagatagtccggattgtaccactgaatgtagtcactctgtcgcttctcggaccatgaacgtggatctacgtggtgcaagtaatagtccgtagacagatcccacagcatcggctgtccctgagcaaagatatagtttcccagaaagagattataggcttcttgtctctggctatcgagaaatgaattgttgtagtagcgtttgaagctttcgatcatatcgcgagaatggcttgtccactggttgattttccgataggtttccatcgtgttcacaagttgagagccgccgtattgtacggcgattgtgtctccatggtcgtgatacatgtgggtgaagagatttactgcatccgtgtcatattcgatagaggtgtcttcgagtatgcctagagcatgcaactggtgtccgagcgctcgtttaccaatgacaaactgagcggcattagtacggtcgagacagtcaatacagtttgttcttgctacgccgttctgaactctgctggggtttacgtccccatcaccattttggaaaaatcctgtcgtagtaacaacagactcggcgatactctctagggtactaatgacatcttgatcccggcttttagcggccctgctcatgtcccatgccttgtgaatgattttgtgctcggtggggagaaattgattgagatagtggatcgcattggtatattccttcagaagcttggactctcgcggtgtccgctcccttgacttgactaggttcaagacatatatcggcgagccatagcgctcgaacaagtgattgaagtgtagcgccgccgctgtataaaagggatctacaagattgagctcgattggcggtttcggcgtaacaccaatgttgtcttgcgtccagtatagaggaatgctgcctctgtgctgcacgtacgaggtgtactggggattagcgaatagtttgtggctgggcgagtgaaacgaagtggtctgtgattccgagacaatctgctctgtctcgacgtcattagcgacataaccaagatcgttagccccacgcttcaggaaacgtgcaccggcaaagaaacgcgaacgacgagcaatgatggtgatatgcgccgtcctcccgtacacagagatggcagcttggtctatgtagccatgtatgatggggcgacaccagtcgaaggggtcgctcagattgtctgctgctggctgcaaaagatgactgttccagacgaacatctcgttatagtcgtggtaggtcttgcctggtgatccgcccatcacggctaggcgttctcgagtgatattgtgctgaagggccctggtgatatcgtacgagtagctgaagtagaaggacctggtgagatccagatgattgaggataccgagaaagcgagactcttccgggtttcgcgtgtcggccttgtacttgggaggagtcagagggactagctcggtaccgtcaacctggtagacgtaatggccccctatcatggcaacggtgctcttcttagtgatcagcatcatgtagtaggggccggtgaatttgatgaaacccaagagcccccaggcagtgcagcgctgcttgatgccaccggtgcccttgttgccgtggtcgatggtgtcgagcagagagttcatctccttgcgcccatagatggtcttgtcgtcggtgatggataagtccgggtcttggtgggtgttgcggtcgaccttgagaatgcggaagcgcttctcggcgacgtcaccgcccacgatgtagtatcgactggccgtctcgtagagggtgaacttgtgcatcttgtagggcatgaagggtggcgtctgttcgtcgtcgggcggcgtgatctctcgtgacagggtctcggggctgttggtgcggatgaagggccgggcgacagagggctcttcatcgttgtcgtcctcgacggcactgcggttgcgcgccttggcatcctgcaggagggtttcgctactagcgttgttctgcagaagagggaaagaatgttggctcgactgagaggcaagaggctcgtgaggcgagagctccgagagctcgtcttgcgcctctgcggcttggttcgtgatgctggttggctgcgcgggctgtccgttggtcttgctgccgttgaaatcgctcgcgtctgtcatgttggcgttgtcccaacggccgatatgcactgcgcttggttgtacattgcccgatgtgagctggacttcaggctggtggctggctatctggatagaagactgtttcttctgcccagcgtgaaggtttg

SEQ ID NO: 11920 - DNA, 1515 bp, Muscodor strobelii
  misc_feature: SGI cDNA ID NO. 563846
  misc_feature: Encodes the peptide sequence at SEQ ID NO 11921
atgttatcctatcaacatgtaatcagatcctcacggatattactcttcttaatattaatatcttccccgttgatcagcgcagacacatgctccacgctcgccaccactacgtccatcgaagttgcatatccacttaatgtcaactacatagacgagcagaacaaatactggtcgacaacgagtatttctcttacgcctagttgtataatatttccacgctcggcagaagaagtctccgttgtcgtccagactctaaacgacaatgaaggggagccgttcgcggtcaagtcaggggggcataaccctaataggtacttctcaagcgttgctggcggtcccctaatatccactgcgcgaatggatgaagctattcttgaccaagaaaccggagtcctgcagatgggtcctggtaaccgtcttgatgcgattgcagccaagcttcaaggcactggatggactttcgttggaggtcgcattggtaatacaggaacgggcggtctaatcctaggcggaggattatcatatatgagcgcgcaatatggatgggctgcctcttcagttctcgattatgaggttgtattggcgaacggcacaatcgttcacgccaatgacaatgagaactcagatttggcacttgctctcaagggcggtggtaacaattttgggattgtgactacatatacactccagacgtatagacaaggtaacatctggggaggaaacatactgttctaccatagcgacgaacttgccacgaacttgttgaatgcagttcgtgacttcacagaatacaacacagatgataaggcagccgttattgtgacggcggaacgttcggtcaagctcgttgacttctggatcttatttcttttctacgacggaccaactccgccagagggactattcagcaactttacaaacgctggactcccaatcctcaacacgtgcgtgacacggacttactctgatttcattggtggcagcaactgggtcattgtcaaagcatctgtggtcgacatagggacggagactgtgccgataccctcagctgacgatgctcctatcgttatggaaggtattcatgctcactggcgaaatgtctctggcaccaagctcctggagcctggcatcgtggcatcaattgcatatcaacctttccctaagcgcattgctcaagccgcactagcggcagggcaagatctgatagacgcggacgatgctgctgatcggttgattcttgaaatgaattacagcttcctcctgcagccgcactacgatgacatggctgatactctcgaagcgacatacactggtgttcgtaatcgagtgctcggatggcaagcagacgggatactaccagatgtatatctacccgtcttcatgaactatggtttctatcgtgaagattactggagtcgactacgcccagagagccgggctctggcacaacaagctgctaccaaatatgatcctgatgggtttttccgcgatcgtaccgggggctggaagccgtag

SEQ ID NO: 11921 - protein, 504 aa, Muscodor strobelii
  misc_feature: SGI Peptide ID NO. 563846
  misc_feature (66)..(203): Pfam Id: PF01565 Pfam Desc: FAD binding domain
  misc_feature (16)..(504): NCBI GI: 169623644 Blast Desc: SNOG_15066 [Phaeosphaeria nodorum SN15] gi|111056489|gb|EAT77609.1| SNOG_15066 [Phaeosphaeria nodorum SN15]
  misc_feature (13)..(504): NCBI GI: 171677732 Blast Desc: protein product [Podospora anserina] gi|170936934|emb|CAP61593.1| protein product [Podospora anserina]
  misc_feature (25)..(504): NCBI GI: 116201297 Blast Desc: CHGG_08533 [Chaetomium globosum CBS 148.51] gi|88177051|gb|EAQ84519.1| CHGG_08533 [Chaetomium globosum CBS 148.51]
  misc_feature (14)..(503): NCBI GI: 261355383 Blast Desc: FAD binding domain-containing protein [Verticillium albo-atrum VaMs.102]
  misc_feature (27)..(503): NCBI GI: 39960153 Blast Desc: MGG_09376 [Magnaporthe grisea 70-15] gi|145014333|gb|EDJ98901.1| MGG_09376 [Magnaporthe grisea 70-15]
  misc_feature (48)..(503): NCBI GI: 39973761 Blast Desc: MGG_00973 [Magnaporthe grisea 70-15] gi|145018071|gb|EDK02350.1| MGG_00973 [Magnaporthe grisea 70-15]
  misc_feature (21)..(503): NCBI GI: 154286082 Blast Desc: [Ajellomyces capsulatus NAm1] gi|150407477|gb|EDN03018.1| [Ajellomyces capsulatus NAm1]
  misc_feature (21)..(503): NCBI GI: 225558356 Blast Desc: FAD binding domain-containing protein [Ajellomyces capsulatus G186AR]
  misc_feature (6)..(503): NCBI GI: 261201868 Blast Desc: FAD dependent oxidoreductase [Ajellomyces dermatitidis SLH14081] gi|239590245|gb|EEQ72826.1| FAD dependent oxidoreductase [Ajellomyces dermatitidis SLH14081]
  misc_feature (6)..(503): NCBI GI: 239611958 Blast Desc: FAD dependent oxidoreductase [Ajellomyces dermatitidis ER-3]
MLSYQHVIRSSRILLFLILISSPLISADTCSTLATTTSIEVAYPLNVNYIDEQNKYWSTTSISLTPSCIIFPRSAEEVSVVVQTLNDNEGEPFAVKSGGHNPNRYFSSVAGGPLISTARMDEAILDQETGVLQMGPGNRLDAIAAKLQGTGWTFVGGRIGNTGTGGLILGGGLSYMSAQYGWAASSVLDYEVVLANGTIVHANDNENSDLALALKGGGNNFGIVTTYTLQTYRQGNIWGGNILFYHSDELATNLLNAVRDFTEYNTDDKAAVIVTAERSVKLVDFWILFLFYDGPTPPEGLFSNFTNAGLPILNTCVTRTYSDFIGGSNWVIVKASVVDIGTETVPIPSADDAPIVMEGIHAHWRNVSGTKLLEPGIVASIAYQPFPKRIAQAALAAGQDLIDADDAADRLILEMNYSFLLQPHYDDMADTLEATYTGVRNRVLGWQADGILPDVYLPVFMNYGFYREDYWSRLRPESRALAQQAATKYDPDGFFRDRTGGWKP

SEQ ID NO: 11922 - DNA, 1541 bp, Muscodor strobelii
  misc_feature: SGI EST ID NO. CUFF.28253.0
  misc_feature: Variant of the nucleotide sequence at SEQ ID NO 11920
taaaaagtcacgattcgacgatagtttgggaagcttgagtcaggagagtatcgttccatcggatccgtcttaccagcacgacgcatgccaacgcttcgcttaagcctgtgcctggaactattggttcagctgcaggctctgactatttgctacgttgaagactataggctgaattgttgcacggctatggcacttacaagagctgacgcatatccttgcccgaaacggcacggataggaaacgtctttgcagacggcggaaacgagcatgccacttctctaacccgaaccacaatacgattatatcgtaccaagtctgacaacgcgtcgacgctgcacgtctgaccgttatctgtcccaaacgtgtttattttgtgcatttgacgaagccaccttcgtcaccaggcatgagtctatcccaagcggtccagtcttgatcttcccaatgtgggtttgttctggattgaaggatcagtggggagctccaaaaccttgaatagtgttgcatcgatgtcctacgctatggagtgccgtagatgagatcgtggctcccttgcaggatctcacaacttaggggacatcggctgcaaagctgcaagcgagctcttggatgaaggttaagcgatgtgcggagcggaggggcggagggcggaaaggcactgacattcgaactctagtgttcggactcacgaagataggccagcgaaaatattatataatgagagagtcagacctctttaaaccccaatggaaggtgatcatgctccggaaagtgcgaggcatttatagcgaactcgtgtagcaaaattccagcaatttcctgaataattctcgctctttccaaagaatacttgccttcgtttaaaccatgttatcctatcaacatgtaatcagatcctcacggatattactcttcttaatattaatatcttccccgttgatcagcgcagacacatgctccacgctcgccaccactacgtccatcgaagttgcatatccacttaatgtcaactacatagacgagcagaacaaatactggtcgacaacgagtatttctcttacgcctagttgtataatatttccacgctcggcagaagaagtctccgttgtcgtccagactctaaacgacaatgaaggggagccgttcgcggtcaagtcaggggggcataaccctaataggtacttctcaagcgttgctggcggtcccctaatatccactgcgcgaatggatgaagctattcttgaccaagaaaccggagtcctgcagatgggtcctggtaaccgtcttgatgcgattgcagccaagcttcaaggcactggatggactttcgttggaggtcgcattggtaatacaggaacgggcggtctaatcctaggcggaggattatcatatatgagcgcgcaatatggatgggctgcctcttcagttctcgattatgaggttgtattggcgaacggcacaatcgttcacgccaatgacaatgagaactcagatttggcacttgctctcaagggcggtggtaacaattttgggattgtgac

SEQ ID NO: 11923 - DNA, 2232 bp, Muscodor strobelii
  misc_feature: SGI cDNA ID NO. 563847
  misc_feature: Reduced expression when VOC is produced
  misc_feature: Encodes the peptide sequence at SEQ ID NO 11924
atgttcggaaaggccgcacgcccaccgtggtcgcgcggaccactgctcctattcaccactctcgccgcccttctcattccagtatctgccgaaaataaattacagaccaactccctagcttcatgccagcagaactcagatttcaccgcgagtttgttcgatctcgtgttcactcctgataatggcagagccgatatcaatatcaccgcggtttccaccgtcgacgcaaatgtcaaattcgacctccgaatctacgtatatggctaccaattctacacgtatatcatcgatccttgcgagctcaagctcagcggattttgccctatgactgctagccagcttagtcaagaaatcagcttcgatctcggaacagaaaccgcttcgcaaattcctggcattgcctacacgtttcccgatattgatgccacagtcaaggtatacattaatgccacgagtggtgcggcggcgggtaccagtgtggcgtgtctccaggctaacgtttcgaacggtaaaaccgtcaatctacttggtgtgaaatgggcatctgccattgttgctggcctggctctcgcatcctccgctgtgctttccggactaggccatacgaatgccgcatctcacgtcgcagccatggccttggccttgacgacatatttccaatctcaggctatgattggtctcgttggtctcacgttgcctccttccgtacgggcatggactctcgacttccagtggagtttgggcattgtgaatgtcgggtttctgcaaagcattttcacctggtatcagcgcgcaacaggcggcacagcggctcaagtcctggacacactacgcaccgtatctgttcaggtacagaagcgatctgagttcctggtcgagccgggcatggatttgatgaaacgtgcaggcgcattgttacctgatgttgtatcggacaatgccatgaatattgtgaagcgcagtggaaatctgagaaccagttacggaagttatattgtctacggcatccagcgtgtagcgttccaaacgggcatcgagacgaccaacttgttccttactggcatcatttccttttatgtggtcatggcgttgaccaccatagttgttgctctattcaagggcttttgcgagatcgccaccaaagccaagtggatgaagaacgataccttcttggatttccgtctcgggtggttgactgtccttaaaggaattctcctccgcatcactctcatcggatacgcgcctgtaacgatccttagcttgtgggagttcacccaatcggattcggctgctgaagttctacttgctgtctacttccttctttacatgcatatcgctttgggttgggcggcgtacaaagtcattcgtatcgcacatcgctcagttgcgctccacaggaatcctgcctatatcctgtattcagatccccaaacactcaataaatggggcttcctctacatccagtttcgggcttccgcatactactttattattcccacactcgcccacatccttctgaaagctttcttcatcgctttcgctcagagtgctggcactgtccaagccatcgcgtttttgctcattgaagctggtgctttgattggggcagctgtgttacgcccatggatggacaagaagctgaactcattcaacatcaccatctgcgccgtgaacttcctcaacgccattttcttgttgattttcaccaatgtgtttggtcaacctggcatcgttaccggtgttgtcggtgtagtactatggattgtcaacgccatcactactacggtgttgttgctaatgctaattatttctacgacgctggtcttcttccgagacaacccagacggccgctacaagttcatggccgacgaccgaacctcattcatgaaatcacaaacacaactcacaacgactggcgagctagatgctttagctatgactgcacgtggcgacaaagcagggtacggatttgagatggacgacgacctcgaatcagtccaccgacctggatctttacgtccgcaatctcgtccgcagtctatgacgcgacctggcccatcatcagtgtctcctgcgagcacattgcacgccgacagaggccgcccatctgtcgaccagcaagccccgttcatcaacggagctcaaatctcacggacccccagccctgcgaatttcccatcgcgggctcaacacaacgccagcccttggcaacgaggcgctggctacgactaa

SEQ ID NO: 11924 - protein, 743 aa, Muscodor strobelii
  misc_feature: SGI Peptide ID NO. 563847
  misc_feature (18)..(653): Pfam Id: PF06011 Pfam Desc: Transient receptor potential (TRP) ion channel
  misc_feature (27)..(743): NCBI GI: 9945012 Blast Desc: calcium-related spray protein [Neurospora crassa]
  misc_feature (14)..(743): NCBI GI: 46137303 Blast Desc: FG10167.1 [Gibberella zeae PH-1]
  misc_feature (34)..(743): NCBI GI: 145612291 Blast Desc: MGG_12322 [Magnaporthe grisea 70-15] gi|145019480|gb|EDK03708.1| MGG_12322 [Magnaporthe grisea 70-15]
  misc_feature (30)..(740): NCBI GI: 171691919 Blast Desc: protein product [Podospora anserina] gi|170945908|emb|CAP72709.1| protein product [Podospora anserina]
  misc_feature (11)..(735): NCBI GI: 116200979 Blast Desc: CHGG_08374 [Chaetomium globosum CBS 148.51] gi|88176892|gb|EAQ84360.1| CHGG_08374 [Chaetomium globosum CBS 148.51]
  misc_feature (29)..(743): NCBI GI: 256731766 Blast Desc: [Nectria haematococca mpVI 77-13-4]
  misc_feature (10)..(743): NCBI GI: 85095269 Blast Desc: NCU05785 [Neurospora crassa OR74A] gi|28921504|gb|EAA30809.1| NCU05785 [Neurospora crassa OR74A]
  misc_feature (25)..(644): NCBI GI: 261351858 Blast Desc: DUF907 domain-containing protein [Verticillium albo-atrum VaMs.102]
  misc_feature (11)..(743): NCBI GI: 171677324 Blast Desc: protein product [Podospora anserina] gi|170936730|emb|CAP61388.1| protein product [Podospora anserina]
  misc_feature (7)..(743): NCBI GI: 156044096 Blast Desc: SS1G_10151 [Sclerotinia sclerotiorum 1980] gi|154694540|gb|EDN94278.1| SS1G_10151 [Sclerotinia sclerotiorum 1980]
  misc_feature: Useful for introducing or modulating the production of volatile compounds
MFGKAARPPWSRGPLLLFTTLAALLIPVSAENKLQTNSLASCQQNSDFTASLFDLVFTPDNGRADINITAVSTVDANVKFDLRIYVYGYQFYTYIIDPCELKLSGFCPMTASQLSQEISFDLGTETASQIPGIAYTFPDIDATVKVYINATSGAAAGTSVACLQANVSNGKTVNLLGVKWASAIVAGLALASSAVLSGLGHTNAASHVAAMALALTTYFQSQAMIGLVGLTLPPSVRAWTLDFQWSLGIVNVGFLQSIFTWYQRATGGTAAQVLDTLRTVSVQVQKRSEFLVEPGMDLMKRAGALLPDVVSDNAMNIVKRSGNLRTSYGSYIVYGIQRVAFQTGIETTNLFLTGIISFYVVMALTTIVVALFKGFCEIATKAKWMKNDTFLDFRLGWLTVLKGILLRITLIGYAPVTILSLWEFTQSDSAAEVLLAVYFLLYMHIALGWAAYKVIRIAHRSVALHRNPAYILYSDPQTLNKWGFLYIQFRASAYYFIIPTLAHILLKAFFIAFAQSAGTVQAIAFLLIEAGALIGAAVLRPWMDKKLNSFNITICAVNFLNAIFLLIFTNVFGQPGIVTGVVGVVLWIVNAITTTVLLLMLIISTTLVFFRDNPDGRYKFMADDRTSFMKSQTQLTTTGELDALAMTARGDKAGYGFEMDDDLESVHRPGSLRPQSRPQSMTRPGPSSVSPASTLHADRGRPSVDQQAPFINGAQISRTPSPANFPSRAQHNASPWQRGAGYD

SEQ ID NO: 11925 - DNA, 3259 bp, Muscodor strobelii
  misc_feature: SGI EST ID NO. CUFF.28395.0
  misc_feature: Variant of the nucleotide sequence at SEQ ID NO 11923
tgccgtgttaagttgtgcaatttgtgttgaccgtcatccctgactgtggaccaagtttttgccgccaatccgtcccgttcaatgctcatctcgaccccctacttggaatacgaagtctattacctgctactcccactcctcgacaccttgttgctttcatcaattaccaaaccacgatcctcatcgccagcttcgggacaacaacaacaagtctcttaaccttaatttccttctaatcgtacactgtatcggcagatttcgctcgcttctccctacctgccatcagttcatttacttcccgccgtcatttctagtctgcatttccggtttggtgcatagtacgaatccgccgatttgaccgtggtctaccgttgtttggagtctccagaacaaaggaagtgagataacgttgaagggggactgggtccatcgttctttgcgcgcccgaccgcgtgcttcgataaccacttcgcggtcgttgccatcgcccgtcatgttcggaaaggccgcacgcccaccgtggtcgcgcggaccactgctcctattcaccactctcgccgcccttctcattccagtatctgccgaaaataaattacagaccaactccctagcttcatgccagcagaactcagatttcaccgcgagtttgttcgatctcgtgttcactcctgataatggcagagccgatatcaatatcaccgcggtttccaccgtcgacgcaaatgtcaaattcgacctccgaatctacgtatatggctaccaattctacacgtatatcatcgatccttgcgagctcaagctcagcggattttgccctatgactgctagccagcttagtcaagaaatcagcttcgatctcggaacagaaaccgcttcgcaaattcctggcattgcctacacgtttcccgatattgatgccacagtcaaggtatacattaatgccacgagtggtgcggcggcgggtaccagtgtggcgtgtctccaggctaacgtttcgaacggtaaaaccgtcaatctacttggtgtgaaatgggcatctgccattgttgctggcctggctctcgcatcctccgctgtgctttccggactaggccatacgaatgccgcatctcacgtcgcagccatggccttggccttgacgacatatttccaatctcaggctatgattggtctcgttggtctcacgttgcctccttccgtacgggcatggactctcgacttccagtggagtttgggcattgtgaatgtcgggtttctgcaaagcattttcacctggtatcagcgcgcaacaggcggcacagcggctcaagtcctggacacactacgcaccgtatctgttcaggtacagaagcgatctgagttcctggtcgagccgggcatggatttgatgaaacgtgcaggcgcattgttacctgatgttgtatcggacaatgccatgaatattgtgaagcgcagtggaaatctgagaaccagttacggaagttatattgtctacggcatccagcgtgtagcgttccaaacgggcatcgagacgaccaacttgttccttactggcatcatttccttttatgtggtcatggcgttgaccaccatagttgttgctctattcaagggcttttgcgagatcgccaccaaagccaagtggatgaagaacgataccttcttggatttccgtctcgggtggttgactgtccttaaaggaattctcctccgcatcactctcatcggatacgcgcctgtaacgatccttagcttgtgggagttcacccaatcggattcggctgctgaagttctacttgctgtctacttccttctttacatgcatatcgctttgggttgggcggcgtacaaagtcattcgtatcgcacatcgctcagttgcgctccacaggaatcctgcctatatcctgtattcagatccccaaacactcaataaatggggcttcctctacatccagtttcgggcttccgcatactactttattattcccacactcgcccacatccttctgaaagctttcttcatcgctttcgctcagagtgctggcactgtccaagccatcgcgtttttgctcattgaagctggtgctttgattggggcagctgtgttacgcccatggatggacaagaagctgaactcattcaacatcaccatctgcgccgtgaacttcctcaacgccattttcttgttgattttcaccaatgtgtttggtcaacctggcatcgttaccggtgttgtcggtgtagtactatggattgtcaacgccatcactactacggtgttgttgctaatgctaattatttctacgacgctggtcttcttccgagacaacccagacggccgctacaagttcatggccgacgaccgaacctcattcatgaaatcacaaacacaactcacaacgactggcgagctagatgctttagctatgactgcacgtggcgacaaagcagggtacggatttgagatggacgacgacctcgaatcagtccaccgacctggatctttacgtccgcaatctcgtccgcagtctatgacgcgacctggcccatcatcagtgtctcctgcgagcacattgcacgccgacagaggccgcccatctgtcgaccagcaagccccgttcatcaacggagctcaaatctcacggacccccagccctgcgaatttcccatcgcgggctcaacacaacgccagcccttggcaacgaggcgctggctacgactaaaatcttttcctttactcacttctcttggcatgatctgatatcccgggaccattgtttgcattgactggcgaagcctagctgctcaatctcgttggagatccaggaccatttgtatttggtaatcatgagggccgaattgggactttgactggccctggcagactttggatccgccgcccacgaactgttacgcttcggcataggatgtttggttgtaactattgcatcatttgttggatacctgtacttacactccggcgttccgggactgggataaaatagaatcccttttgcttgctctatgtttgaactcggtcaccgtgttgtgacattctgtcgatgtgacctgtgactgagtggaatcgctacattgtgatatatcacagtggctgggagctagactgacctctatttgagtggtcataaatccacacgtgtcatgctacagtgctgtttcttacaaactgggttcatgttctatatgttctagctcaatgataaggtattcagatactactatattctcatgacagc

SEQ ID NO: 11926 - DNA, 1653 bp, Muscodor strobelii
  misc_feature: SGI cDNA ID NO. 563848
  misc_feature: Encodes the peptide sequence at SEQ ID NO 11927
atggacgacgatgtgacccagttcatgatgatcacgggcgtcgagtcggagcgggtcgctcgtggctaccttcagatctccggcaacgtcatcgcccaggccatcgagacattctatgataatccggagctggtctccagcttcaacgctcccagcgaagcacagccctcttccgccacacaagctccccagacgagccgaccagctcgcatcggccgcgaggatgccagcggtactattcatatcgactccgactccgatgagttcgatgtccccatgaccgacgacgataatgacgagtcggacaatgtcgctgccatcgcgcggaccgcccaagaagaagaagatgccgccatggcgaggcggttacaagaggagctctatggctctggtgcaggcgacgctggcgcagacgacggtgtcagggcccctattgcacagacaacggagactttggcgggacccggcagcatgccatggagcttagaggacgagcgagaggctgcggtgctggagcagctccaagcccgccgtaatagacagcaaagacgagctcaacctcgcaatcctttcgaccagggcccctcgatatgggacgacccagatgcacccccgatacccaatagtacgcgaccgggagcttcggcagctggagaaggagctacatcgcgagctgcccacttgcgcgacctcttccgtccgccacatgagttgatatctcccttcacatgggacgaggcacgcgacgagggcaaggaggagaagaagtggatcatggttaatctccaggacatggacaacttcaactgccagatattgaatcgagacttctggaaggacgagaacattgaagctctggttaaggaacatttcatcttcttgcagtacgacaaacgagagcccagatcccagtcattcatccagttctatttccccaacgaggcccacgaaaacgacgaaaattaccctcacatctccattgttgatcccagaaccggcgaacaggtcaaggtctggtcaggattgccttttcccaaggcaggcgagttctatcaagacgtcattgagtttcttgatcggtacagcctggctgccaacagcaaaaaccctgtgtccaagtccaagccccaggccaaacaggtcgatgtcggtcgcttgacagaagacgagatgctccagctggccatgcagaacagcttggacgccaacggtggttcttcagggtcaagtgttcaggatcctgacatgctgaccaaatcgggccgtggcatggacaagggcaaaggaagtgaagcagataacgccgtcgatcttactgacaactctaacgagactgcgggttcgatcgagtctgaattcgcacggattccctccaaccatcctcacgtggagccagagaacaaccctgcaacgactactagaatacagttcagacactctggcggacgtgtcattcgtcgctttgccgtcacggataccgtcagccgcttgttcgagtggctgaaagcagagccatttgagggcaaggaaggtgttcggttcgagctcaagtcgatgccggccgggacagacctgatcggcgagctgggtaagacgatcgaagaggcaggtctgaagcagggcaccgttatgatcgagtttgttgaggattga

SEQ ID NO: 11927 - protein, 550 aa, Muscodor strobelii
  misc_feature: SGI Peptide ID NO. 563848
  misc_feature (467)..(547): Pfam Id: PF00789 Pfam Desc: UBX domain
  misc_feature (2)..(549): NCBI GI: 116181160 Blast Desc: CHGG_01208 [Chaetomium globosum CBS 148.51] gi|88185505|gb|EAQ92973.1| CHGG_01208 [Chaetomium globosum CBS 148.51]
  misc_feature (1)..(550): NCBI GI: 46122715 Blast Desc: FG05735.1 [Gibberella zeae PH-1]
  misc_feature (3)..(550): NCBI GI: 85115757 Blast Desc: NCU00771 [Neurospora crassa OR74A] gi|28926725|gb|EAA35691.1| conserved [Neurospora crassa OR74A] gi|38636409|emb|CAE81946.1| conserved [Neurospora crassa]
  misc_feature (1)..(547): NCBI GI: 171695754 Blast Desc: protein product [Podospora anserina] gi|170948119|emb|CAP60283.1| protein product [Podospora anserina]
  misc_feature (1)..(550): NCBI GI: 156036322 Blast Desc: SS1G_12850 [Sclerotinia sclerotiorum 1980] gi|154698255|gb|EDN97993.1| SS1G_12850 [Sclerotinia sclerotiorum 1980]
  misc_feature (2)..(548): NCBI GI: 39949100 Blast Desc: MGG_08745 [Magnaporthe grisea 70-15] gi|145009287|gb|EDJ93998.1| MGG_08745 [Magnaporthe grisea 70-15]
  misc_feature (1)..(550): NCBI GI: 115395208 Blast Desc: conserved [Aspergillus terreus NIH2624] gi|114193060|gb|EAU34760.1| conserved [Aspergillus terreus NIH2624]
  misc_feature (1)..(550): NCBI GI: 67539010 Blast Desc: AN5675.2 [Aspergillus nidulans FGSC A4] gi|40743578|gb|EAA62768.1| AN5675.2 [Aspergillus nidulans FGSC A4] gi|259484851|tpe|CBF81425.1| TPA: UBX domain protein (Ubx5),
  misc_feature (3)..(550): NCBI GI: 121711313 Blast Desc: UBX domain protein (Ubx5), [Aspergillus clavatus NRRL 1] gi|119401423|gb|EAW11846.1| UBX domain protein (Ubx5), [Aspergillus clavatus NRRL 1]
  misc_feature (3)..(550): NCBI GI: 119482652 Blast Desc: UBX domain protein (Ubx5), [Neosartorya fischeri NRRL 181] gi|119409509|gb|EAW19457.1| UBX domain protein (Ubx5), [Neosartorya fischeri NRRL 181]
MDDDVTQFMMITGVESERVARGYLQISGNVIAQAIETFYDNPELVSSFNAPSEAQPSSATQAPQTSRPARIGREDASGTIHIDSDSDEFDVPMTDDDNDESDNVAAIARTAQEEEDAAMARRLQEELYGSGAGDAGADDGVRAPIAQTTETLAGPGSMPWSLEDEREAAVLEQLQARRNRQQRRAQPRNPFDQGPSIWDDPDAPPIPNSTRPGASAAGEGATSRAAHLRDLFRPPHELISPFTWDEARDEGKEEKKWIMVNLQDMDNFNCQILNRDFWKDENIEALVKEHFIFLQYDKREPRSQSFIQFYFPNEAHENDENYPHISIVDPRTGEQVKVWSGLPFPKAGEFYQDVIEFLDRYSLAANSKNPVSKSKPQAKQVDVGRLTEDEMLQLAMQNSLDANGGSSGSSVQDPDMLTKSGRGMDKGKGSEADNAVDLTDNSNETAGSIESEFARIPSNHPHVEPENNPATTTRIQFRHSGGRVIRRFAVTDTVSRLFEWLKAEPFEGKEGVRFELKSMPAGTDLIGELGKTIEEAGLKQGTVMIEFVED

SEQ ID NO: 11928 - DNA, 2575 bp, Muscodor strobelii
  misc_feature: SGI EST ID NO. CUFF.28565.0
  misc_feature: Variant of the nucleotide sequence at SEQ ID NO 11926
aaacagactgccttacttaaaaaacaacttatgaggtgatgacattgcaacacaagcaaactgtcagactcaggtgcattcaagtagacacagggaaggcgggctggcaagttttccagtcactctttcgtctcatccgtgcggacgtaccttaccacctaccatttcgatctcggacagagctcggaagctccctcatcaacacgatctaggtcaacgtgctgtctcccgccatttatgcactagcatccgaccgcaaaccgcgtttctcttatctggtgttctattcatcacattattctcttcttgtctactctatcttgaggcattcattagaatacttgtcgataaggtagtgctagtttagctactacactgcgagataccgttatctaaggtacttaggccagccatctcgccgcctaccaaccgtgagaacccacgcctttgggcttgtcaccactcgataaggtagctcttgccggccactattatcaaccgaccttgattagagtctagatatcgcttcgatactacttctctttaagtctgccgcgtccgagcgttgcccaagatggacgacgatgtgacccagttcatgatgatcacgggcgtcgagtcggagcgggtcgctcgtggctaccttcagatctccggcaacgtcatcgcccaggccatcgagacattctatgataatccggagctggtctccagcttcaacgctcccagcgaagcacagccctcttccgccacacaagctccccagacgagccgaccagctcgcatcggccgcgaggatgccagcggtactattcatatcgactccgactccgatgagttcgatgtccccatgaccgacgacgataatgacgagtcggacaatgtcgctgccatcgcgcggaccgcccaagaagaagaagatgccgccatggcgaggcggttacaagaggagctctatggctctggtgcaggcgacgctggcgcagacgacggtgtcagggcccctattgcacagacaacggagactttggcgggacccggcagcatgccatggagcttagaggacgagcgagaggctgcggtgctggagcagctccaagcccgccgtaatagacagcaaagacgagctcaacctcgcaatcctttcgaccagggcccctcgatatgggacgacccagatgcacccccgatacccaatagtacgcgaccgggagcttcggcagctggagaaggagctacatcgcgagctgcccacttgcgcgacctcttccgtccgccacatgagttgatatctcccttcacatgggacgaggcacgcgacgagggcaaggaggagaagaagtggatcatggttaatctccaggacatggacaacttcaactgccagatattgaatcgagacttctggaaggacgagaacattgaagctctggttaaggaacatttcatcttcttgcagtacgacaaacgagagcccagatcccagtcattcatccagttctatttccccaacgaggcccacgaaaacgacgaaaattaccctcacatctccattgttgatcccagaaccggcgaacaggtcaaggtctggtcaggattgccttttcccaaggcaggcgagttctatcaagacgtcattgagtttcttgatcggtacagcctggctgccaacagcaaaaaccctgtgtccaagtccaagccccaggccaaacaggtcgatgtcggtcgcttgacagaagacgagatgctccagctggccatgcagaacagcttggacgccaacggtggttcttcagggtcaagtgttcaggatcctgacatgctgaccaaatcgggccgtggcatggacaagggcaaaggaagtgaagcagataacgccgtcgatcttactgacaactctaacgagactgcgggttcgatcgagtctgaattcgcacggattccctccaaccatcctcacgtggagccagagaacaaccctgcaacgactactagaatacagttcagacactctggcggacgtgtcattcgtcgctttgccgtcacggataccgtcagccgcttgttcgagtggctgaaagcagagccatttgagggcaaggaaggtgttcggttcgagctcaagtcgatgccggccgggacagacctgatcggcgagctgggtaagacgatcgaagaggcaggtctgaagcagggcaccgttatgatcgagtttgttgaggattgagggtcgatctgtaagacggcacagtgtggagatcctggaagatggggccttaacagctttactgcttttaacggggcttcaagaatcatattagcattggggagtggctattcatctatagataggcgtcgtggcagcttgacttttccctcgctggagttccggtagtattcccctttgcactcccgagaccttcgtgccgacgtgattgcataccatagttgtaccgagtgttaggagcttcaatagcccgcttgccagcccggctcgtatagaaatcattctttgcttctgtcgcaaggtacatgtttggtgacttcaggggctgttattttccgggcgagcgtt

SEQ ID NO: 11929 - DNA, 483 bp, Muscodor strobelii
  misc_feature: SGI cDNA ID NO. 563849
  misc_feature: Elevated expression when VOC is produced
  misc_feature: Encodes the peptide sequence at SEQ ID NO 11930
atgctccagctggccatgcagaacagcttggacgccaacggtggttcttcagggtcaagtgttcaggatcctgacatgctgaccaaatcgggccgtggcatggacaagggcaaaggaagtgaagcagataacgccgtcgatcttactgacaactctaacgagactgcgggttcgatcgagtctgaattcgcacggattccctccaaccatcctcacgtggagccagagaacaaccctgcaacgactactagaatacagttcagacactctggcggacgtgtcattcgtcgctttgccgtcacggataccgtcagccgcttgttcgagtggctgaaagcagagccatttgagggcaaggaaggtgttcggttcgagctcaagtcgatgccggccgggacagacctgatcggcgagctgggtaagacgatcgaagaggcaggtctgaagcagggcaccgttatgatcgagtttgttgaggattga

SEQ ID NO: 11930 - protein, 160 aa, Muscodor strobelii
  misc_feature: SGI Peptide ID NO. 563849
  misc_feature (77)..(157): Pfam Id: PF00789 Pfam Desc: UBX domain
  misc_feature (1)..(160): NCBI GI: 46122715 Blast Desc: FG05735.1 [Gibberella zeae PH-1]
  misc_feature (1)..(159): NCBI GI: 116181160 Blast Desc: CHGG_01208 [Chaetomium globosum CBS 148.51] gi|88185505|gb|EAQ92973.1| CHGG_01208 [Chaetomium globosum CBS 148.51]
  misc_feature (2)..(157): NCBI GI: 171695754 Blast Desc: protein product [Podospora anserina] gi|170948119|emb|CAP60283.1| protein product [Podospora anserina]
  misc_feature (1)..(160): NCBI GI: 156036322 Blast Desc: SS1G_12850 [Sclerotinia sclerotiorum 1980] gi|154698255|gb|EDN97993.1| SS1G_12850 [Sclerotinia sclerotiorum 1980]
  misc_feature (1)..(160): NCBI GI: 154289269 Blast Desc: BC1G_16191 [Botryotinia fuckeliana B05.10] gi|150849888|gb|EDN25081.1| BC1G_16191 [Botryotinia fuckeliana B05.10]
  misc_feature (1)..(160): NCBI GI: 238844840 Blast Desc: UBX domain-containing protein 2 [Microsporum canis CBS 113480]
  misc_feature (1)..(160): NCBI GI: 258564490 Blast Desc: conserved [Uncinocarpus reesii 1704] gi|237908497|gb|EEP82898.1| conserved [Uncinocarpus reesii 1704]
  misc_feature (1)..(160): NCBI GI: 121711313 Blast Desc: UBX domain protein (Ubx5), [Aspergillus clavatus NRRL 1] gi|119401423|gb|EAW11846.1| UBX domain protein (Ubx5), [Aspergillus clavatus NRRL 1]
  misc_feature (1)..(160): NCBI GI: 67539010 Blast Desc: AN5675.2 [Aspergillus nidulans FGSC A4] gi|40743578|gb|EAA62768.1| AN5675.2 [Aspergillus nidulans FGSC A4] gi|259484851|tpe|CBF81425.1| TPA: UBX domain protein (Ubx5),
  misc_feature (1)..(160): NCBI GI: 119482652 Blast Desc: UBX domain protein (Ubx5), [Neosartorya fischeri NRRL 181] gi|119409509|gb|EAW19457.1| UBX domain protein (Ubx5), [Neosartorya fischeri NRRL 181]
  misc_feature: Useful for introducing or modulating the production of volatile compounds
MLQLAMQNSLDANGGSSGSSVQDPDMLTKSGRGMDKGKGSEADNAVDLTDNSNETAGSIESEFARIPSNHPHVEPENNPATTTRIQFRHSGGRVIRRFAVTDTVSRLFEWLKAEPFEGKEGVRFELKSMPAGTDLIGELGKTIEEAGLKQGTVMIEFVED

SEQ ID NO: 11931 - DNA, 2636 bp, Muscodor strobelii
  misc_feature: SGI EST ID NO. CUFF.28565.1
  misc_feature: Variant of the nucleotide sequence at SEQ ID NO 11929
aaacagactgccttacttaaaaaacaacttatgaggtgatgacattgcaacacaagcaaactgtcagactcaggtgcattcaagtagacacagggaaggcgggctggcaagttttccagtcactctttcgtctcatccgtgcggacgtaccttaccacctaccatttcgatctcggacagagctcggaagctccctcatcaacacgatctaggtcaacgtgctgtctcccgccatttatgcactagcatccgaccgcaaaccgcgtttctcttatctggtgttctattcatcacattattctcttcttgtctactctatcttgaggcattcattagaatacttgtcgataaggtagtgctagtttagctactacactgcgagataccgttatctaaggtacttaggccagccatctcgccgcctaccaaccgtgagaacccacgcctttgggcttgtcaccactcgataaggtagctcttgccggccactattatcaaccgaccttgattagagtctagatatcgcttcgatactacttctctttaagtctgccgcgtccgagcgttgcccaagatggacgacgatgtgacccagttcatgatgatcacgggcgtcgagtcggagcgggtcgctcgtggctaccttcagatctccggcaacgtcatcgcccaggccatcgagacattctatgataatccggagctggtctccagcttcaacgctcccagcgaagcacagccctcttccgccacacaagctccccagacgagccgaccagctcgcatcggccgcgaggatgccagcggtactattcatatcgactccgactccgatgagttcgatgtccccatgaccgacgacgataatgacgagtcggacaatgtcgctgccatcgcgcggaccgcccaagaagaagaagatgccgccatggcgaggcggttacaagaggagctctatggctctggtgcaggcgacgctggcgcagacgacggtgtcagggcccctattgcacagacaacggagactttggcgggacccggcagcatgccatggagcttagaggacgagcgagaggctgcggtgctggagcagctccaagcccgccgtaatagacagcaaagacgaggcaagtccactagccaccgtgccctttatcaccaatactaacctatcttctagctcaacctcgcaatcctttcgaccagggcccctcgatatgggacgacccagatgcacccccgatacccaatagtacgcgaccgggagcttcggcagctggagaaggagctacatcgcgagctgcccacttgcgcgacctcttccgtccgccacatgagttgatatctcccttcacatgggacgaggcacgcgacgagggcaaggaggagaagaagtggatcatggttaatctccaggacatggacaacttcaactgccagatattgaatcgagacttctggaaggacgagaacattgaagctctggttaaggaacatttcatcttcttgcagtacgacaaacgagagcccagatcccagtcattcatccagttctatttccccaacgaggcccacgaaaacgacgaaaattaccctcacatctccattgttgatcccagaaccggcgaacaggtcaaggtctggtcaggattgccttttcccaaggcaggcgagttctatcaagacgtcattgagtttcttgatcggtacagcctggctgccaacagcaaaaaccctgtgtccaagtccaagccccaggccaaacaggtcgatgtcggtcgcttgacagaagacgagatgctccagctggccatgcagaacagcttggacgccaacggtggttcttcagggtcaagtgttcaggatcctgacatgctgaccaaatcgggccgtggcatggacaagggcaaaggaagtgaagcagataacgccgtcgatcttactgacaactctaacgagactgcgggttcgatcgagtctgaattcgcacggattccctccaaccatcctcacgtggagccagagaacaaccctgcaacgactactagaatacagttcagacactctggcggacgtgtcattcgtcgctttgccgtcacggataccgtcagccgcttgttcgagtggctgaaagcagagccatttgagggcaaggaaggtgttcggttcgagctcaagtcgatgccggccgggacagacctgatcggcgagctgggtaagacgatcgaagaggcaggtctgaagcagggcaccgttatgatcgagtttgttgaggattgagggtcgatctgtaagacggcacagtgtggagatcctggaagatggggccttaacagctttactgcttttaacggggcttcaagaatcatattagcattggggagtggctattcatctatagataggcgtcgtggcagcttgacttttccctcgctggagttccggtagtattcccctttgcactcccgagaccttcgtgccgacgtgattgcataccatagttgtaccgagtgttaggagcttcaatagcccgcttgccagcccggctcgtatagaaatcattctttgcttctgtcgcaaggtacatgtttggtgacttcaggggctgttattttccgggcgagcgttcgatggcc

SEQ ID NO: 11932 - DNA, 564 bp, Muscodor strobelii
  misc_feature: SGI cDNA ID NO. 563850
  misc_feature: Encodes the peptide sequence at SEQ ID NO 11933
atgccgtccaacacctcgcccgtccctcagtgggtagccgacctcaagtcgcctccgccatccaaatccaagaacagctccatacccgaccccccaggctatccctctcactccggatccgtatcaaagaaacaaacatccaaagacgccaacaaatccctcccacgaaagcagcccacgccctcagaaatggacaccctcaaactaaaaaaagcctgggaagtcgccctcgcacccgtcaagtccctccccatgacattcataatgatgtacatgtccgggaactcgctacaaatcttcagcataatgatggtctacatggcgttcaagaaccccatcatgggcctcataacgacggggcaagccttcgagcgcttcgagagcgacacgaacaaaggcaagatgctacaggtcaagctcgcgtacgtcgctatgcagatcgttgccctcgctgtgggcatctggaaggttaatactatggggttgttaccgacgacgagatcggattggttggcttgggaggcgcagagggagccgttggagtttgctgttacgccgctttga

SEQ ID NO: 11933 - protein, 187 aa, Muscodor strobelii
  misc_feature: SGI Peptide ID NO. 563850
  misc_feature (21)..(187): Pfam Id: PF06417 Pfam Desc: Domain of function (DUF1077)
  misc_feature (22)..(187): Pfam Id: PF06417 Pfam Desc: Domain of function (DUF1077)
  misc_feature (1)..(184): NCBI GI: 171683611 Blast Desc: protein product [Podospora anserina] gi|170941765|emb|CAP67419.1| protein product [Podospora anserina]
  misc_feature (4)..(187): NCBI GI: 39944280 Blast Desc: MGG_04151 [Magnaporthe grisea 70-15] gi|145014885|gb|EDJ99453.1| MGG_04151 [Magnaporthe grisea 70-15]
  misc_feature (1)..(187): NCBI GI: 256726938 Blast Desc: [Nectria haematococca mpVI 77-13-4]
  misc_feature (11)..(184): NCBI GI: 156049513 Blast Desc: SS1G_08463 [Sclerotinia sclerotiorum 1980] gi|154692862|gb|EDN92600.1| SS1G_08463 [Sclerotinia sclerotiorum 1980]
  misc_feature (9)..(187): NCBI GI: 261359823 Blast Desc: transmembrane protein [Verticillium albo-atrum VaMs.102]
  misc_feature (9)..(187): NCBI GI: 46136441 Blast Desc: FG09736.1 [Gibberella zeae PH-1]
  misc_feature (7)..(174): NCBI GI: 164429208 Blast Desc: NCU05231 [Neurospora crassa OR74A] gi|157072982|gb|EAA32655.2| conserved [Neurospora crassa OR74A]
  misc_feature (2)..(187): NCBI GI: 238493305 Blast Desc: ER membrane DUF1077 domain protein, [Aspergillus flavus NRRL3357] gi|220696383|gb|EED52725.1| ER membrane DUF1077 domain protein, [Aspergillus flavus NRRL3357]
  misc_feature (2)..(183): NCBI GI: 71001374 Blast Desc: ER membrane DUF1077 domain protein [Aspergillus fumigatus Af293] gi|66853006|gb|EAL93330.1| ER membrane DUF1077 domain protein, [Aspergillus fumigatus Af293] ER membrane DUF1077
  misc_feature (10)..(183): NCBI GI: 145252520 Blast Desc: An16g04640 [Aspergillus niger] gi|134083325|emb|CAK42892.1| protein product [Aspergillus niger]
MPSNTSPVPQWVADLKSPPPSKSKNSSIPDPPGYPSHSGSVSKKQTSKDANKSLPRKQPTPSEMDTLKLKKAWEVALAPVKSLPMTFIMMYMSGNSLQIFSIMMVYMAFKNPIMGLITTGQAFERFESDTNKGKMLQVKLAYVAMQIVALAVGIWKVNTMGLLPTTRSDWLAWEAQREPLEFAVTPL

SEQ ID NO: 11934 - DNA, 2419 bp, Muscodor strobelii
  misc_feature: SGI EST ID NO. CUFF.28620.1
  misc_feature: Variant of the nucleotide sequence at SEQ ID NO 11932
aattcaacctacatcttcttgatttcgagattcggtaattgcatacaggcgatgacgtcgggaaataaggagaccatctcattgttgctcatggtcatgttggccacaatcttcttcagggccgtctttttgctcgtgaagttcttatccttcttgctgccgccgttaagctcgaggcgcagctcggcgactttgccctgtatagtcaaacgtcgtgagccatagtctggaggtacgtaggcgagaaacatggccatgatggacgatgctgggatgggtttgcatttcttcttggacacgggggatcgatcgcgcagagtttggagggtatttggtaggcttcctctcggacattcagccagtccttgacatcatcgtgcgagtcggaggaccgaacagcaggcgagtggatggtggtcgccgagagaaatacagtggagggtagaggatggatggttgatcaagtaaggtgagacgagtaaagagtcacagaattgcccaggcaacaaaggtagttcaaacacagcacaaggaaattcatctagacatgtccaagctacagatgaggagagtacgaatgaagatgcttactcgagcgaagagcttcgagtcccctgtctgggtgctcgaggacgacatgttgacggccaacctgctgctcgtgtagggggaggggctcggcacgtcaagagtgtctcgggttggcagagatagctgacagattcagaaccggaatactggaatttctagcgtggtcgtcgcatgcgtcaggggacgtggcggttgtccaatcgcgatcaaggctatcaggatgcgacgggctgtggaggggtcggtcgacagtagtcacatgcgcatcgcccgacagctctattcgtcggacacaggcttcggggcgtggtggctttcttttttgtacaaatcaaaaagtcggacgacgagagagctgaggtcagataacttttggtaatggtatgtacaggccgcagtttggagtcgtcgagagaaggtaacgcaagtcgatgtcgatgaaggggtgctggaatcgagatacagtcgcaaattctccctgcatgagagatgcgatgcgatggtacagtacggtttcgagaagatcaagaaacgcagatgcgcttggcgatatgcacactcgtgttttcgtgaaccgacgcagggggggcagacatgcagctcgagagctaccttgggtattaaacgtggaatagatatgcccccagacgtcagctatgcatcccgtctctaatccgtacctacctgataatctccatcggcgctacgctttagggccgagctaaggcgcgggcgagaaaactgagagctgagaataggggcccgccgtccattgaaggtttccactgtagcgggggatcgctcccaagcaatcccttgtccgacggtccacaccggccatcgctcatacctacctccttacatacgcctcatcgacatcctacctacttgcaccaccgacatcttcgacaattacagagaacaccgctataacaccgctacacctaacgtctccgatcttcgttccgatacctagagctccttcttgacacgatccgacgatgccgtccaacacctcgcccgtccctcagtgggtagccgacctcaagtcgcctccgccatccaaatccaagaacagctccatacccgaccccccaggctatccctctcactccggatccgtatcaaagaaacaaacatccaaagacgccaacaaatccctcccacgaaagcagcccacgccctcagaaatggacaccctcaaactaaaaaaagcctgggaagtcgccctcgcacccgtcaagtccctccccatgacattcataatgatgtacatgtccgggaactcgctacaaatcttcagcataatgatggtctacatggcgttcaagaaccccatcatgggcctcataacgacggggcaagccttcgagcgcttcgagagcgacacgaacaaaggcaagatgctacaggtcaagctcgcgtacgtcgctatgcagatcgttgccctcgctgtgggcatctggaaggttaatactatggggttgttaccgacgacgagatcggattggttggcttgggaggcgcagagggagccgttggagtttgctgttacgccgctttgatggatggataaatctattagaatgtgatatttctgtttactcgctgagatagcatcatccatatcataaaatcgacttacgaaccaagtttcgatgcgccgagatcctatatataatcagtatcaggattatctttgttttcccgaaactcgccctgggtgtagtacaagcgttgatgaatttccggtcatggttttctcggcatagggcgtagagtcaaggtgctttgccgtgcacttttaggtaggctagtgacactgaca

SEQ ID NO: 11935 - DNA, 2160 bp, Muscodor strobelii
  misc_feature: SGI cDNA ID NO. 563851
  misc_feature: Encodes the peptide sequence at SEQ ID NO 11936
atggccatgtttctcgcctacgtacctccagactatggctcacgacgtttgactatacagggcaaagtcgccgagctgcgcctcgagcttaacggcggcagcaagaaggataagaacttcacgagcaaaaagacggccctgaagaagattgtggccaacatgaccatgagcaacaatgagatggtctccttatttcccgacgtcatcgcctgtatgcaattaccgaatctcgaaatcaagaagatgtgctttctatttctcgttaactattcaagaatgcgaccagaaatggccgtgaaagctattcccgtattgcaacaggatatggatgacccaaatcctcttgtcagagccttggcgcttcgaacgatgtcgtacgttcacgtccgcgagtttgtggaatcgacagtgccacttgtaaagcgactccttcgggatccagacccttacgtgcgaaagacggctgcctattgcgtcgcgaagctgtacgaccatgataagttgatggtggaacagtcagatttgatagagaggttaaatcgactattgagagacgataacccgaccgtcgtcgccagcgcactcgctagtttgatggacatctgggaacgtagtgagaccatcaaactcacactggattacagcaatgcctctaaaatggtggctattctgcccgactgttcagaatggggtcagacgtatatcttggaggctcttatgtcatacgtcccccaagaatcaggcgaagcaaccctgcttgccgagcgcatagcgccacggctctcacattccaactctgctgtagttttgacatgtatacgagtcatattgtacttgatgaactacattgcggacgagaagcagatatcagcgttatgccggaaactctcaccacccttagtcacgctcttggcaaaagggtcagaagtccaatatctggcccttcgaaatgcattactcatccttcaacgccggccagatgtcctgcggaatgatattcgtgtgttcttctgcaaatacaatgacccgatttacgtcaaggttacaaagctcgagctcatcttcatgctggcaagcgagaagaacatcgacgaggttctgacagagctacgagaatacgcaacagaagtcgatgtccactttgttcggaaagcagtacgcgccatcggaaagctggccattaagattgagccggcagcccgtcggtgcatcaacctgcttctcgaactagtcgcgacgaaagtgccctacatcgtccaggaagcaacggtggtgatccgcaacatcttccggaaataccccaaccagtatgaatccatcattggcgtgctatgcgagcatctagattctctcgacgagcccgaggcaaaagcagcaatggtctgggtaatcggtcaatacgcagaccgcatcgagaatagcgacgccctactagaagacttcctctactccttcgccgaagaaccagttgaagtccaactcgccctcctaaccgcaacggtaaaactcttcatccagcgtccaacaaagggccaagacctcgtgccccgagtcctcaaatgggcaacggaagaaacagataacccagacttgcgggacagagcatacatgtactggcgcctcctatccacagacgtcaacctcgccaagcaaatcgtcatgggcgaaaaaccgcccatcaccgcggaatcagaaaaactcgacccccagactctggaagaaatgtgtctcaacgtcggcaccctcgcgacgatctacctaaaacccgtccaaacagtcttccgcagcgcccgccccagaaaactcgcagactccccagccctacagaaggcctccctccccacatcccgcaacctccccgccttcgacgccaacaagtccctctccatgttcggcatgggcggccagcccgccgtcgtccgcccctcgcagcaggctcagctgcagggccaggagaacatggcccacgccgtgagtgacgccgatgcctacttcgccggcataggcagccagcagatggccgccatgagcatcgacggcgacgactcgttccacggccacggcaccgaagcaggctatgtcgtcaatcagttcgcacctcagcaagtcctgcagccggcccagggtgtcgggagcaacggagacctgctgatgctgtaa

SEQ ID NO: 11936 - protein, 719 aa, Muscodor strobelii
  misc_feature: SGI Peptide ID NO. 563851
  misc_feature (130)..(166): Pfam Id: PF02985 Pfam Desc: HEAT repeat
  misc_feature (22)..(546): Pfam Id: PF01602 Pfam Desc: Adaptin N terminal region
  misc_feature (13)..(719): NCBI GI: 46136439 Blast Desc: FG09735.1 [Gibberella zeae PH-1]
  misc_feature (20)..(718): NCBI GI: 116194340 Blast Desc: conserved [Chaetomium globosum CBS 148.51] gi|88179681|gb|EAQ87149.1| conserved [Chaetomium globosum CBS 148.51]
  misc_feature (3)..(718): NCBI GI: 171683613 Blast Desc: protein product [Podospora anserina] gi|170941766|emb|CAP67420.1| protein product [Podospora anserina]
  misc_feature (13)..(702): NCBI GI: 164429210 Blast Desc: NCU05232 [Neurospora crassa OR74A] gi|157072983|gb|EAA32656.2| NCU05232 [Neurospora crassa OR74A]
  misc_feature (3)..(719): NCBI GI: 156049515 Blast Desc: conserved [Sclerotinia sclerotiorum 1980] gi|154692863|gb|EDN92601.1| conserved [Sclerotinia sclerotiorum 1980]
  misc_feature (3)..(719): NCBI GI: 154317607 Blast Desc: conserved [Botryotinia fuckeliana B05.10] gi|150844329|gb|EDN19522.1| conserved [Botryotinia fuckeliana B05.10]
  misc_feature (1)..(718): NCBI GI: 169620668 Blast Desc: SNOG_13536 [Phaeosphaeria nodorum SN15] gi|160704085|gb|EAT78983.2| SNOG_13536 [Phaeosphaeria nodorum SN15]
  misc_feature (16)..(718): NCBI GI: 189194061 Blast Desc: AP-2 complex subunit beta [Pyrenophora tritici-repentis Pt-1C-BFP] gi|187978933|gb|EDU45559.1| AP-2 complex subunit beta [Pyrenophora tritici-repentis Pt-1C-BFP]
  misc_feature (13)..(719): NCBI GI: 258575813 Blast Desc: conserved [Uncinocarpus reesii 1704] gi|237902354|gb|EEP76755.1| conserved [Uncinocarpus reesii 1704]
  misc_feature (13)..(719): NCBI GI: 242787167 Blast Desc: AP-2 adaptor complex subunit beta, [Talaromyces stipitatus ATCC 10500] gi|218721096|gb|EED20515.1| AP-2 adaptor complex subunit beta, [Talaromyces stipitatus ATCC 10500]
MAMFLAYVPPDYGSRRLTIQGKVAELRLELNGGSKKDKNFTSKKTALKKIVANMTMSNNEMVSLFPDVIACMQLPNLEIKKMCFLFLVNYSRMRPEMAVKAIPVLQQDMDDPNPLVRALALRTMSYVHVREFVESTVPLVKRLLRDPDPYVRKTAAYCVAKLYDHDKLMVEQSDLIERLNRLLRDDNPTVVASALASLMDIWERSETIKLTLDYSNASKMVAILPDCSEWGQTYILEALMSYVPQESGEATLLAERIAPRLSHSNSAVVLTCIRVILYLMNYIADEKQISALCRKLSPPLVTLLAKGSEVQYLALRNALLILQRRPDVLRNDIRVFFCKYNDPIYVKVTKLELIFMLASEKNIDEVLTELREYATEVDVHFVRKAVRAIGKLAIKIEPAARRCINLLLELVATKVPYIVQEATVVIRNIFRKYPNQYESIIGVLCEHLDSLDEPEAKAAMVWVIGQYADRIENSDALLEDFLYSFAEEPVEVQLALLTATVKLFIQRPTKGQDLVPRVLKWATEETDNPDLRDRAYMYWRLLSTDVNLAKQIVMGEKPPITAESEKLDPQTLEEMCLNVGTLATIYLKPVQTVFRSARPRKLADSPALQKASLPTSRNLPAFDANKSLSMFGMGGQPAVVRPSQQAQLQGQENMAHAVSDADAYFAGIGSQQMAAMSIDGDDSFHGHGTEAGYVVNQFAPQQVLQPAQGVGSNGDLLML

SEQ ID NO: 11937 - DNA, 5268 bp, Muscodor strobelii
  misc_feature: SGI EST ID NO. CUFF.28619.0
  misc_feature: Variant of the nucleotide sequence at SEQ ID NO 11935
ggaagaagaaatagagtatttcatcaatcttgtcagtgtcactagcctacctaaaagtgcacggcaaagcaccttgactctacgccctatgccgagaaaaccatgaccggaaattcatcaacgcttgtactacacccagggcgagtttcgggaaaacaaagataatcctgatactgattatatataggatctcggcgcatcgaaacttggttcgtaagtcgattttatgatatggatgatgctatctcagcgagtaaacagaaatatcacattctaatagatttatccatccatcaaagcggcgtaacagcaaactccaacggctccctctgcgcctcccaagccaaccaatccgatctcgtcgtcctatccatccatcaagaattagcaaaaaaagaccctcaatactcccactcactcactcatgggaaaaaaaagactcacggtaacaaccccatagtattaaccttccagatgcccacagcgagggcaacgatctgcatagcgacgtacgcgagcttgacctgtagcatcttgcctttgttcgtgtcgctctcgaagcgctcgaaggcttgccccgtcgttatgaggcccatgatggggttcttgaacgccatgtagaccatcattatgctgaagatttgtagcgagttcccggacatgtacatcattatgaatgtcatggggagggacttgacgggtgcgagggcgacttcccaggctttttttagtttgagggtgtccatttctgagggcgtgggctgctttcgtgggagggatttgttggcgtctttggatgtttgtttctttgggtggtgttagtttggcgtaaaaggaatttggtagggcggtgggagttgttgtattgtacctttgatacggatccggagtgagagggatagcctggggggtcgggtatggagctgttcttggatttggatggcggaggcgacttgaggtcggctacccactgagggacgggcgaggtgttggacggcatcgtcggatcgtgtcaagaaggagctctaggtatcggaacgaagatcggagacgttaggtgtagcggtgttatagcggtgttctctgtaattgtcgaagatgtcggtggtgcaagtaggtaggatgtcgatgaggcgtatgtaaggaggtaggtatgagcgatggccggtgtggaccgtcggacaagggattgcttgggagcgatcccccgctacagtggaaaccttcaatggacggcgggcccctattctcagctctcagttttctcgcccgcgccttagctcggccctaaagcgtagcgccgatggagattatcaggtaggtacggattagagacgggatgcatagctgacgtctgggggcatatctattccacgtttaatacccaaggtagctctcgagctgcatgtctgccccccctgcgtcggttcacgaaaacacgagtgtgcatatcgccaagcgcatctgcgtttcttgatcttctcgaaaccgtactgtaccatcgcatcgcatctctcatgcagggagaatttgcgactgtatctcgattccagcaccccttcatcgacatcgacttgcgttaccttctctcgacgactccaaactgcggcctgtacataccattaccaaaagttatctgacctcagctctctcgtcgtccgactttttgatttgtacaaaaaagaaagccaccacgccccgaagcctgtgtccgacgaatagagctgtcgggcgatgcgcatgtgactactgtcgaccgacccctccacagcccgtcgcatcctgatagccttgatcgcgattggacaaccgccacgtcccctgacgcatgcgacgaccacgctagaaattccagtattccggttctgaatctgtcagctatctctgccaacccgagacactcttgacgtgccgagcccctccccctacacgagcagcaggttggccgtcaacatgtcgtcctcgagcacccagacaggggactcgaagctcttcgctcgaggcaaagtcgccgagctgcgcctcgagcttaacggcggcagcaagaaggataagaacttcacgagcaaaaagacggccctgaagaagattgtggccaacatgaccatgagcaacaatgagatggtctccttatttcccgacgtcatcgcctgtatgcaattaccgaatctcgaaatcaagaagatgtgctttctatttctcgttaactattcaagaatgcgaccagaaatggccgtgaaagctattcccgtattgcaacaggatatggatgacccaaatcctcttgtcagagccttggcgcttcgaacgatgtcgtacgttcacgtccgcgagtttgtggaatcgacagtgccacttgtaaagcgactccttcgggatccagacccttacgtgcgaaagacggctgcctattgcgtcgcgaagctgtacgaccatgataagttgatggtggaacagtcagatttgatagagaggttaaatcgactattgagagacgataacccgaccgtcgtcgccagcgcactcgctagtttgatggacatctgggaacgtagtgagaccatcaaactcacactggattacagcaatgcctctaaaatggtggctattctgcccgactgttcagaatggggtcagacgtatatcttggaggctcttatgtcatacgtcccccaagaatcaggcgaagcaaccctgcttgccgagcgcatagcgccacggctctcacattccaactctgctgtagttttgacatgtatacgagtcatattgtacttgatgaactacattgcggacgagaagcagatatcagcgttatgccggaaactctcaccacccttagtcacgctcttggcaaaagggtcagaagtccaatatctggcccttcgaaatgcattactcatccttcaacgccggccagatgtcctgcggaatgatattcgtgtgttcttctgcaaatacaatgacccgatttacgtcaaggttacaaagctcgagctcatcttcatgctggcaagcgagaagaacatcgacgaggttctgacagagctacgagaatacgcaacagaagtcgatgtccactttgttcggaaagcagtacgcgccatcggaaagctggccattaagattgagccggcagcccgtcggtgcatcaacctgcttctcgaactagtcgcgacgaaagtgccctacatcgtccaggaagcaacggtggtgatccgcaacatcttccggaaataccccaaccagtatgaatccatcattggcgtgctatgcgagcatctagattctctcgacgagcccgaggcaaaagcagcaatggtctgggtaatcggtcaatacgcagaccgcatcgagaatagcgacgccctactagaagacttcctctactccttcgccgaagaaccagttgaagtccaactcgccctcctaaccgcaacggtaaaactcttcatccagcgtccaacaaagggccaagacctcgtgccccgagtcctcaaatgggcaacggaagaaacagataacccagacttgcgggacagagcatacatgtactggcgcctcctatccacagacgtcaacctcgccaagcaaatcgtcatgggcgaaaaaccgcccatcaccgcggaatcagaaaaactcgacccccagactctggaagaaatgtgtctcaacgtcggcaccctcgcgacgatctacctaaaacccgtccaaacagtcttccgcagcgcccgccccagaaaactcgcagactccccagccctacagaaggcctccctccccacatcccgcaacctccccgccttcgacgccaacaagtccctctccatgttcggcatgggcggccagcccgccgtcgtccgcccctcgcagcaggctcagctgcagggccaggagaacatggcccacgccgtgagtgacgccgatgcctacttcgccggcataggcagccagcagatggccgccatgagcatcgacggcgacgactcgttccacggccacggcaccgaagcaggctatgtcgtcaatcagttcgcacctcagcaagtcctgcagccggcccagggtgtcgggagcaacggagacctgctgatgctgtaatgtagataatggcaattaattgtacaaaatttcacgtatttagtttcgctgttctaggactccgagtcgcatagtcactcatctatctctcaaggtctgcgtgtcagaaagcgagcaggtaaggaacatgacacgctgaggaaaaccgagcgcaacagtgtgagcctagaacatgaacgattctcactgtaccaaagccctatggacgaatgagaaattgtccctaaccatgcagggtggttcatatgtaacaagtcgcctggaagagacaccatagacgaatgtatgctaatttcagcattattatttctggacacggggcgcggatgtgataattgcagctgagtaacatgaatcattttcattcatagtactctgttaatttcgtgatgactttcagttgccacaaattacaagttataggcctctcagagcattgtctcacaacttcgtctccggcagccttgcatctcgctgcacactgtacatgcttgaacttccaaaatatctcccccgaatctgccattatctgtccccatcgaaggctatactgatgtagggagatgggaaataggttaaatcccgaatatcaggtgtcgtcgacaggagatcatgctgtcatattcctgtgtgtatcgtcggctggtgttgctctgcttagatcgcacccacgatgccaacaaagaacatgagaccaaacatacaaacgtcgacctcggcaaaagcgatacctgcattggtatccgcaattggactggctgaagccgttggggctgcagttgaggggggcgagggatccgcgggaatcgaggtggccgaggtggccgagatggccgaagtggtcgaagtcaacgggtttccaaacgacaaggtagaaagtttggaagtgacggggagctcggaaggtacggaagtggttgggctgatgttagtagccaaagtcccggcagaagttgtgatcgcagtgctgctggacggcgtggagacaacattggtgtaaatgctggttgtgcaagaagaagaggagccctggggaccattaccagcaccggagcctggagtgctcgacccagccggtccactgggagttgtcgatgcggcgggacctggtgcttgagtggcgggccctgaccctggagtagttaatcctccacttccatttccgcc

SEQ ID NO: 11938 - DNA, 2037 bp, Muscodor strobelii
  misc_feature: SGI cDNA ID NO. 563852
  misc_feature: Encodes the peptide sequence at SEQ ID NO 11939
atgaagttgttctcaggattgctcttcggggccctcttgggcgtctgccatgttggcatagccactgacttctctgaccacgaactggatgtcatcgttcctactcaggctctatccaccttcaccagccatggcaccgtcttcgttcttgccaagccaactgatgagaagcgggacgtaattgcagatgaacctcctgccggacccagcggtgcttacggtggcggctctgatggtggtgtcggccctgagacccaacagccttccaactctggcaaccagcaacctaccaacactggaggacagcaaccttccaatccttccggtcaacagtctcctgacaccgcaggtcagcagcccaccaactcggcttttcctacaccgggacctactctgcccagcggcgcctacccttacggccagccccctaactctgctggcccaggtggacagcagtctcctggtccaggaggtcaacagtcccagggccctaccggccagcaatctcctgcgacttccccctcagcctcggccgttgttgtcgtctcaccagtcccagtttccgtcactgttctggagactcaaacgatcagcctagcctcagctcctaatcagccatcatctggtcctggtgagccctcaaccggtccaaatggtccttcgtctaaccccaacggtcccaacggtcccggtggttcatcttcgggtcccaatggcccttctggacctggcagtccatcgtctggcccaggtaatccatcgtctctacccactggcccctctggtccaagcggtccgtcctccggccctaatggttcgtcgagtcccaatggtccatcatctggtcctggcggttcgggttcaggctccaacccgtcatccggtccaaatgcacagtcccctagccccaacgggccagcttccacaccatgtgacactgacactggttcttggtctcctttatctgttccctacactcaacagcctcagcctaccacattcgtcactgttccaggctctccaggtgcatcatctgctcccgctaattcgggtagcccaacggttgtcgtcgttacggttcccggctctggtcccgaaacgactcccggtgtcaatggaggatccgctgtccccggaacagagccagcaacccaaacatcaggtcccgggactcctataactcctggtggaaaccctgggactcaagcaccaggttccggtcctgcaacatctcctggcggaaaccccggaactcaagcaccgggttctgggcccgcaacatctcctggcggaaacggcggatcaactgttcctggatctgggcctgccactcaaacccctggttccggtgcacctacaaatcctggaggtagcaccgggtcaagtgcctatggaacagcccctggaactcaagcaccaggttctggtcccgccacttctcctggcggtaacgaaggatcaagcgtccccggatcaaaccccgccactcaaacaccaggcgcaggtcctagctctgcaacatctcctggcggaaatggaagtggaggattaactactccagggtcagggcccgccactcaagcaccaggtcccgccgcatcgacaactcccagtggaccggctgggtcgagcactccaggctccggtgctggtaatggtccccagggctcctcttcttcttgcacaaccagcatttacaccaatgttgtctccacgccgtccagcagcactgcgatcacaacttctgccgggactttggctactaacatcagcccaaccacttccgtaccttccgagctccccgtcacttccaaactttctaccttgtcgtttggaaacccgttgacttcgaccacttcggccatctcggccacctcggccacctcgattcccgcggatccctcgcccccctcaactgcagccccaacggcttcagccagtccaattgcggataccaatgcaggtatcgcttttgccgaggtcgacgtttgtatgtttggtctcatgttctttgttggcatcgtgggtgcgatctaa

SEQ ID NO: 11939 - protein, 678 aa, Muscodor strobelii
  misc_feature: SGI Peptide ID NO. 563852
  misc_feature (101)..(554): NCBI GI: 156350148 Blast Desc: NEMVEDRAFT_v1g221080 [Nematostella vectensis] gi|156208611|gb|EDO30063.1| [Nematostella vectensis]
  misc_feature (294)..(554): NCBI GI: 156350148 Blast Desc: NEMVEDRAFT_v1g221080 [Nematostella vectensis] gi|156208611|gb|EDO30063.1| [Nematostella vectensis]
  misc_feature (204)..(497): NCBI GI: 156350148 Blast Desc: NEMVEDRAFT_v1g221080 [Nematostella vectensis] gi|156208611|gb|EDO30063.1| [Nematostella vectensis]
  misc_feature (334)..(550): NCBI GI: 4097231 Blast Desc: multiple banded antigen [Ureaplasma urealyticum]
  misc_feature (358)..(550): NCBI GI: 4097231 Blast Desc: multiple banded antigen [Ureaplasma urealyticum]
  misc_feature (358)..(550): NCBI GI: 4097231 Blast Desc: multiple banded antigen [Ureaplasma urealyticum]
MKLFSGLLFGALLGVCHVGIATDFSDHELDVIVPTQALSTFTSHGTVFVLAKPTDEKRDVIADEPPAGPSGAYGGGSDGGVGPETQQPSNSGNQQPTNTGGQQPSNPSGQQSPDTAGQQPTNSAFPTPGPTLPSGAYPYGQPPNSAGPGGQQSPGPGGQQSQGPTGQQSPATSPSASAVVVVSPVPVSVTVLETQTISLASAPNQPSSGPGEPSTGPNGPSSNPNGPNGPGGSSSGPNGPSGPGSPSSGPGNPSSLPTGPSGPSGPSSGPNGSSSPNGPSSGPGGSGSGSNPSSGPNAQSPSPNGPASTPCDTDTGSWSPLSVPYTQQPQPTTFVTVPGSPGASSAPANSGSPTVVVVTVPGSGPETTPGVNGGSAVPGTEPATQTSGPGTPITPGGNPGTQAPGSGPATSPGGNPGTQAPGSGPATSPGGNGGSTVPGSGPATQTPGSGAPTNPGGSTGSSAYGTAPGTQAPGSGPATSPGGNEGSSVPGSNPATQTPGAGPSSATSPGGNGSGGLTTPGSGPATQAPGPAASTTPSGPAGSSTPGSGAGNGPQGSSSSCTTSIYTNVVSTPSSSTAITTSAGTLATNISPTTSVPSELPVTSKLSTLSFGNPLTSTTSAISATSATSIPADPSPPSTAAPTASASPIADTNAGIAFAEVDVCMFGLMFFVGIVGAI

SEQ ID NO: 11940 - DNA, 1695 bp, Muscodor strobelii
  misc_feature: SGI EST ID NO. CUFF.28281.1
  misc_feature: Variant of the nucleotide sequence at SEQ ID NO 11938
gtttatattgtcttatagagagcagcatctacgctccttgctgctcgagattgccactagaaaaatccccgtccacacaccgtaactatatagaatgcaattgtatactatcctatcattccgtaatgagagtcggatgcatatcaggaggtacgacgatcttgtgatgcagacagctagcaaatagcgattccgacaacttgaagtatttggcaaccacaggcattgtgatattcgtgatgtgttcgtcgcaccttcccacgatctgaaccttgaacatcacctccttcctcctcttgtcgcaagacaagacgtacttgccttctgaaaggtcttcaagctgccaaaatttcttttctgtttcaaaccctctcccacaatcagacccccgtaattttccccttcttctcgtctcatctcatctccaaccatccagcttcattgtcatccaccattctcctatcccgccgtcatcatccatcctccatttccgattgtcgggagaacactcattgacgtccatatttccttattgcccgtctctcgttcagttcccagccgatagaagtaatatctcatccaactgcatttcctgtcaactcacaacggccaaaatgaagttgttctcaggattgctcttcggggccctcttgggcgtctgccatgttggcatagccactgacttctctgaccacgaactggatgtcatcgttcctactcaggctctatccaccttcaccagccatggcaccgtcttcgttcttgccaagccaactgatgagaagcgggacgtaattgcagatgaacctcctgccggacccagcggtgcttacggtggcggctctgatggtggtgtcggccctgagacccaacagccttccaactctggcaaccagcaacctaccaacactggaggacagcaaccttccaatccttccggtcaacagtctcctgacaccgcaggtcagcagcccaccaactcggcttttcctacaccgggacctactctgcccagcggcgcctacccttacggccagccccctaactctgctggcccaggtggacagcagtctcctggtccaggaggtcaacagtcccagggccctaccggccagcaatctcctgcgacttccccctcagcctcggccgttgttgtcgtctcaccagtcccagtttccgtcactgttctggagactcaaacgatcagcctagcctcagctcctaatcagccatcatctggtcctggtgagccctcaaccggtccaaatggtccttcgtctaaccccaacggtcccaacggtcccggtggttcatcttcgggtcccaatggcccttctggacctggcagtccatcgtctggcccaggtaatccatcgtctctacccactggcccctctggtccaagcggtccgtcctccggccctaatggttcgtcgagtcccaatggtccatcatctggtcctggcggttcgggttcaggctccaacccgtcatccggtccaaatgcacagtcccctagccccaacgggccagcttccacaccatgtgacactgacactggttcttggtctcctttatctgttccctacactcaacagcctcagcctaccacattcgtcactgttccaggctctccaggtgcatcatctgctcccgctaattcgggtagcccaacggttgtcgtcgttacggttc

SEQ ID NO: 11941 - DNA, 729 bp, Muscodor strobelii
  misc_feature: SGI cDNA ID NO. 563853
  misc_feature: Encodes the peptide sequence at SEQ ID NO 11942
atggctgacaccgctgcgcctcccactgttggtggtgatcagggacccaagcaagagcgtttgtctttccaacagcccgctggtgacgtagagatggaagacctttccagcaccctccctcaatcctccaatgcagagggctcaacatcacaagctccgcaatgcaaggacgagcccataccggttcccgagaaggacaagtctgccgccgaatcgtcgacatccgcacgacccgacgactcaatggcccccgagaacgaggatctgacgatagatccggcggatccagtggatgagggccaatcagccgaccaggacccaaacatcaacatcatgcttcagctgacaaacggcgcccgtcatccgttccgaattgacgagaaatatcttgccaaacggaacgtcaacgtcacgagcaagacggaggatgggagggtcgagctcgcaagtattacagtatacacactcaaagaactcattctgcgagattggcgtagagaatgggaagaaccaccaagagagccgaccagtatacgcctgatccattttgggaagctgttggaggataggaatcagctgagtcactaccattttaagaccacgggtatcaactgggtccacctgacagtcaagcctcaggatctgcttgatgaagaagaaggtggcaagaaggtcagagactcgtccggctcacatcaagggagaagtggatgctgtgtcattttatga

SEQ ID NO: 11942 - protein, 242 aa, Muscodor strobelii
  misc_feature: SGI Peptide ID NO. 563853
  misc_feature (83)..(242): NCBI GI: 261359826 Blast Desc: conserved [Verticillium albo-atrum VaMs.102]
  misc_feature (42)..(242): NCBI GI: 256727506 Blast Desc: [Nectria haematococca mpVI 77-13-4]
  misc_feature (13)..(242): NCBI GI: 39944274 Blast Desc: MGG_04148 [Magnaporthe grisea 70-15] gi|145014882|gb|EDJ99450.1| MGG_04148 [Magnaporthe grisea 70-15]
  misc_feature (11)..(242): NCBI GI: 46136437 Blast Desc: FG09734.1 [Gibberella zeae PH-1]
  misc_feature (61)..(242): NCBI GI: 156059326 Blast Desc: SS1G_03675 [Sclerotinia sclerotiorum 1980] gi|154701462|gb|EDO01201.1| SS1G_03675 [Sclerotinia sclerotiorum 1980]
  misc_feature (59)..(242): NCBI GI: 154317266 Blast Desc: BC1G_03535 [Botryotinia fuckeliana B05.10] gi|150844952|gb|EDN20145.1| BC1G_03535 [Botryotinia fuckeliana B05.10]
  misc_feature (107)..(242): NCBI GI: 116194354 Blast Desc: CHGG_03775 [Chaetomium globosum CBS 148.51] gi|88179688|gb|EAQ87156.1| CHGG_03775 [Chaetomium globosum CBS 148.51]
  misc_feature (107)..(242): NCBI GI: 189188910 Blast Desc: conserved [Pyrenophora tritici-repentis Pt-1C-BFP] gi|187972400|gb|EDU39899.1| conserved [Pyrenophora tritici-repentis Pt-1C-BFP]
  misc_feature (110)..(242): NCBI GI: 171683639 Blast Desc: protein product [Podospora anserina] gi|170941779|emb|CAP67433.1| protein product [Podospora anserina]
  misc_feature (92)..(242): NCBI GI: 242777706 Blast Desc: conserved [Talaromyces stipitatus ATCC 10500] gi|218722707|gb|EED22125.1| conserved [Talaromyces stipitatus ATCC 10500]
MADTAAPPTVGGDQGPKQERLSFQQPAGDVEMEDLSSTLPQSSNAEGSTSQAPQCKDEPIPVPEKDKSAAESSTSARPDDSMAPENEDLTIDPADPVDEGQSADQDPNINIMLQLTNGARHPFRIDEKYLAKRNVNVTSKTEDGRVELASITVYTLKELILRDWRREWEEPPREPTSIRLIHFGKLLEDRNQLSHYHFKTTGINWVHLTVKPQDLLDEEEGGKKVRDSSGSHQGRSGCCVIL

SEQ ID NO: 11943 - DNA, 1882 bp, Muscodor strobelii
  misc_feature: SGI EST ID NO. CUFF.28496.0
  misc_feature: Variant of the nucleotide sequence at SEQ ID NO 11941
gtcgactgtgcagagtgcagcgtaacgatagcgttgcagcgagtgcccactgcccgttccatactatcatcattcgactgtcatcaccacccgtcatccaccctcctccagcccaagccaggccatctgcaccacgccgggttatccatcctgaccatcctgacctgccttggtgtgcatcctgtttgtccctcgcatctgcatcaccacgtacacatagcaaaacatcgtctctaacgctcacctaccacatatctttcctcttctttttttcactttgcatttcttggtttggtcatttcttcacttcttccttggcactcgaaacaccgtcgagcccgctttcctccacgcgtgtgcgtgcatcccggccttccaggggatccgatcccgacgcacgaatgtctcaatcgtgcatccaataattcgccaaggccgtactcacgatctgagacgtgttgcctttcctccgtctacgtctactgtacatcggcgtcttcctgtgactttgctttctccctgcactgagaatagcccgtcccagtcccttgcgacttggccccgttcacctccaacagcgaccttgtccgctcgctcagatcgccaccccctcgaattgtcaccaccatggctgacaccgctgcgcctcccactgttggtggtgatcagggacccaagcaagagcgtttgtctttccaacagcccgctggtgacgtagagatggaagacctttccagcaccctccctcaatcctccaatgcagagggctcaacatcacaagctccgcaatgcaaggacgagcccataccggttcccgagaaggacaagtctgccgccgaatcgtcgacatccgcacgacccgacgactcaatggcccccgagaacgaggatctgacgatagatccggcggatccagtggatgagggccaatcagccgaccaggacccaaacatcaacatcatgcttcagctgacaaacggcgcccgtcatccgttccgaattgacgagaaatatcttgccaaacggaacgtcaacgtcacgagcaagacggaggatgggagggtcgagctcgcaagtattacagtatacacactcaaagaactcattctgcgagattggcgtagagaatgggaagaaccaccaagagagccgaccagtatacgcctgatccattttgggaagctgttggaggataggaatcagctgagtcactaccattttaagaccacgggtatcaactgggtccacctgacagtcaagcctcaggatctgcttgatgaagaagaaggtggcaagaaggtcagagactcgtccggctcacatcaagggagaagtggatgctgtgtcattttatgaggcaccatcccggagcttccgagtacatctacttgtgctctcctagacctactaggcggatatgctcagctgcgaaacaaaggcagagtctctcagcaccgagaatctcgagttgggggcttctgagatgccacggcatcaagcggcgttgaaaagagttccttagcgtttatcgctgcaagctggtccacaacatccagcacgcagttattgtaacatactgtcgaacatagatacggctcttcatgtgatggcagtgtcgacacgttgacatcagacgacattgcatccactcacgctcattaaagcaaaagtgtcgcatcacactaggtgatgctgtacaagtcacagtacagcggcgaggagaaagagatgggacacgggttggttgtgaacaaattgggtcattcatagtatcaacacagtgttgatgtcgaaggctggcatggcgtttcagaggattgttgtttatagcacttcatacaagtcagtgatttctgatgcatacagcatttgtgatctcatc

SEQ ID NO: 11944 - DNA, 480 bp, Muscodor strobelii
  misc_feature: SGI cDNA ID NO. 563854
  misc_feature: Encodes the peptide sequence at SEQ ID NO 11945
atgtcgatgcgcgtcgtccctcccgctgatcacagcagcacatacacgcacctcccctcatcaacctcggcgccctcagcacccggcgtctacgacgtcctgcgacaaggtctcaacccagccctcacatccaccgcctcacccgcacctccagcatcccgtcacccgctcgaagcgcgcctcaaagcctgggaatccacacaagagaacctcagaatggagtccctccgtaagaccttcggcatgagcgagcccatccgccgaggcatggagctcaagatcacccgcgaaggatcttggcgtcccggctgcttgggaggagcagtcggtatcggagggagcactggcactggaaccgttcacgaagacattctcacgggtagagaggctacgctggactgggaggatgtgtttactggcgaggaacagcgtggtgctgttggtgtccatgaggagatggagcgtaagctgaagatctag

SEQ ID NO: 11945 - protein, 159 aa, Muscodor strobelii
  misc_feature: SGI Peptide ID NO. 563854
  misc_feature (19)..(159): Pfam Id: PF05348 Pfam Desc: Proteasome maturation factor UMP1
  misc_feature (19)..(157): Pfam Id: PF05348 Pfam Desc: Proteasome maturation factor UMP1
  misc_feature (1)..(159): NCBI GI: 171683637 Blast Desc: protein product [Podospora anserina] gi|170941778|emb|CAP67432.1| protein product [Podospora anserina]
  misc_feature (2)..(159): NCBI GI: 46136435 Blast Desc: FG09733.1 [Gibberella zeae PH-1]
  misc_feature (1)..(159): NCBI GI: 39944272 Blast Desc: MGG_04147 [Magnaporthe grisea 70-15] gi|145014881|gb|EDJ99449.1| MGG_04147 [Magnaporthe grisea 70-15]
  misc_feature (2)..(159): NCBI GI: 116194356 Blast Desc: CHGG_03776 [Chaetomium globosum CBS 148.51] gi|88179689|gb|EAQ87157.1| CHGG_03776 [Chaetomium globosum CBS 148.51]
  misc_feature (1)..(159): NCBI GI: 85105093 Blast Desc: NCU05227 [Neurospora crassa OR74A] gi|28923470|gb|EAA32651.1| conserved [Neurospora crassa OR74A]
  misc_feature (2)..(159): NCBI GI: 256726937 Blast Desc: [Nectria haematococca mpVI 77-13-4]
  misc_feature (1)..(159): NCBI GI: 156059328 Blast Desc: SS1G_03676 [Sclerotinia sclerotiorum 1980] gi|154701463|gb|EDO01202.1| SS1G_03676 [Sclerotinia sclerotiorum 1980]
  misc_feature (1)..(159): NCBI GI: 154317264 Blast Desc: BC1G_03534 [Botryotinia fuckeliana B05.10] gi|150844951|gb|EDN20144.1| BC1G_03534 [Botryotinia fuckeliana B05.10]
  misc_feature (1)..(159): NCBI GI: 261359827 Blast Desc: proteasome maturation factor UMP1 [Verticillium albo-atrum VaMs.102]
  misc_feature (1)..(159): NCBI GI: 67537122 Blast Desc: AN4731.2 [Aspergillus nidulans FGSC A4] gi|40741583|gb|EAA60773.1| AN4731.2 [Aspergillus nidulans FGSC A4] gi|259482430|tpe|CBF76906.1| TPA: 20S proteasome maturation
MSMRVVPPADHSSTYTHLPSSTSAPSAPGVYDVLRQGLNPALTSTASPAPPASRHPLEARLKAWESTQENLRMESLRKTFGMSEPIRRGMELKITREGSWRPGCLGGAVGIGGSTGTGTVHEDILTGREATLDWEDVFTGEEQRGAVGVHEEMERKLKI

SEQ ID NO: 11946 - DNA, 1129 bp, Muscodor strobelii
  misc_feature: SGI EST ID NO. CUFF.28285.0
  misc_feature: Variant of the nucleotide sequence at SEQ ID NO 11944
tccaggcgtgacctcttagattaccttacttattctcaaattgattgtctccaattcgtttcagtagtgaattcgaaatagggtcgtggatgtaatggtcgtatgccgtcactggtccgacccgcgccaagaacagctgtagaagcgggagggtgccaccaccccccggtctacccacctgcagccagtcccccagctctcaggtagcaaggctgccacacgaacgcggaagctcctgcagcctgtcatcagcctccatcagcaatctatcagcagttatcccaccttgcgtctaaacctccatcaagcgataagaagcaacaagaactacgcttccaacctccgacagaagttacaaagaccaaacaatactaatcggagcacaagttcgccctcagcgaaccccgcagccatcaagatgtcgatgcgcgtcgtccctcccgctgatcacagcagcacatacacgcacctcccctcatcaacctcggcgccctcagcacccggcgtctacgacgtcctgcgacaaggtctcaacccagccctcacatccaccgcctcacccgcacctccagcatcccgtcacccgctcgaagcgcgcctcaaagcctgggaatccacacaagagaacctcagaatggagtccctccgtaagaccttcggcatgagcgagcccatccgccgaggcatggagctcaagatcacccgcgaaggatcttggcgtcccggctgcttgggaggagcagtcggtatcggagggagcactggcactggaaccgttcacgaagacattctcacgggtagagaggctacgctggactgggaggatgtgtttactggcgaggaacagcgtggtgctgttggtgtccatgaggagatggagcgtaagctgaagatctagcggcatgctcaaagagtcgattctggggatccgttgtggaagatgcttagagctgcttggagattttctgatatttttccgagtgcagaaatcagcatcggaactatgaagcggcatctttattatgaaattagatatggtgtggtccacgatagacaacccaacctggtgagcaatgaagagcatccagttgatgatgacaacatttcatatatacgtgctatatggtga

SEQ ID NO: 11947 - DNA, 1974 bp, Muscodor strobelii
  misc_feature: SGI cDNA ID NO. 563855
  misc_feature: Reduced expression when VOC is produced
  misc_feature: Encodes the peptide sequence at SEQ ID NO 11948
atgcggcctccctcagtacgtgcaccggtggtcaatatcgccaatgccacattttaccgtcaccatccaaccaccaattctattcaccccaatccggctcttttcaagaatttgaatttcactttaccgtcgacgacagatccgcagacccattggtatgtagtgggcccgtcattgagcggaaaaacaacgttcctacaacttctaagaggtgacaatctctgcatccctccaacagcacggagctatccgtatctctcatcagatgcagtacctcataggctgcgtgtgccgactagagcgatcaaatatgtcggctttaacaatgatgccttaacaccaggtgtgtcgacgtcgacatacatgtccgctcggtatgagtcgaagcgtgagagtacggatttctctttacgagatttcttgctagggaatatgcatatgaatgtccgggacagaaatacagaggatgagcccgatcctgccttgctcgatcgcgttgtgagggatctcaagctatctcagctcttggacttgcccgtggccttcttgagtaatgggcagggtcgcagagcgagaattgcacgggctctgctcactgctccagaagtcctgttactagatgagccattcatgggccttgatcctccaacggtcgccgggctgagtccattgttgcatggattagccagtaaggctgatccaaggcttatcctcagtgccagaccccaagatcccatcccagattggatcacacatcttgtctatctgaggtcggattgccaagttgctgctatgggagataaagagacagtcttggagggtctccgtaaatacgtgcgaggagtttggagcggtgcgctagttgaggatgataagatggcagttcacaatctggtccaaatggggaagactctctcatcgaaaggtgtcgaaggggaggtattggtgggcgaggaacctgctgcgacaagtacagccgaaacagccgaggcaagtctgaagaccagaaataatactggagaaccgcttgtcgagatggacggttgccaagtacaatatcgtgggaacgtcgctctaggcaattggaaacaagacattgatggtaaggaacgcaaaggcttgctgtggacagtccgacgaggtgagcgatggggcgtatttgggcccaatggttcgggtaaaacgaccatcgtgtcgctcatctgttcagatcacccccaaacttactcaatgcccatcaaattgtttgggcgtagccgacttccggagcccggaacaggtactttaccattgactttctgggatattcaatcacggatcggtcactcgagtcccgagatacatcaacatatgccacgtagtctcacagtcaggcaggtcatagcaaacgcttgggctgatacgttccgcacgaaaccaaaccttgataaacaggccacgggaaagattgaggcagctctaaagtggttcgaagcagagctgaacccagcatataactccccagcgcactctacaccagacgtcctagagcgaggtcttcaatgggcggatcactacatgtttggcgagctttcattctccgcacagcgggtagctctctttatccgagcactcatcaagaatccggatatcgtggtgctcgacgaagcatgcagtggtatggatgatggtgtgcgagataagtgtctcctatttcttgaagccggtcaaacgaagcaatatcagaaacagaaagatggttcggaagcgattgtggaaagcgacgcttcaaagctaggccatgtccaagtccatggcctaacagatgatcaagcgctgatatgcatcagccatgtaagggaagagattccaaattgtatcagagaatggatttgcctccccgagtcgacaaccggccagcccgcgaggtttggtgttgcggatgcaccgttgaatcgtgatgagaagagctggaaggcaatctggagaatgtga

SEQ ID NO: 11948 - protein, 657 aa, Muscodor strobelii
  misc_feature: SGI Peptide ID NO. 563855
  misc_feature (49)..(259): Pfam Id: PF00005 Pfam Desc: ABC transporter
  misc_feature (1)..(651): NCBI GI: 46136433 Blast Desc: FG09732.1 [Gibberella zeae PH-1]
  misc_feature (1)..(655): NCBI GI: 256727505 Blast Desc: [Nectria haematococca mpVI 77-13-4]
  misc_feature (5)..(655): NCBI GI: 85105090 Blast Desc: NCU05226 [Neurospora crassa OR74A] gi|28923469|gb|EAA32650.1| conserved [Neurospora crassa OR74A]
  misc_feature (37)..(657): NCBI GI: 145607299 Blast Desc: MGG_04146 [Magnaporthe grisea 70-15] gi|145014880|gb|EDJ99448.1| MGG_04146 [Magnaporthe grisea 70-15]
  misc_feature (1)..(655): NCBI GI: 116194358 Blast Desc: CHGG_03777 [Chaetomium globosum CBS 148.51] gi|88179690|gb|EAQ87158.1| CHGG_03777 [Chaetomium globosum CBS 148.51]
  misc_feature (9)..(655): NCBI GI: 156059330 Blast Desc: SS1G_03677 [Sclerotinia sclerotiorum 1980] gi|154701464|gb|EDO01203.1| SS1G_03677 [Sclerotinia sclerotiorum 1980]
  misc_feature (3)..(657): NCBI GI: 171683635 Blast Desc: protein product [Podospora anserina] gi|170941777|emb|CAP67431.1| protein product [Podospora anserina]
  misc_feature (9)..(655): NCBI GI: 189205837 Blast Desc: conserved [Pyrenophora tritici-repentis Pt-1C-BFP] gi|187975346|gb|EDU41972.1| conserved [Pyrenophora tritici-repentis Pt-1C-BFP]
  misc_feature (9)..(657): NCBI GI: 169621684 Blast Desc: SNOG_14053 [Phaeosphaeria nodorum SN15] gi|111057558|gb|EAT78678.1| SNOG_14053 [Phaeosphaeria nodorum SN15]
  misc_feature (9)..(657): NCBI GI: 240108780 Blast Desc: ABC transporter domain containing protein [Coccidioides posadasii C735 delta SOWgp]
  misc_feature: Useful for introducing or modulating the production of volatile compounds
MRPPSVRAPVVNIANATFYRHHPTTNSIHPNPALFKNLNFTLPSTTDPQTHWYVVGPSLSGKTTFLQLLRGDNLCIPPTARSYPYLSSDAVPHRLRVPTRAIKYVGFNNDALTPGVSTSTYMSARYESKRESTDFSLRDFLLGNMHMNVRDRNTEDEPDPALLDRVVRDLKLSQLLDLPVAFLSNGQGRRARIARALLTAPEVLLLDEPFMGLDPPTVAGLSPLLHGLASKADPRLILSARPQDPIPDWITHLVYLRSDCQVAAMGDKETVLEGLRKYVRGVWSGALVEDDKMAVHNLVQMGKTLSSKGVEGEVLVGEEPAATSTAETAEASLKTRNNTGEPLVEMDGCQVQYRGNVALGNWKQDIDGKERKGLLWTVRRGERWGVFGPNGSGKTTIVSLICSDHPQTYSMPIKLFGRSRLPEPGTGTLPLTFWDIQSRIGHSSPEIHQHMPRSLTVRQVIANAWADTFRTKPNLDKQATGKIEAALKWFEAELNPAYNSPAHSTPDVLERGLQWADHYMFGELSFSAQRVALFIRALIKNPDIVVLDEACSGMDDGVRDKCLLFLEAGQTKQYQKQKDGSEAIVESDASKLGHVQVHGLTDDQALICISHVREEIPNCIREWICLPESTTGQPARFGVADAPLNRDEKSWKAIWRM

SEQ ID NO: 11949 - DNA, 2183 bp, Muscodor strobelii
  misc_feature: SGI EST ID NO. CUFF.28287.0
  misc_feature: Variant of the nucleotide sequence at SEQ ID NO 11947
ccagctctctatcatatgaagtattgagcatctatgattttgcgtaccctaaaatactagttgagccattctggccatgcggcctccctcagtacgtgcaccggtggtcaatatcgccaatgccacattttaccgtcaccatccaaccaccaattctattcaccccaatccggctcttttcaagaatttgaatttcactttaccgtcgacgacagatccgcagacccattggtatgtagtgggcccgtcattgagcggaaaaacaacgttcctacaacttctaagaggtgacaatctctgcatccctccaacagcacggagctatccgtatctctcatcagatgcagtacctcataggctgcgtgtgccgactagagcgatcaaatatgtcggctttaacaatgatgccttaacaccaggtgtgtcgacgtcgacatacatgtccgctcggtatgagtcgaagcgtgagagtacggatttctctttacgagatttcttgctagggaatatgcatatgaatgtccgggacagaaatacagaggatgagcccgatcctgccttgctcgatcgcgttgtgagggatctcaagctatctcagctcttggacttgcccgtggccttcttgagtaatgggcagggtcgcagagcgagaattgcacgggctctgctcactgctccagaagtcctgttactagatgagccattcatgggccttgatcctccaacggtcgccgggctgagtccattgttgcatggattagccagtaaggctgatccaaggcttatcctcagtgccagaccccaagatcccatcccagattggatcacacatcttgtctatctgaggtcggattgccaagttgctgctatgggagataaagagacagtcttggagggtctccgtaaatacgtgcgaggagtttggagcggtgcgctagttgaggatgataagatggcagttcacaatctggtccaaatggggaagactctctcatcgaaaggtgtcgaaggggaggtattggtgggcgaggaacctgctgcgacaagtacagccgaaacagccgaggcaagtctgaagaccagaaataatactggagaaccgcttgtcgagatggacggttgccaagtacaatatcgtgggaacgtcgctctaggcaattggaaacaagacattgatggtaaggaacgcaaaggcttgctgtggacagtccgacgaggtgagcgatggggcgtatttgggcccaatggttcgggtaaaacgaccatcgtgtcgctcatctgttcagatcacccccaaacttactcaatgcccatcaaattgtttgggcgtagccgacttccggagcccggaacaggtactttaccattgactttctgggatattcaatcacggatcggtcactcgagtcccgagatacatcaacatatgccacgtagtctcacagtcaggcaggtcatagcaaacgcttgggctgatacgttccgcacgaaaccaaaccttgataaacaggccacgggaaagattgaggcagctctaaagtggttcgaagcagagctgaacccagcatataactccccagcgcactctacaccagacgtcctagagcgaggtcttcaatgggcggatcactacatgtttggcgagctttcattctccgcacagcgggtagctctctttatccgagcactcatcaagaatccggatatcgtggtgctcgacgaagcatgcagtggtatggatgatggtgtgcgagataagtgtctcctatttcttgaagccggtcaaacgaagcaatatcagaaacagaaagatggttcggaagcgattgtggaaagcgacgcttcaaagctaggccatgtccaagtccatggcctaacagatgatcaagcgctgatatgcatcagccatgtaagggaagagattccaaattgtatcagagaatggatttgcctccccgagtcgacaaccggccagcccgcgaggtttggtgttgcggatgcaccgttgaatcgtgatgagaagagctggaaggcaatctggagaatgtgagaggattgtattatgtagttgtatactatgaaatcgggtagttaaaacaggtaaatttgagcgagtttatctgtcgtgatcttgactgctaaatatcagatatcttgtttgctacgaacacataaacatttgc

SEQ ID NO: 11950 - DNA, 3447 bp, Muscodor strobelii
  misc_feature: SGI cDNA ID NO. 563856
  misc_feature: Encodes the peptide sequence at SEQ ID NO 11951
atggacggatcacggccgcccgactatgctctcccgggctatgatgatgagctcgagcatcacactccaaccggcacagggcactcagcagcagtcagattattgacatcgatggaggaaccactagcagataccagaccgtatgtaaacccaaaaggtggcgaagttggcgaagattctccttctatcatgccaagacctctcaatttggctctcaagagtgcgctcaaggaaggcgacaaggaggggaaggggaagagcgtcagaatatcaccgtcaacgccagagtatatggacacgcttaggaagcaagaggaagcccagttgacgcccacatcaggcgatcaatcgtcatccgtctcgcccagagacgcatcacccacacgcaaggcagtgccgaagcgctcttcgactgtaaagctacagaagaaggtcaaaccatcacaagtccttcaagcagagattgtgcagagccttccgacaataccagaggggccgtcacctaggaagagttctcttcaaaagtcatcttttcaaaattccaacaagactccagcgagtctgcctcccaagcttctacacagcagttgctcacatggaaaacatagtagcattcgacctagcccgcggcgatcataccaaccgtccgttatttcaacaccttcgagggcgtcatcaatccgcgaccccccacatataccacctccggaatctgcttacgaaccttaccgaaccggatcacctacccgaccttggacgccatcttccaggatgtccggtgcttcagaatttagtcgcccaccaccatcaaatgttgcgtacgagccagcagatctcaatggcagtccgcgacccggaacaccatcctcgcgatatggaggcagcccacgcagaccactcccacccgccccgttgttctctcatcccaatcgcagctcagccttcacagcagatgatgctacagtcagcatcccattagaggaaggtgatgatgtctttgggcccgagtcagacattaccggagcacatacttatcgcgattcgtttgcacaatcccaggttacgcttagtgagctgaacccggaaatgcctggtcacgagaaagtcgagcattatggttcagctccggagggacagcaagagcgacgtggtgttcgtccacttgtcacatctaaaaaggaggttcagctcatcaacggagagcttattctcgagtgtaaaatcccgacaatcttgtatagtttcttgcctcgtcgcgatgaggtggaattcacacatatgcgatacacggctgtgacgtgcgatccggacgacttcgtccaaaaggggtacaaattgcgacagcagatcgggcgcactatgcgcgagactgagctgtttatctgcgtcacgatgtacaacgaagacgaaattggcttcactcgaacgatgcacgcgatcatgaagaatatcagccatttctgcggccgcaacaagtcacgtacttggggtgaaatgggatggcagaaaattgttgtctgtgtcgtgtctgacggtagagagaaagtccacccaagaacgctcgatgcgctggccgcaatgggtgtctatcaacacggtatcgccaagaacttcgtcaattcgaaagctgtgcaggctcacgtgtacgaatacacaacacaagtatctctcgactcggatctcaagttcaagggagctgagaagggcatcgtgccatgtcagatgatcttctgtctcaaagagcgcaatcagcgcaaactaaactcacatcgttggttcttcaatgcgttcggcactgccctgaatcccaatgtctgtatcctactcgacgttggaacaaagcccggaaacaactctctgtaccatttgtggaaagctttcgacaccgattcaaacgttgcaggtgcttgtggtgaaattaaggccatgaaggggaaatggggcaattacctcctaaatccactggtcgcgtcacagaacttcgagtataaaatgtctaacattctcgacaaaccgctagaatcggtcttcggctacataacggtgttaccaggcgcactcagtgcgtaccgttttcatgcgctgcagaatgatgaaacaggacatggtcccttaagtcaatacttcaagggtgagacactgcacggtcagcatgcagatgtcttcactgccaacatgtatctggctgaggatcgtatcttatgttgggagttagtcgcgaagaggagtgaaaggtgggttctgaagtatgttaaaggctgcaaaggtgaaacagatgtgcccgactctgtgcccgaattgatctcgcaacgtcgtcgttggctcaacggtgctttcttcgccgccgtgtattcactcgtgcatttccgacagatctggcaaacggaccacacgatcgcgagaaaggtgctattgcatatcgagttcatttaccagttcatccagctactattcacctacttctcgctcgccaactactatctcgccttctacttcctctgtggaggtctatcagaccccaaagtagatcccttcggccacaatattgctttctacatcttcaccgtcttgcgctacgttctgatactgttgacgtccatgcaatttattatatcgctgggtaatcggcctcagggcgcaaagaggatgtataccgtcagtatcataatctacggtgtcattatggtgtatacgattttcgcaacggtgtacatcattgttcacaccatcctgtcagatggcggcatcaagttgggcagcaatgcctttacgaacctggtgttgtccatcgcttctaccgttggtttatacttcgtcacgagtttcttgtacctagatccttggcatctgtttacgagttcggcgcagtactttgcgcttctgccgagtttcctctgcacgctacaagtctacgctttctgcaacacgcacgacgtcacgtggggtacgaagggtgataacgtgatgaagacagatctcgggggcgccgttggtaaaggaggaacagtcgagctcgagatgccatccgagcagttggatatcgattccggatacgacgaggcattacgcaacctgcgtgatcgtgtcgaggtcgactcgcctggagtctcagaagcccagatgcaagaagattactaccgtggtgtgcgtacatacatggtagtgatctggatggtggctaatgctatcttggctatggctgtgtcggaagcctatggcatcaaggatgtgggcgacaacttctacctcagctttatcctatggtctgtcgcaacattggctgtgttccgcgccattggtagcacgacatttgccattctcaacgtcatcaacatggtggttgagggacgggtacggatcagtctcaaggtgcctgagtgggcgggaggtatcggatcacagatcagcgagaagatgagcagtgtcgcgagtagtgttcgcgggtaa

SEQ ID NO: 11951 - protein, 1148 aa, Muscodor strobelii
  misc_feature: SGI Peptide ID NO. 563856
  misc_feature (465)..(627): Pfam Id: PF01644 Pfam Desc: Chitin synthase
  misc_feature (385)..(464): Pfam Id: PF08407 Pfam Desc: Chitin synthase N-terminal
  misc_feature (436)..(973): Pfam Id: PF03142 Pfam Desc: Chitin synthase
  misc_feature (3)..(1139): NCBI GI: 261359829 Blast Desc: class 2 chitin synthase [Verticillium albo-atrum VaMs.102]
  misc_feature (4)..(1147): NCBI GI: 262069068 Blast Desc: chitin synthase 2 [Gibberella moniliformis]
  misc_feature (90)..(1147): NCBI GI: 256725622 Blast Desc: glycosyltransferase family 2 [Nectria haematococca mpVI 77-13-4]
  misc_feature (128)..(1147): NCBI GI: 50429185 Blast Desc: chitin synthase class II [Fusarium oxysporum f. sp. lycopersici]
  misc_feature (201)..(1137): NCBI GI: 53801262 Blast Desc: class 2 chitin synthase [Beauveria bassiana]
  misc_feature (4)..(1147): NCBI GI: 21901892 Blast Desc: chitin synthase [ericoid mycorrhizal fungus PSIV]
  misc_feature (8)..(1147): NCBI GI: 171683631 Blast Desc: protein product [Podospora anserina] gi|170941775|emb|CAP67429.1| protein product [Podospora anserina]
  misc_feature (4)..(1146): NCBI GI: 154299814 Blast Desc: chitin synthase 2 [Botryotinia fuckeliana B05.10] gi|150857223|gb|EDN32415.1| chitin synthase 2 [Botryotinia fuckeliana B05.10]
  misc_feature (144)..(1124): NCBI GI: 164429219 Blast Desc: chitin synthase A [Neurospora crassa OR74A] gi|166215067|sp|P30589.3|CHS2_NEUCR RecName: Full=Chitin synthase 2; AltName: Full=Chitin-UDP acetyl-glucosaminyl transferase 2 A
  misc_feature (284)..(1124): NCBI GI: 558604 Blast Desc: chitin synthase 2 [Neurospora crassa]
  misc_feature (144)..(1124): SWISSPROT Homolog: EC 2.4.1.16 Chitin synthase
MDGSRPPDYALPGYDDELEHHTPTGTGHSAAVRLLTSMEEPLADTRPYVNPKGGEVGEDSPSIMPRPLNLALKSALKEGDKEGKGKSVRISPSTPEYMDTLRKQEEAQLTPTSGDQSSSVSPRDASPTRKAVPKRSSTVKLQKKVKPSQVLQAEIVQSLPTIPEGPSPRKSSLQKSSFQNSNKTPASLPPKLLHSSCSHGKHSSIRPSPRRSYQPSVISTPSRASSIRDPPHIPPPESAYEPYRTGSPTRPWTPSSRMSGASEFSRPPPSNVAYEPADLNGSPRPGTPSSRYGGSPRRPLPPAPLFSHPNRSSAFTADDATVSIPLEEGDDVFGPESDITGAHTYRDSFAQSQVTLSELNPEMPGHEKVEHYGSAPEGQQERRGVRPLVTSKKEVQLINGELILECKIPTILYSFLPRRDEVEFTHMRYTAVTCDPDDFVQKGYKLRQQIGRTMRETELFICVTMYNEDEIGFTRTMHAIMKNISHFCGRNKSRTWGEMGWQKIVVCVVSDGREKVHPRTLDALAAMGVYQHGIAKNFVNSKAVQAHVYEYTTQVSLDSDLKFKGAEKGIVPCQMIFCLKERNQRKLNSHRWFFNAFGTALNPNVCILLDVGTKPGNNSLYHLWKAFDTDSNVAGACGEIKAMKGKWGNYLLNPLVASQNFEYKMSNILDKPLESVFGYITVLPGALSAYRFHALQNDETGHGPLSQYFKGETLHGQHADVFTANMYLAEDRILCWELVAKRSERWVLKYVKGCKGETDVPDSVPELISQRRRWLNGAFFAAVYSLVHFRQIWQTDHTIARKVLLHIEFIYQFIQLLFTYFSLANYYLAFYFLCGGLSDPKVDPFGHNIAFYIFTVLRYVLILLTSMQFIISLGNRPQGAKRMYTVSIIIYGVIMVYTIFATVYIIVHTILSDGGIKLGSNAFTNLVLSIASTVGLYFVTSFLYLDPWHLFTSSAQYFALLPSFLCTLQVYAFCNTHDVTWGTKGDNVMKTDLGGAVGKGGTVELEMPSEQLDIDSGYDEALRNLRDRVEVDSPGVSEAQMQEDYYRGVRTYMVVIWMVANAILAMAVSEAYGIKDVGDNFYLSFILWSVATLAVFRAIGSTTFAILNVINMVVEGRVRISLKVPEWAGGIGSQISEKMSSVASSVRG

SEQ ID NO: 11952 - DNA, 3593 bp, Muscodor strobelii
  misc_feature: SGI EST ID NO. CUFF.28290.0
  misc_feature: Variant of the nucleotide sequence at SEQ ID NO 11950
cgcatacctttcttgacgaattgagattttatgaagcttaaacaatcaattcaatccctcagcttcaattgccacgcttacatcgacgtacacctcgaaattaagaattggtttcttatccttcgcctgcagctttatcacctagcaaaagttattccgtcatcgcattccaagcaacagcaacaacacaggagtgtcttaatcacacgtttgcttggcgtttttctcgccacagcaagactataaggggccatggacggatcacggccgcccgactatgctctcccgggctatgatgatgagctcgagcatcacactccaaccggcacagggcactcagcagcagtcagattattgacatcgatggaggaaccactagcagataccagacctagcattcgacctagcccgcggcgatcataccaaccgtccgttatttcaacaccttcgagggcgtcatcaatccgcgaccccccacatataccacctccggaatctgcttacgaaccttaccgaaccggatcacctacccgaccttggacgccatcttccaggatgtccggtgcttcagaatttagtcgcccaccaccatcaaatgttgcgtacgagccagcagatctcaatggcagtccgcgacccggaacaccatcctcgcgatatggaggcagcccacgcagaccactcccacccgccccgttgttctctcatcccaatcgcagctcagccttcacagcagatgatgctacagtcagcatcccattagaggaaggtgatgatgtctttgggcccgagtcagacattaccggagcacatacttatcgcgattcgtttgcacaatcccaggttacgcttagtgagctgaacccggaaatgcctggtcacgagaaagtcgagcattatggttcagctccggagggacagcaagagcgacgtggtgttcgtccacttgtcacatctaaaaaggaggttcagctcatcaacggagagcttattctcgagtgtaaaatcccgacaatcttgtatagtttcttgcctcgtcgcgatgaggtggaattcacacatatgcgatacacggctgtgacgtgcgatccggacgacttcgtccaaaaggggtacaaattgcgacagcagatcgggcgcactatgcgcgagactgagctgtttatctgcgtcacgatgtacaacgaagacgaaattggcttcactcgaacgatgcacgcgatcatgaagaatatcagccatttctgcggccgcaacaagtcacgtacttggggtgaaatgggatggcagaaaattgttgtctgtgtcgtgtctgacggtagagagaaagtccacccaagaacgctcgatgcgctggccgcaatgggtgtctatcaacacggtatcgccaagaacttcgtcaattcgaaagctgtgcaggctcacgtgtacgaatacacaacacaagtatctctcgactcggatctcaagttcaagggagctgagaagggcatcgtgccatgtcagatgatcttctgtctcaaagagcgcaatcagcgcaaactaaactcacatcgttggttcttcaatgcgttcggcactgccctgaatcccaatgtctgtatcctactcgacgttggaacaaagcccggaaacaactctctgtaccatttgtggaaagctttcgacaccgattcaaacgttgcaggtgcttgtggtgaaattaaggccatgaaggggaaatggggcaattacctcctaaatccactggtcgcgtcacagaacttcgagtataaaatgtctaacattctcgacaaaccgctagaatcggtcttcggctacataacggtgttaccaggcgcactcagtgcgtaccgttttcatgcgctgcagaatgatgaaacaggacatggtcccttaagtcaatacttcaagggtgagacactgcacggtcagcatgcagatgtcttcactgccaacatgtatctggctgaggatcgtatcttatgttgggagttagtcgcgaagaggagtgaaaggtgggttctgaagtatgttaaaggctgcaaaggtgaaacagatgtgcccgactctgtgcccgaattgatctcgcaacgtcgtcgttggctcaacggtgctttcttcgccgccgtgtattcactcgtgcatttccgacagatctggcaaacggaccacacgatcgcgagaaaggtgctattgcatatcgagttcatttaccagttcatccagctactattcacctacttctcgctcgccaactactatctcgccttctacttcctctgtggaggtctatcagaccccaaagtagatcccttcggccacaatattgctttctacatcttcaccgtcttgcgctacgttctgatactgttgacgtccatgcaatttattatatcgctgggtaatcggcctcagggcgcaaagaggatgtataccgtcagtatcataatctacggtgtcattatggtgtatacgattttcgcaacggtgtacatcattgttcacaccatcctgtcagatggcggcatcaagttgggcagcaatgcctttacgaacctggtgttgtccatcgcttctaccgttggtttatacttcgtcacgagtttcttgtacctagatccttggcatctgtttacgagttcggcgcagtactttgcgcttctgccgagtttcctctgcacgctacaagtctacgctttctgcaacacgcacgacgtcacgtggggtacgaagggtgataacgtgatgaagacagatctcgggggcgccgttggtaaaggaggaacagtcgagctcgagatgccatccgagcagttggatatcgattccggatacgacgaggcattacgcaacctgcgtgatcgtgtcgaggtcgactcgcctggagtctcagaagcccagatgcaagaagattactaccgtggtgtgcgtacatacatggtagtgatctggatggtggctaatgctatcttggctatggctgtgtcggaagcctatggcatcaaggatgtgggcgacaacttctacctcagctttatcctatggtctgtcgcaacattggctgtgttccgcgccattggtagcacgacatttgccattctcaacgtcatcaacatggtggttgagggacgggtacggatcagtctcaaggtgcctgagtgggcgggaggtatcggatcacagatcagcgagaagatgagcagtgtcgcgagtagtgttcgcgggtaatgtgttgtctgacgtcgcatttggtctggttctgattttgagattcgttgcaaacaaaaaaggtttctgattaggtctttggaatgctttaaatgaccaatggagtttatgggattaattctttcaagatacgaagagacgatgggttcagatgcttgctagcttttcactattggctactaagaaggcgtaatgtccaggaagacttgttgatgttctgtacaatagcctggaggtctttgctgacatgttaggagtataggtgttgcgaggtgagaattgtgtacttctcgataatgagattatgataataatccggaatattgtgtggtgatattattatacgtggagtgtaggttgag

SEQ ID NO: 11953 - DNA, 1104 bp, Muscodor strobelii
  misc_feature: SGI cDNA ID NO. 563857
  misc_feature: Encodes the peptide sequence at SEQ ID NO 11954
atggccatctacagcgccgttccgccgcctccggccctcgggggagcggcacaggagcaagagcaaccgccaccagtgcaccagcagcaacagtatacgaccacagccgcagtcgatatcgaggcatggactatttctgctcttgaatcgctaagcgtctcgcccgatgcccgcggcaccggctctgcgctcacaataccgttgcacgaccctgagaaaaagaaggctgcagtcaccatcaatgacccgcgtgccgtttccggggctgttacgcccccgcctcgtccgccttcccgccgcgatagcatgaaacgtcgtgaggctctgcttcgtggtaaagagggaagcagacagaggcgcagatgggagaacgaccgtctcgtcggtgtccccaatgcgatccctcccgagccgcaggactgggttcctcgacccacgcaccccgtcaaccacgtcccataccaggttgcggcgcactgggaactccatgtgcggcgtgaggttgagagccggaatgcagcgcttgtcaagcgcaagcaggctctcacgcggacgctgggcgatgagggcgtagctggccgtgtccctcgtgagctttgccttcgcgccaagaagactccagccgtccgcacttgggttcgctcgctcgaagagcccgttaggaagtatcttgtcgagcgccaagtcgccaaggagaccgagaatgatttgaagacagatgatagtgaaagtttcagtgatagtatggactccgaagatgaagaaatagtcttcgttggtcggaatggatcgatgcgcgacggtaggggcagtagtaagactaagcctcaagatgtttcgtggaaaaaggctcgtcgtcagcaagagggtcaggccaaagacgagggcatgttgttcgacactcatggcgacgaggatggtggtaattttagacgctggatcacgcattcgatttctgactattatggactgcaatcgcgctccgttttggtcggcgatcctaagcgcaaggtcgtgtatgttggcatcaagcagatgaagactggccatgctccacacgtgcatgccgaggctctgccgcgacctctttggactctttgctga

SEQ ID NO: 11954 - protein, 367 aa, Muscodor strobelii
  misc_feature: SGI Peptide ID NO. 563857
  misc_feature (35)..(367): NCBI GI: 46121751 Blast Desc: FG05254.1 [Gibberella zeae PH-1]
  misc_feature (1)..(367): NCBI GI: 256726832 Blast Desc: NECHADRAFT_33042 [Nectria haematococca mpVI 77-13-4]
  misc_feature (1)..(367): NCBI GI: 39945860 Blast Desc: MGG_08050 [Magnaporthe grisea 70-15] gi|145019287|gb|EDK03515.1| MGG_08050 [Magnaporthe grisea 70-15]
  misc_feature (20)..(367): NCBI GI: 85107317 Blast Desc: NCU06609 [Neurospora crassa OR74A] gi|28923955|gb|EAA33115.1| [Neurospora crassa OR74A]
  misc_feature (1)..(367): NCBI GI: 171691152 Blast Desc: protein product [Podospora anserina] gi|170945524|emb|CAP71636.1| protein product [Podospora anserina]
  misc_feature (1)..(367): NCBI GI: 156049823 Blast Desc: SS1G_08619 [Sclerotinia sclerotiorum 1980] gi|154693017|gb|EDN92755.1| SS1G_08619 [Sclerotinia sclerotiorum 1980]
  misc_feature (22)..(366): NCBI GI: 116195204 Blast Desc: CHGG_04200 [Chaetomium globosum CBS 148.51] gi|88180113|gb|EAQ87581.1| CHGG_04200 [Chaetomium globosum CBS 148.51]
  misc_feature (38)..(367): NCBI GI: 189210553 Blast Desc: conserved [Pyrenophora tritici-repentis Pt-1C-BFP] gi|187977701|gb|EDU44327.1| conserved [Pyrenophora tritici-repentis Pt-1C-BFP]
  misc_feature (30)..(367): NCBI GI: 169618954 Blast Desc: SNOG_12669 [Phaeosphaeria nodorum SN15] gi|111058847|gb|EAT79967.1| SNOG_12669 [Phaeosphaeria nodorum SN15]
  misc_feature (39)..(365): NCBI GI: 242794069 Blast Desc: conserved [Talaromyces stipitatus ATCC 10500] gi|218718884|gb|EED18304.1| conserved [Talaromyces stipitatus ATCC 10500]
MAIYSAVPPPPALGGAAQEQEQPPPVHQQQQYTTTAAVDIEAWTISALESLSVSPDARGTGSALTIPLHDPEKKKAAVTINDPRAVSGAVTPPPRPPSRRDSMKRREALLRGKEGSRQRRRWENDRLVGVPNAIPPEPQDWVPRPTHPVNHVPYQVAAHWELHVRREVESRNAALVKRKQALTRTLGDEGVAGRVPRELCLRAKKTPAVRTWVRSLEEPVRKYLVERQVAKETENDLKTDDSESFSDSMDSEDEEIVFVGRNGSMRDGRGSSKTKPQDVSWKKARRQQEGQAKDEGMLFDTHGDEDGGNFRRWITHSISDYYGLQSRSVLVGDPKRKVVYVGIKQMKTGHAPHVHAEALPRPLWTLC

SEQ ID NO: 11955 - DNA, 1589 bp, Muscodor strobelii
  misc_feature: SGI EST ID NO. CUFF.28305.0
  misc_feature: Variant of the nucleotide sequence at SEQ ID NO 11953
aactctcgttatcaggagaagtggcaaggagagagcgggggtcaggggtccaggccaccagggtgcctcaggagctgtaagtccgtccggcgagtcagatagggtcatagactcatcgtgtcatgatgagtagtatggcgggcttccattcctttcgtctttggtgatgctttgtaccagctatccagtattgtatatataaaacagctggcaattgcattatctcaaccaatccgacgcttgtacacgtagcataccccagatcctcaaccccataccaccccacgcgttcagacaatggccatctacagcgccgttccgccgcctccggccctcgggggagcggcacaggagcaagagcaaccgccaccagtgcaccagcagcaacagtatacgaccacagccgcagtcgatatcgaggcatggactatttctgctcttgaatcgctaagcgtctcgcccgatgcccgcggcaccggctctgcgctcacaataccgttgcacgaccctgagaaaaagaaggctgcagtcaccatcaatgacccgcgtgccgtttccggggctgttacgcccccgcctcgtccgccttcccgccgcgatagcatgaaacgtcgtgaggctctgcttcgtggtaaagagggaagcagacagaggcgcagatgggagaacgaccgtctcgtcggtgtccccaatgcgatccctcccgagccgcaggactgggttcctcgacccacgcaccccgtcaaccacgtcccataccaggttgcggcgcactgggaactccatgtgcggcgtgaggttgagagccggaatgcagcgcttgtcaagcgcaagcaggctctcacgcggacgctgggcgatgagggcgtagctggccgtgtccctcgtgagctttgccttcgcgccaagaagactccagccgtccgcacttgggttcgctcgctcgaagagcccgttaggaagtatcttgtcgagcgccaagtcgccaaggagaccgagaatgatttgaagacagatgatagtgaaagtttcagtgatagtatggactccgaagatgaagaaatagtcttcgttggtcggaatggatcgatgcgcgacggtaggggcagtagtaagactaagcctcaagatgtttcgtggaaaaaggctcgtcgtcagcaagagggtcaggccaaagacgagggcatgttgttcgacactcatggcgacgaggatggtggtaattttagacgctggatcacgcattcgatttctgactattatggactgcaatcgcgctccgttttggtcggcgatcctaagcgcaaggtcgtgtatgttggcatcaagcagatgaagactggccatgctccacacgtgcatgccgaggctctgccgcgacctctttggactctttgctgagacgtgaacttatagtctgcatggcatggtagttggcagttatagtggtttgtatacaagcatcagaatcttcacttcgatatattggtagatgttctagaatactatcaaaacatatatttgcgattaagaggctttgacgacatagttaagaaacgatggtgcgatttatgtccccgtcccgcgta

SEQ ID NO: 11956 - DNA, 1977 bp, Muscodor strobelii
  misc_feature: SGI cDNA ID NO. 563858
  misc_feature: Encodes the peptide sequence at SEQ ID NO 11957
atggaatcccgcgggaattccgctagcgagcggccctcgaggaatcgccttgctattcctcgcaagtctgtaagtacacccacatccctcgcacagtgggccatgaaactaatgagaacaagtgtgacaattgtcgagcgcggaagtactgtggcgccgaagaccacgacagccaagcaaagggtattggtttcggcgaaatatgagaagaaaatcgatgagatcgcggagggcatcgatgatttaaagattctgatcaagcagctcgacagtcgaacaattccaaagcgagctaaagaccaccacgagacatcacatcagcttccaccaagcccaggtcagactggtacatctagtgaaggcgtccaggagatcaccaaagagcctattctctgggatcattctgcacaggtcaccgactttgtcagaaccattgcagaagatggtgcttcaagagagatcttgctccccgagagcgatatactcgccacgttgaaaaatcttgctcgaacgctggacgataatgttgctcgggacttgacatttcccgagataaggggtctgaagccaactaccgatcttcccatgccacctgcagaagctgccatacttgcacttagatgggctagagatcatcaatccctctttagaattgaagcaatcggtcgtatattgccactcgaaacttttacaaatatctgtcgcaaagtttatttcgcagttgatggatattccgacatcgagttcatactggctaatggatatttatcctatgtgttctcggaatacatcggatccgctggtgatcatgatctccgagcttattgcaaactttgcagacaaaatgcgcagttggctctgatgaggattccacttttgctaccggcgacgatggagactgttggtgcactggcttttggtgcaaccttcgcgatcgagacaagtcgggcgaccctagcgtggacatatatctctaacgccgcgagcctcgcacagtctctgagactgcatcgcctaggaaactctaaagaggacgagacggtactcgatgccaagatcaatctgttttggcttgtctatctgctagacaagagcttggcactccgactaggccgcctgtccaatatccaagacaccgaaatcaacacgccacggccgcagtatcgaggtacagctcgatgctcagacgctgcgaaaattcaaggcaagctttacgagcagctctatagtccaatgggtttaaagcgatccgatatggaacgaagtcaatctgcaagactactggctgctgagctggaagagattatcgccgagatcaaagaagactgcattgaatcgccgtctgttcagtacgcagaggatgtgatgcgagttgtctacttcaagatcgagttggtgaaacaactgtcgctgctctcattcatctaccgggctattcctgctccggttgggtcactcacgactatcacagacgaatccgccgccgcagcccgggaggcgctcgaatggcatcatcaatgcatgatggatgtaagaggctgtatagactctcaatttatgatggctagatacgtcaactggggcataactcatatgccattcatgcctttcagtatcttgttcactcgaatcatccagctggctgatggaactgacctcggcttattggaccggtttacagagtcacttctcaccgatgaatcgttcgtcgattcggtgacgcacccatatcggctgtacaacacattaagtcaggccgcacagctctatatccaacgagccgctgacaagaaccagcctttgaatgataatgctgtcgacccttggagtatatttgattttgcatccctaggagctgagaacaatatcgccatggctgatgcggagatggagggctacatcacgccagaaatgagcgggtggtattatggcaatcaacgctttatgagcttactcgacgacgatgtcatgttctag

SEQ ID NO: 11957 - protein, 658 aa, Muscodor strobelii
  misc_feature: SGI Peptide ID NO. 563858
  misc_feature (297)..(388): Pfam Id: PF04082 Pfam Desc: Fungal specific transcription factor domain
  misc_feature (41)..(656): NCBI GI: 121718950 Blast Desc: fungal specific transcription factor domain protein [Aspergillus clavatus NRRL 1] gi|119404441|gb|EAW14817.1| fungal specific transcription factor domain protein [Aspergillus NRRL 1]
  misc_feature (41)..(656): NCBI GI: 70985098 Blast Desc: C6 transcription factor [Aspergillus fumigatus Af293] gi|66845683|gb|EAL86017.1| C6 transcription factor, [Aspergillus fumigatus Af293]
  misc_feature (41)..(656): NCBI GI: 159126022 Blast Desc: C6 transcription factor, [Aspergillus fumigatus A1163]
  misc_feature (51)..(656): NCBI GI: 261353371 Blast Desc: fungal specific transcription factor domain-containing protein [Verticillium albo-atrum VaMs.102]
  misc_feature (34)..(656): NCBI GI: 145242366 Blast Desc: An09g04860 [Aspergillus niger] gi|134078348|emb|CAK40340.1| protein product [Aspergillus niger]
  misc_feature (233)..(658): NCBI GI: 256724165 Blast Desc: NECHADRAFT_53663 [Nectria haematococca mpVI 77-13-4]
  misc_feature (69)..(656): NCBI GI: 256721890 Blast Desc: NECHADRAFT_36964 [Nectria haematococca mpVI 77-13-4]
  misc_feature (59)..(592): NCBI GI: 119489882 Blast Desc: fungal specific transcription factor, [Neosartorya fischeri NRRL 181] gi|119411061|gb|EAW21004.1| fungal specific transcription factor, [Neosartorya fischeri NRRL 181]
  misc_feature (37)..(595): NCBI GI: 85089750 Blast Desc: NCU09974 [Neurospora crassa OR74A] gi|28919413|gb|EAA28856.1| [Neurospora crassa OR74A]
  misc_feature (69)..(635): NCBI GI: 256731469 Blast Desc: NECHADRAFT_48882 [Nectria haematococca mpVI 77-13-4]
MESRGNSASERPSRNRLAIPRKSVSTPTSLAQWAMKLMRTSVTIVERGSTVAPKTTTAKQRVLVSAKYEKKIDEIAEGIDDLKILIKQLDSRTIPKRAKDHHETSHQLPPSPGQTGTSSEGVQEITKEPILWDHSAQVTDFVRTIAEDGASREILLPESDILATLKNLARTLDDNVARDLTFPEIRGLKPTTDLPMPPAEAAILALRWARDHQSLFRIEAIGRILPLETFTNICRKVYFAVDGYSDIEFILANGYLSYVFSEYIGSAGDHDLRAYCKLCRQNAQLALMRIPLLLPATMETVGALAFGATFAIETSRATLAWTYISNAASLAQSLRLHRLGNSKEDETVLDAKINLFWLVYLLDKSLALRLGRLSNIQDTEINTPRPQYRGTARCSDAAKIQGKLYEQLYSPMGLKRSDMERSQSARLLAAELEEIIAEIKEDCIESPSVQYAEDVMRVVYFKIELVKQLSLLSFIYRAIPAPVGSLTTITDESAAAAREALEWHHQCMMDVRGCIDSQFMMARYVNWGITHMPFMPFSILFTRIIQLADGTDLGLLDRFTESLLTDESFVDSVTHPYRLYNTLSQAAQLYIQRAADKNQPLNDNAVDPWSIFDFASLGAENNIAMADAEMEGYITPEMSGWYYGNQRFMSLLDDDVMF

SEQ ID NO: 11958 - DNA, 2899 bp, Muscodor strobelii
  misc_feature: SGI EST ID NO. CUFF.28309.0
  misc_feature: Variant of the nucleotide sequence at SEQ ID NO 11956
gtgagagactctggatctgttcttcagtccgagccgcggcaaagatgctactccgaggaatcatggcaagctcacgctctgccaataccgtgacaaggcttcctccaatataaccggcagcaccagtaataagaatattagaaaccattgttgcgtaattcgttcaattctaattgacaagttctattgactactttacttgttccgatgcgttcatacaagaggcgggacaacgtcctcattttatatcttcatgatgtgaggccatttttgatatcacagatcgcatacttgctatcatccaagcatctgccactggatctcatcgagtcgtgtctgttcggcgtacggaacatgttgaattgacgatcggttcagttgtgttttataagattggtaatatttgaggattatcgacccaccgggaatccgcgtaaatccgagatggcactcaactcatcaacgccatgctctttctaagcctcgcttcatctctaaatcatttcgcatcccctctgccatagatatggaatcccgcgggaattccgctagcgagcggccctcgaggaatcgccttgctattcctcgcaagtctgtaagtacacccacatccctcgcacagtgggccatgaaactaatgagaacaagtgtgacaattgtcgagcgcggaaggtaatacgctccgtgtttgtaaatctcggtctattggaaatcaaaatctgtgctccggcgttttgattaacatattttgaaggtcggctgcgatcggggatcaccctgctcgaactgtttatcgtcaaaacttgactgtacttttagtactgtggcgccgaagaccacgacagccaagcaaagggtattggtttcggcgaaatatgagaagaaaatcgatgagatcgcggagggcatcgatgatttaaagattctgatcaagcagctcgacagtcgaacaattccaaagcgagctaaagaccaccacgagacatcacatcagcttccaccaagcccaggtcagactggtacatctagtgaaggcgtccaggagatcaccaaagagcctattctctgggatcattctgcacaggtcaccgactttgtcagaaccattgcagaagatggtgcttcaagagagatcttgctccccgagagcgatatactcgccacgttgaaaaatcttgctcgaacgctggacgataatgttgctcgggacttgacatttcccgagataaggggtctgaagccaactaccgatcttcccatgccacctgcagaagctgccatacttgcacttagatgggctagagatcatcaatccctctttagaattgaagcaatcggtcgtatattgccactcgaaacttttacaaatatctgtcgcaaagtttatttcgcagttgatggatattccgacatcgagttcatactggctaatggatatttatcctatgtgttctcggaatacatcggatccgctggtgatcatgatctccgagcttattgcaaactttgcagacaaaatgcgcagttggctctgatgaggattccacttttgctaccggcgacgatggagactgttggtgcactggcttttggtgcaaccttcgcgatcgagacaagtcgggcgaccctagcgtggacatatatctctaacgccgcgagcctcgcacagtctctgagactgcatcgcctaggaaactctaaagaggacgagacggtactcgatgccaagatcaatctgttttggcttgtctatctgctagacaagagcttggcactccgactaggccgcctgtccaatatccaagacaccgaaatcaacacgccacggccgcagtatcgaggtacagctcgatgctcagacgctgcgaaaattcaaggcaagctttacgagcagctctatagtccaatgggtttaaagcgatccgatatggaacgaagtcaatctgcaagactactggctgctgagctggaagagattatcgccgagatcaaagaagactgcattgaatcgccgtctgttcagtacgcagaggatgtgatgcgagttgtctacttcaagatcgagttggtgaaacaactgtcgctgctctcattcatctaccgggctattcctgctccggttgggtcactcacgactatcacagacgaatccgccgccgcagcccgggaggcgctcgaatggcatcatcaatgcatgatggatgtaagaggctgtatagactctcaatttatgatggctagatacgtcaactggggcataactcatatgccattcatgcctttcagtatcttgttcactcgaatcatccagctggctgatggaactgacctcggcttattggaccggtttacagagtcacttctcaccgatgaatcgttcgtcgattcggtgacgcacccatatcggctgtacaacacattaagtcaggccgcacagctctatatccaacgagccgctgacaagaaccagcctttgaatgataatgctgtcgacccttggagtatatttgattttgcatccctaggagctgagaacaatatcgccatggctgatgcggagatggagggctacatcacgccagaaatgagcgggtggtattatggcaatcaacgctttatgagcttactcgacgacgatgtcatgttctaggatcgctctattataaggcgaaatttgggctttcgagagcagcatttcacttggaatttttttcggagaggtgtacctagcaacgagatgtaagaaatgtgatgtacaatagagacaacagtcggcaactcactacagttacccttccagcacagtcattctcgttcatgatacttattgtctgtaatgcattgtcctcatgttgatttcttctgaaaactcaaccttgatacttttgttgcttcaatc

SEQ ID NO: 11959 - DNA, 1116 bp, Muscodor strobelii
  misc_feature: SGI cDNA ID NO. 563859
  misc_feature: Encodes the peptide sequence at SEQ ID NO 11960
atggtttctaatattcttattactggtgctgccggttatattggaggaagccttgtcacggtattggcagagcgtgagcttgccatgattcctcggagtagcatctttgccgcggctcggactgaagaacagatccagagtctctcacctttaggcgtcaatgtcctcagcttcgatgtactcgatgagcaggcagtagccgatgcggtgctcaagaacgagattgacatcatcattcacactgctgggtcgatcgacccaagcatgacggtctacctgatcaaggctttgggtcaacgccgcaaagttaccgggaagccggtcttccatatccactcttccgttagcaccggtttttctaagggcggaggttggccctatgggacagtgaaagataacgacccaatctacaagcttgagaaagagttgaatgatgatttccctattcgaaaggtagcagaaaatattgagaatgtctacttggatataacactaaactcgtcgcagactgatatcatcataattgaaacagccgaagcccaaggggtaacaaacttcattctgcccattcctttagtttacggcgcaggaagtggcccgtggaagaagctttctcagcagataccagctgcgatcaagtctggcatcgctaagaagaccgttcacaaattcgacgacgacagcgtgaatatggcgatccacgtgaatgacctcgcgcactactacaagtctttggtagagaaaatcctgcagggagaaaaacttccaaatggcaagcatggctattattttcccattgcccactcaattagttggtggaaggctgccgaccgtatcgcggaagtgctccacgctcgcgggcttgtgacacaaccaacggccggtgtatgggaaagcgaggacgcggcttcggattcccttcaactgcctcgtgctttcgtcagacttatgttcacttgcgtcgtcgacatcgacttcaagaatggctatcctcttggatggaagccagtttggaacgaggagaagttctacgagaatctcgaaaacgaggtcgatgctaccttgaagtacgacgacaagggggaaagtacattgttcgatgcgctgaagaaatga

SEQ ID NO: 11960 - protein, 371 aa, Muscodor strobelii
  misc_feature: SGI Peptide ID NO. 563859
  misc_feature (5)..(267): Pfam Id: PF01370 Pfam Desc: NAD dependent epimerase/dehydratase family
  misc_feature (6)..(86): Pfam Id: PF01073 Pfam Desc: 3-beta hydroxysteroid dehydrogenase/isomerase family
  misc_feature (3)..(83): Pfam Id: PF00106 Pfam Desc: short chain dehydrogenase
  misc_feature (5)..(90): Pfam Id: PF01370 Pfam Desc: NAD dependent epimerase/dehydratase family
  misc_feature (5)..(25): Pfam Id: PF05368 Pfam Desc: NmrA-like family
  misc_feature (1)..(369): NCBI GI: 46115436 Blast Desc: FG03560.1 [Gibberella zeae PH-1]
  misc_feature (1)..(370): NCBI GI: 256724265 Blast Desc: NECHADRAFT_97613 [Nectria haematococca mpVI 77-13-4]
  misc_feature (1)..(370): NCBI GI: 116214431 Blast Desc: CHGG_11056 [Chaetomium globosum CBS 148.51] gi|88175411|gb|EAQ82880.1| CHGG_11056 [Chaetomium globosum CBS 148.51]
  misc_feature (4)..(360): NCBI GI: 145247692 Blast Desc: An12g10490 [Aspergillus niger] gi|134080837|emb|CAK41396.1| protein product [Aspergillus niger]
  misc_feature (1)..(357): NCBI GI: 256728158 Blast Desc: NECHADRAFT_97774 [Nectria haematococca mpVI 77-13-4]
  misc_feature (1)..(358): NCBI GI: 119487610 Blast Desc: NFIA_030730 [Neosartorya fischeri NRRL 181] gi|119410694|gb|EAW20640.1| conserved [Neosartorya fischeri NRRL 181]
  misc_feature (1)..(356): NCBI GI: 145250903 Blast Desc: An15g04300 [Aspergillus niger] gi|134082490|emb|CAK97297.1| protein product [Aspergillus niger]
  misc_feature (1)..(356): NCBI GI: 238502221 Blast Desc: conserved [Aspergillus flavus NRRL3357] gi|220691154|gb|EED47502.1| conserved [Aspergillus flavus NRRL3357]
  misc_feature (4)..(359): NCBI GI: 67904330 Blast Desc: AN9152.2 [Aspergillus nidulans FGSC A4] gi|40742795|gb|EAA61985.1| AN9152.2 [Aspergillus nidulans FGSC A4] gi|259485428|tpe|CBF82442.1| TPA: conserved [Aspergillus FGSC
  misc_feature (4)..(356): NCBI GI: 46111867 Blast Desc: FG02815.1 [Gibberella zeae PH-1]
MVSNILITGAAGYIGGSLVTVLAERELAMIPRSSIFAAARTEEQIQSLSPLGVNVLSFDVLDEQAVADAVLKNEIDIIIHTAGSIDPSMTVYLIKALGQRRKVTGKPVFHIHSSVSTGFSKGGGWPYGTVKDNDPIYKLEKELNDDFPIRKVAENIENVYLDITLNSSQTDIIIIETAEAQGVTNFILPIPLVYGAGSGPWKKLSQQIPAAIKSGIAKKTVHKFDDDSVNMAIHVNDLAHYYKSLVEKILQGEKLPNGKHGYYFPIAHSISWWKAADRIAEVLHARGLVTQPTAGVWESEDAASDSLQLPRAFVRLMFTCVVDIDFKNGYPLGWKPVWNEEKFYENLENEVDATLKYDDKGESTLFDALKK

SEQ ID NO: 11961 - DNA, 1026 bp, Muscodor strobelii
  misc_feature: SGI cDNA ID NO. 563860
  misc_feature: Encodes the peptide sequence at SEQ ID NO 11962
atgcatggatcgcgtctcatatctctcttcgcactcctattgacagcgagctgcactccagtgtcaaatttcaagcccaatttttgccatcttcccaaacgtctcatagcgctagaagagcatgtggtctcgccgtctctagaagacgaggttatcgcctccggtgtcgtccagaatactgcacccggcaccctcgacaaactcaaggatgtcggtgccggccgcttagcttccatggatgctggcaggattactctagaagtcctgtctcagcagtcggcttctggctctgaggacccagagggttgtcgccaggcgaacaatgccattcgatccgccattaacgccaacccgaagcgtttcgccggcttcgcggttctacctatgtctgatcctaccgcttctgctgccgagctaaagcgaggcgtcacaagcctcggcctgaaaggcgccatgatctggaatcatctcaaggatggtacatattacgatgacgcgcgatttgaccctgtctttgccatggccgaaaagctcgacgtgcctctctaccttcacccagcagccccgacccgtgacattttcgcggagctcttcgcgggaaattacaatgctactacggctggacgtctcagcaccaactcatggggctggcatgtcgatgtcggaacccatatcctgcggctttacggcgcgggtctcttcgaccggttccctaagctcaaggtcatcatcggccacaacggcgaagatctgcctatgttcattgatagaatcgattcaacgggcttgagaacagacgccaaattcgacaaggtctggaacaccaatatctgggtgacaacgagcgccttcttcaccgtacgcacctttcagcagctacggcaagttacgcctatcgagaggatcatgtattcggtcgactacccctttagcaccaccgagaatggttggagcttcatacaggaactcgcaaagagtaacgtcttgacgagtgccgagatggagttattcgcgtggcatgtataa

SEQ ID NO: 11962 - protein, 341 aa, Muscodor strobelii
  misc_feature: SGI Peptide ID NO. 563860
  misc_feature (69)..(341): Pfam Id: PF04909 Pfam Desc: Amidohydrolase
  misc_feature (75)..(340): Pfam Id: PF04909 Pfam Desc: Amidohydrolase
  misc_feature (29)..(339): NCBI GI: 169617495 Blast Desc: SNOG_11927 [Phaeosphaeria nodorum SN15] gi|111059851|gb|EAT80971.1| SNOG_11927 [Phaeosphaeria nodorum SN15]
  misc_feature (1)..(339): NCBI GI: 189194443 Blast Desc: amidohydrolase family protein [Pyrenophora tritici-repentis Pt-1C-BFP] gi|187979124|gb|EDU45750.1| amidohydrolase family protein [Pyrenophora tritici-repentis
  misc_feature (32)..(336): NCBI GI: 145233163 Blast Desc: An02g08220 [Aspergillus niger] gi|134056880|emb|CAK37784.1| protein product [Aspergillus niger]
  misc_feature (35)..(340): NCBI GI: 169781004 Blast Desc: [Aspergillus oryzae RIB40] gi|238504768|ref|XP_002383613.1| 2-amino-3-carboxymuconate-6-semialdehyde decarboxylase, flavus
  misc_feature (35)..(339): NCBI GI: 67901848 Blast Desc: AN7911.2 [Aspergillus nidulans FGSC A4] gi|40740375|gb|EAA59565.1| AN7911.2 [Aspergillus nidulans FGSC A4] gi|259480660|tpe|CBF73507.1| TPA: conserved [Aspergillus FGSC
  misc_feature (35)..(333): NCBI GI: 242824594 Blast Desc: 2-amino-3-carboxymuconate-6-semialdehyde decarboxylase, [Talaromyces stipitatus ATCC 10500] gi|218713211|gb|EED12636.1| decarboxylase, [Talaromyces ATCC
  misc_feature (35)..(333): NCBI GI: 212546025 Blast Desc: 2,3-dihydroxybenzoic acid decarboxylase, [Penicillium marneffei ATCC 18224] gi|210064686|gb|EEA18781.1| 2,3-dihydroxybenzoic acid decarboxylase, [Penicillium marneffei
  misc_feature (35)..(339): NCBI GI: 256723505 Blast Desc: NECHADRAFT_93978 [Nectria haematococca mpVI 77-13-4]
  misc_feature (35)..(339): NCBI GI: 256723398 Blast Desc: NECHADRAFT_55715 [Nectria haematococca mpVI 77-13-4]
  misc_feature (31)..(339): NCBI GI: 67523323 Blast Desc: AN2118.2 [Aspergillus nidulans FGSC A4] gi|40745794|gb|EAA64950.1| AN2118.2 [Aspergillus nidulans FGSC A4] gi|259487492|tpe|CBF86213.1| TPA: conserved [Aspergillus FGSC
  misc_feature (36)..(312): SWISSPROT Homolog: EC 4.1.1.46 o-pyrocatechuate decarboxylase
MHGSRLISLFALLLTASCTPVSNFKPNFCHLPKRLIALEEHVVSPSLEDEVIASGVVQNTAPGTLDKLKDVGAGRLASMDAGRITLEVLSQQSASGSEDPEGCRQANNAIRSAINANPKRFAGFAVLPMSDPTASAAELKRGVTSLGLKGAMIWNHLKDGTYYDDARFDPVFAMAEKLDVPLYLHPAAPTRDIFAELFAGNYNATTAGRLSTNSWGWHVDVGTHILRLYGAGLFDRFPKLKVIIGHNGEDLPMFIDRIDSTGLRTDAKFDKVWNTNIWVTTSAFFTVRTFQQLRQVTPIERIMYSVDYPFSTTENGWSFIQELAKSNVLTSAEMELFAWHV

SEQ ID NO: 11963 - DNA, 136 bp, Muscodor strobelii
  misc_feature: SGI EST ID NO. CUFF.28323.0
  misc_feature: Variant of the nucleotide sequence at SEQ ID NO 11961
tcctgtctcagcagtcggcttctggctctgaggacccagagggttgtcgccaggcgaacaatgccattcgatccgccattaacgccaacccgaagcgtttcgccggcttcgcggttctacctatgtctgatcctac

SEQ ID NO: 11964 - DNA, 1173 bp, Muscodor strobelii
  misc_feature: SGI cDNA ID NO. 563861
  misc_feature: Encodes the peptide sequence at SEQ ID NO 11965
atggcactatttccggatcctggtccaacgagttcatgtttgcagcaaggaaccggtacgaattttctaagcggagcttcgcgtttcaacttacaatgtggctcattgatgagtgggaacgacctcgagcaacagttccaaatgacatttgaagcatgtatgggcgcttgcgcttcgaatccgaaatgtggcggtgttagttacgctgcatcgcaagacgcgggtttcaagaattgttacttaaagacgccatttacggaatcgcaactcgttgcaatgcctgggatcgactcggcgttcattgcgaacgatagcgtcgctgctgttgtgagtgccgagccagagtcagtcacggatgttgcttcggcagcaccggccgtaactattgtcgcaacacccacaatcagcgtgatcacggaatctggcactactcttactgtttctgtaccggtaacaggcaccgctgtgtctggtacaagcgcacttgcagatatcgcaaccacatctgctgctgcatctggccaaagtaatgcaagtaatagcggtaatggacggccgccgaagttcacctcgctcggaacatcgtcttcgtctaatgcgtggatcgccgcccccgtcatcggcggcgtggctgcattcacgctgatattagccgtgttcatcctctggggccggaggaggcggcgagacaatccacgtccgagcacagacagcagagatcttgagccgatgtcaaaaggtccaatgggtaatttcacttttggctttggaaatgttgcggatcgtatctctcgcggacgtttcttcggcgcagaaagatccaaattagaagactctgacaacgaaacaatatcccggtatggcagcagtcgaggcgggttcaaagtagtgagtggcagtggccgtcgactaggcttcggcggataccctggaactggaccgggaatgggcgggatgatcgtcacgggggctggcggacaaaaggtcgggtcgtttggaaccagcagaactaatagcagggagagtaaggaaagccgaccggaaagtagagcaggtagctcggctgggttgcgggatagtcagaatgggctacgacagaatcgtttgactggaaactgggcggaagctctcccaggcatcccacccgagttctccggcccggaggtgaaatga

SEQ ID NO: 11965 - protein, 390 aa, Muscodor strobelii
  misc_feature: SGI Peptide ID NO. 563861
  misc_feature (29)..(235): NCBI GI: 171691154 Blast Desc: protein product [Podospora anserina] gi|170945525|emb|CAP71637.1| protein product [Podospora anserina]
  misc_feature (25)..(230): NCBI GI: 145613728 Blast Desc: [Magnaporthe grisea 70-15] gi|145020760|gb|EDK04889.1| [Magnaporthe grisea 70-15]
  misc_feature (49)..(230): NCBI GI: 212546593 Blast Desc: PMAA_013290 [Penicillium marneffei ATCC 18224] gi|210064970|gb|EEA19065.1| PMAA_013290 [Penicillium marneffei ATCC 18224]
  misc_feature (7)..(82): NCBI GI: 169619004 Blast Desc: SNOG_12695 [Phaeosphaeria nodorum SN15] gi|160703726|gb|EAT79993.2| SNOG_12695 [Phaeosphaeria nodorum SN15]
  misc_feature (2)..(135): NCBI GI: 261336162 Blast Desc: [Alternaria alternata]
  misc_feature (29)..(165): NCBI GI: 189210587 Blast Desc: [Pyrenophora tritici-repentis Pt-1C-BFP] gi|187977718|gb|EDU44344.1| [Pyrenophora tritici-repentis Pt-1C-BFP]
MALFPDPGPTSSCLQQGTGTNFLSGASRFNLQCGSLMSGNDLEQQFQMTFEACMGACASNPKCGGVSYAASQDAGFKNCYLKTPFTESQLVAMPGIDSAFIANDSVAAVVSAEPESVTDVASAAPAVTIVATPTISVITESGTTLTVSVPVTGTAVSGTSALADIATTSAAASGQSNASNSGNGRPPKFTSLGTSSSSNAWIAAPVIGGVAAFTLILAVFILWGRRRRRDNPRPSTDSRDLEPMSKGPMGNFTFGFGNVADRISRGRFFGAERSKLEDSDNETISRYGSSRGGFKVVSGSGRRLGFGGYPGTGPGMGGMIVTGAGGQKVGSFGTSRTNSRESKESRPESRAGSSAGLRDSQNGLRQNRLTGNWAEALPGIPPEFSGPEVK

SEQ ID NO: 11966 - DNA, 1265 bp, Muscodor strobelii
  misc_feature: SGI EST ID NO. CUFF.28335.0
  misc_feature: Variant of the nucleotide sequence at SEQ ID NO 11964
cgagttcatgtttgcagcaaggaaccggtacgaattttctaagcggagcttcgcgtttcaacttacaatgtggctcattgatgagtgggaacgacctcgagcaacagttccaaatgacatttgaagcatgtatgggcgcttgcgcttcgaatccgaaatgtggcggtgttagttacgctgcatcgcaagacgcgggtttcaagaattgttacttaaagacgccatttacggaatcgcaactcgttgcaatgcctgggatcgactcggcgttcattgcgaacgatagcgtcgctgctgttgtgagtgccgagccagagtcagtcacggatgttgcttcggcagcaccggccgtaactattgtcgcaacacccacaatcagcgtgatcacggaatctggcactactcttactgtttctgtaccggtaacaggcaccgctgtgtctggtacaagcgcacttgcagatatcgcaaccacatctgctgctgcatctggccaaagtaatgcaagtaatagcggtaatggacggccgccgaagttcacctcgctcggaacatcgtcttcgtctaatgcgtggatcgccgcccccgtcatcggcggcgtggctgcattcacgctgatattagccgtgttcatcctctggggccggaggaggcggcgagacaatccacgtccgagcacagacagcagagatcttgagccgatgtcaaaaggtccaatgggtaatttcacttttggctttggaaatgttgcggatcgtatctctcgcggacgtttcttcggcgcagaaagatccaaattagaagactctgacaacgaaacaatatcccggtatggcagcagtcgaggcgggttcaaagtagtgagtggcagtggccgtcgactaggcttcggcggataccctggaactggaccgggaatgggcgggatgatcgtcacgggggctggcggacaaaaggtcgggtcgtttggaaccagcagaactaatagcagggagagtaaggaaagccgaccggaaagtagagcaggtagctcggctgggttgcgggatagtcagaatgggctacgacagaatcgtttgactggaaactgggcggaagctctcccaggcatcccacccgagttctccggcccggaggtgaaatgagcactatgatatgcagtgttccgacacaaattagaagttcgaatgtagagttgtgcgttagatacccttgcggtttagatagggatgggttaggaagcactgttcgggtttggatcgggg

SEQ ID NO: 11967 - DNA, 1035 bp, Muscodor strobelii
  misc_feature: SGI cDNA ID NO. 563862
  misc_feature: Encodes the peptide sequence at SEQ ID NO 11968
atggacggtctaatggagagcctcatggaggaccgatgccagctcctccgcgagggcggcgtcaccaacttcttcatatccattctcatcattctcggaatcatgctctcctacgttacgcagcactatcggattatctctcgtggctcttctgagggcatatctccctactttgtgctacttggtgtcacctcggccaacgctcagtttggcaatatcctagtccttcccgagtcacgcgccgatgtcgcttgctgtaaggaagtgagcccgttcgagtgcactgctggcctgctgggcatcgttcagatcggaacccagtgggtctgttttgccatcattctggtactattcttagtcttcttccgacgcgacgatgccgatctcgacgacgaggagcttgaacgagaccctgatcgaccatcctggaggacagctctcggagttggtggcctttgccttctccatggtctgcttgtcgtcattgtttccgcagcacttgccttcggcgctccagcgtatttgggtgcgtgggccaatatccttggcatcatgtctgccgcccttgctgctgttcaatacatcccgcagatctggacaacttacaagttgaaacacgccggcagtttgagcatattgatgatgaccatccagacgcccggtgggtttctgtttgctgccagtctcgctgctcggctgggttggagaggttggagctcctggggcgtctacgttttaactgctttcatgcaaggcattctattgagtatggcaatcagatacgagtgggaggcgcatcgaggtgcaacaactcaaagtcgctcgtcctcacccgcaccacaacggcctatttataatcggcgcacgacaccgagggttctcccttctccgggcccttactcggcgcacctacaagcgtacgctgacacacaggaagaaatcgaacaggcacttgatcgtgagagcatacaaggcgtcggtgaaaaccagcccttattagctcctggtgggatagggagttcgggagtgcgatga

SEQ ID NO: 11968 - protein, 344 aa, Muscodor strobelii
  misc_feature: SGI Peptide ID NO. 563862
  misc_feature (178)..(243): Pfam Id: PF04193 Pfam Desc: PQ loop repeat
  misc_feature (11)..(340): NCBI GI: 145613730 Blast Desc: MGG_01407 [Magnaporthe grisea 70-15] gi|145020761|gb|EDK04890.1| MGG_01407 [Magnaporthe grisea 70-15]
  misc_feature (10)..(340): NCBI GI: 46121753 Blast Desc: FG05255.1 [Gibberella zeae PH-1]
  misc_feature (10)..(340): NCBI GI: 256726831 Blast Desc: [Nectria haematococca mpVI 77-13-4]
  misc_feature (5)..(340): NCBI GI: 171691156 Blast Desc: protein product [Podospora anserina] gi|170945526|emb|CAP71638.1| protein product [Podospora anserina]
  misc_feature (5)..(333): NCBI GI: 85107321 Blast Desc: NCU06610 [Neurospora crassa OR74A] gi|28923956|gb|EAA33116.1| conserved [Neurospora crassa OR74A]
  misc_feature (10)..(341): NCBI GI: 116195202 Blast Desc: CHGG_04199 [Chaetomium globosum CBS 148.51] gi|88180112|gb|EAQ87580.1| CHGG_04199 [Chaetomium globosum CBS 148.51]
  misc_feature (9)..(267): NCBI GI: 154309149 Blast Desc: BC1G_07469 [Botryotinia fuckeliana B05.10] gi|150852512|gb|EDN27704.1| BC1G_07469 [Botryotinia fuckeliana B05.10]
  misc_feature (9)..(287): NCBI GI: 119187131 Blast Desc: CIMG_03613 [Coccidioides immitis RS]
  misc_feature (9)..(287): NCBI GI: 240108311 Blast Desc: CPC735_006570 [Coccidioides posadasii C735 delta SOWgp]
  misc_feature (9)..(279): NCBI GI: 238838225 Blast Desc: PQ loop repeat protein [Microsporum canis CBS 113480]
MDGLMESLMEDRCQLLREGGVTNFFISILIILGIMLSYVTQHYRIISRGSSEGISPYFVLLGVTSANAQFGNILVLPESRADVACCKEVSPFECTAGLLGIVQIGTQWVCFAIILVLFLVFFRRDDADLDDEELERDPDRPSWRTALGVGGLCLLHGLLVVIVSAALAFGAPAYLGAWANILGIMSAALAAVQYIPQIWTTYKLKHAGSLSILMMTIQTPGGFLFAASLAARLGWRGWSSWGVYVLTAFMQGILLSMAIRYEWEAHRGATTQSRSSSPAPQRPIYNRRTTPRVLPSPGPYSAHLQAYADTQEEIEQALDRESIQGVGENQPLLAPGGIGSSGVR

SEQ ID NO: 11969 - DNA, 1812 bp, Muscodor strobelii
  misc_feature: SGI EST ID NO. CUFF.28378.0
  misc_feature: Variant of the nucleotide sequence at SEQ ID NO 11967
tttagacttcgtttcctagctgttcaggccgttgttggagtttgactcgcgagctcgtagctgactgactcttcgcggcgctcaacgtccagttgaatcacatccgtttcacgagtgccatccgttggcctatggccagcatgaccacccttggctaacgaataccctgtccataccgcgatccaccctgagtcaagatatcgccgacaacaacggtatatgttacctaacccatgagctgccatcattccatcaggtcagaaatatagactatcatactgtcaacttgccagcaagcttcgattcatctctgtattcctgggtttctccatgccaactacggtgaataatacccacatcgactatcgactctcgtccaattcacaatcactatggacggtctaatggagagcctcatggaggaccgatgccagctcctccgcgagggcggcgtcaccaacttcttcatatccattctcatcattctcggaatcatgctctcctacgttacgcagcactatcggattatctctcgtggctcttctgagggcatatctccctactttgtgctacttggtgtcacctcggccaacgctcagtttggcaatatcctagtccttcccgagtcacgcgccgatgtcgcttgctgtaaggaagtgagcccgttcgagtgcactgctggcctgctgggcatcgttcagatcggaacccagtgggtctgttttgccatcattctggtactattcttagtcttcttccgacgcgacgatgccgatctcgacgacgaggagcttgaacgagaccctgatcgaccatcctggaggacagctctcggagttggtggcctttgccttctccatggtctgcttgtcgtcattgtttccgcagcacttgccttcggcgctccagcgtatttgggtgcgtgggccaatatccttggcatcatgtctgccgcccttgctgctgttcaatacatcccgcagatctggacaacttacaagttgaaacacgccggcagtttgagcatattgatgatgaccatccagacgcccggtgggtttctgtttgctgccagtctcgctgctcggctgggttggagaggttggagctcctggggcgtctacgttttaactgctttcatgcaaggcattctattgagtatggcaatcagatacgagtgggaggcgcatcgaggtgcaacaactcaaagtcgctcgtcctcacccgcaccacaacggcctatttataatcggcgcacgacaccgagggttctcccttctccgggcccttactcggcgcacctacaagcgtacgctgacacacaggaagaaatcgaacaggcacttgatcgtgagagcatacaaggcgtcggtgaaaaccagcccttattagctcctggtgggatagggagttcgggagtgcgatgagtcacgacctgagcccttcggctccttgcacttaaattgaagcgcgtgtagcaagtattatgattactacctgtgctggtgccgttggaaatgcaatgtgacaggactcaaacgtctgtattgtatatatagtttcctggaaggaaaaattatcaaaagcttgcaaatatcgacggcctaaagtcctacatcttggatagattggtccaccatgcggagcatgcagataccccgaatgcacatgaaacaccgtcactggtccatatcgagcatccataatagcactagttcgtgattttaagctcgatgaccctcgtgtacgtgtagaaatgacagcacgaacatttgagccaagtattcacttacgttctttgtgatactgtat

SEQ ID NO: 11970 - DNA, 1401 bp, Muscodor strobelii
  misc_feature: SGI cDNA ID NO. 563863
  misc_feature: Encodes the peptide sequence at SEQ ID NO 11971
atgaccaccgatcctgacactccacaggacaaggtaaagctcgtggcctcgacaggagacatcaccagagatgccagtgcagccaactcaatcagcggagatcaccatgatatacgcggctactttgagagcgcccaatggaccgcagacggcaccgccatcctaacatactcctctgaaaatctcatttccggctacattgtgcccgaaaatctcctttcagctcatgatgaaccactctcacttatcccacaggcgacaattcagctcccagaaccaagcaatgtgctttgcggtgcaccctacttctctctcgttgagccgtggtctcaacagctgctcgtctcagcccgcgatcatcccatccagctcttctacctcgctccttcaacaccaacctctcactcccccatctcctcctatcccttcaccaaagcccgcagcgagacattcctcacagcaacatctctcctctggtcaaccccagggacccatttcatagcaagttcccgcagtctcctcgcgcgtttcgacatatcacgcacaggggacgagccactgacccgcatccgaaccattccctcagaacggcacatcgcaaagggaaatggtattggtatgcggggtaccgtatctgcgctaggcgctcaacccactgatccgggaaatggcgcaagcctcgtcgctgcggggacttggacccggtggattggattgtacgacttcgctcaggcgggtgaatgtgccgccacgtggagtatcacatccgcggtgagggatgcatctccaacatatggaagtgatataggcggtgacgggataacgcagacggtctggagtccttgcggtcgttatcttgtcgtcgccgagcgaaaatcactgggtgcgttgatctacgatgtccgtgtggcgggaaaactgcttggatacgtcaatgggcgtgacgcgctggggaatcagcgcgtagctttagatgtctaccctggtactgacgaacagagcggattcgagatctggtctgggagctcaagtggcgcagtgagagtgtgggaaggtgtcggaaaccaagagggtgcatacgagccctcgtggggatgggatgcgcatcattctacagtgggcagcgcgtgtattcatcctagcggtacagtggtggcgacctgtgccggctcgtgggaatatcctgacgagggttgcaatacatcccagaacggtctggacccggagacacgcagaagccatggtgagagtgggagtgaaatcactgattccgatcaggagctgcattggatgagccgacggaacaaagagagcagtctaaagatctggagcatatcggctctacagagcaacgtggagggaactttgaggcataatgaggacgacaaggcgcaaagctga

SEQ ID NO: 11971 - protein, 466 aa, Muscodor strobelii
  misc_feature: SGI Peptide ID NO. 563863
  misc_feature (41)..(393): NCBI GI: 171691158 Blast Desc: protein product [Podospora anserina] gi|170945527|emb|CAP71639.1| protein product [Podospora anserina]
  misc_feature (33)..(390): NCBI GI: 154317669 Blast Desc: BC1G_03186 [Botryotinia fuckeliana B05.10] gi|150844360|gb|EDN19553.1| BC1G_03186 [Botryotinia fuckeliana B05.10]
  misc_feature (23)..(445): NCBI GI: 156031281 Blast Desc: SS1G_14062 [Sclerotinia sclerotiorum 1980] gi|154699464|gb|EDN99202.1| SS1G_14062 [Sclerotinia sclerotiorum 1980]
  misc_feature (41)..(447): NCBI GI: 145613732 Blast Desc: MGG_01406 [Magnaporthe grisea 70-15] gi|145020762|gb|EDK04891.1| MGG_01406 [Magnaporthe grisea 70-15]
  misc_feature (4)..(398): NCBI GI: 261352642 Blast Desc: WD repeat-containing protein [Verticillium albo-atrum VaMs.102]
  misc_feature (41)..(397): NCBI GI: 46121755 Blast Desc: FG05256.1 [Gibberella zeae PH-1]
  misc_feature (1)..(394): NCBI GI: 256727401 Blast Desc: NECHADRAFT_33717 [Nectria haematococca mpVI 77-13-4]
  misc_feature (6)..(429): NCBI GI: 238840388 Blast Desc: WD repeat-containing protein 79 [Microsporum canis CBS 113480]
  misc_feature (36)..(445): NCBI GI: 116195200 Blast Desc: CHGG_04198 [Chaetomium globosum CBS 148.51] gi|88180111|gb|EAQ87579.1| CHGG_04198 [Chaetomium globosum CBS 148.51]
  misc_feature (29)..(445): NCBI GI: 225557306 Blast Desc: guanine nucleotide-binding protein [Ajellomyces capsulatus G186AR]
MTTDPDTPQDKVKLVASTGDITRDASAANSISGDHHDIRGYFESAQWTADGTAILTYSSENLISGYIVPENLLSAHDEPLSLIPQATIQLPEPSNVLCGAPYFSLVEPWSQQLLVSARDHPIQLFYLAPSTPTSHSPISSYPFTKARSETFLTATSLLWSTPGTHFIASSRSLLARFDISRTGDEPLTRIRTIPSERHIAKGNGIGMRGTVSALGAQPTDPGNGASLVAAGTWTRWIGLYDFAQAGECAATWSITSAVRDASPTYGSDIGGDGITQTVWSPCGRYLVVAERKSLGALIYDVRVAGKLLGYVNGRDALGNQRVALDVYPGTDEQSGFEIWSGSSSGAVRVWEGVGNQEGAYEPSWGWDAHHSTVGSACIHPSGTVVATCAGSWEYPDEGCNTSQNGLDPETRRSHGESGSEITDSDQELHWMSRRNKESSLKIWSISALQSNVEGTLRHNEDDKAQS

SEQ ID NO: 11972 - DNA, 1724 bp, Muscodor strobelii
  misc_feature: SGI EST ID NO. CUFF.28347.0
  misc_feature: Variant of the nucleotide sequence at SEQ ID NO 11970
ctgcatggggctgcttatggatactctcgataaggtatccagcttcaccaacatcttcaagaactcattatggccaacgattagtcttgtaagaatgagagtactgttgtctaggaatttgctacaaaaggaataatgtcaaaaccgacacgtattcaatatcataatcatgaccaccgatcctgacactccacaggacaaggtaaagctcgtggcctcgacaggagacatcaccagagatgccagtgcagccaactcaatcagcggagatcaccatgatatacgcggctactttgagagcgcccaatggaccgcagacggcaccgccatcctaacatactcctctgaaaatctcatttccggctacattgtgcccgaaaatctcctttcagctcatgatgaaccactctcacttatcccacaggcgacaattcagctcccagaaccaagcaatgtgctttgcggtgcaccctacttctctctcgttgagccgtggtctcaacagctgctcgtctcagcccgcgatcatcccatccagctcttctacctcgctccttcaacaccaacctctcactcccccatctcctcctatcccttcaccaaagcccgcagcgagacattcctcacagcaacatctctcctctggtcaaccccagggacccatttcatagcaagttcccgcagtctcctcgcgcgtttcgacatatcacgcacaggggacgagccactgacccgcatccgaaccattccctcagaacggcacatcgcaaagggaaatggtattggtatgcggggtaccgtatctgcgctaggcgctcaacccactgatccgggaaatggcgcaagcctcgtcgctgcggggacttggacccggtggattggattgtacgacttcgctcaggcgggtgaatgtgccgccacgtggagtatcacatccgcggtgagggatgcatctccaacatatggaagtgatataggcggtgacgggataacgcagacggtctggagtccttgcggtcgttatcttgtcgtcgccgagcgaaaatcactgggtgcgttgatctacgatgtccgtgtggcgggaaaactgcttggatacgtcaatgggcgtgacgcgctggggaatcagcgcgtagctttagatgtctaccctggtactgacgaacagagcggattcgagatctggtctgggagctcaagtggcgcagtgagagtgtgggaaggtgtcggaaaccaagagggtgcatacgagccctcgtggggatgggatgcgcatcattctacagtgggcagcgcgtgtattcatcctagcggtacagtggtggcgacctgtgccggctcgtgggaatatcctgacgagggttgcaatacatcccagaacggtctggacccggagacacgcagaagccatggtgagagtgggagtgaaatcactgattccgatcaggagctgcattggatgagccgacggaacaaagagagcagtctaaagatctggagcatatcggctctacagagcaacgtggagggaactttgaggcataatgaggacgacaaggcgcaaagctgacttaagatacccattaatcaattatacagagtcatggagacgcagatctcgtttctcgcgtaatccttacattgtgagcacaccatgagcttgtctacaagaagatagcaccaagaataagcaattgctcaactttgcggtctctagatttaca

SEQ ID NO: 11973 - DNA, 2646 bp, Muscodor strobelii
  misc_feature: SGI cDNA ID NO. 563864
  misc_feature: Encodes the peptide sequence at SEQ ID NO 11974
atgttctctccggcggcgatactggatggctgtcgcacgcaactcctcagccatgttggatggagcaaccatggacttagcagcgactctgcacttacacatcttcgattaccgacgctcgacattcgagaacaacttcatgtgcccaagaaatctttcgaactgcttgatgcagccttgaaagacaaggaattggacataagtgcctcgactgggctcggggtttctcagtacgaagctcgtcggcttctgagcaaatcaaaaatcgaagacgtgctgcttccaagcgaccccgactatgattgtcgggagctcgctcgaattattaaaaaacaacgagaggcacgcatcagcccgtcaattttccctcaagagatacttgatgttaccaaagatgagagccttgaatttcctcaaagtgcctatctatttcgaatacaactcaatcaaataattcgcgacgagaagttgtccatagcaaagccagtactttgtcatttggcttatgccctgaggagcgattggggtgatgacgaccgacggaagttaatggaagaacttgatgctcaccgaatgcctatgcgacaattagctgtgacgcctccgctgagcccgctcacctcgcctggaggaggaccattcattccagacgccgatatctgcgaagtgcctttcgcttccgatcctagttcactgctcgaaacagatttagaatcagctcggggcaaagtactacaaattgaaatcgagaaagagggctcctcaatatccgaccctatcactccacgcttatcccctttacttggatcacctgtagcggtagtacaactgccaaagcttagatcgaagagagtcgagacgcctctgttgccattgacatcttcagataaaggacttgacatgccgtcacttgtccgaagtatggacatcgacaacgccctttccaaaccggaagaagtagagcaggcgacaaatgaaatggttgcgaacgttgacgacgactttcacgctgctatggtagcaagtgcggacttactaactaaaggcattgaacaggagcatatcagtgtcgtcgaggctattgctagggtcaaggttcccgtcatggacttctctacgcctgaggcagaatggcaaatgtttccgatggaattcacggctcatttcatgtacctgtacgacaccttgaaaattcacgattttccttctgcgaagaaggatcgtaaagcagatttacagcttcgctgggtcccctttcgtgagaagattgatatcaatgacctgacggacgaatgtatcgaagacgggagcgatctagattccttgttgggctttgcggaccccggagaagtgtcagccaccacgaattatgtctggaaacgacctggcctggcaatattgcgcgactcagggatgacagatggcttcgagcagttgatgaccaattcagcgacaaacactgccgaagacttgccgacactctgcaaaaagagacgtaacgagagacgtgcagaggtagattatccggatgactcgtcgtcgcctatcgccctcattggcccatcgcaaaatgagggaggagcagccgcaataccatcaaagaaggaggagacgcgaatcgctcgaaagtccccgaccgtctccgacttgttatcgaattatcttgatatacacacatcaaagcggcagaaacttgacaacagtacattctttcccagcgtcacgcagaccaggaacagtcattgtgctaccaagccagcttttcatcaaacgtgtcgaaatacctcgtcctctaaaccaaatcagccacagaagaaggccattcaagatgcaccttgcccgaaactcagtctaagcgatgagccgaccaagataatcaaaggattgaccctcaatcgtggtctgttttctcgtatcgaacagctgtaccctgctgctgagatcatagaacgcgatttcagccgatggaacgagtttagttcggctctgggttctgactcgtactcatcattcatatcgtcacttgaagccgaggctgacattatcgtctcaccggttacggggatcatcgttacaacccttttgcaggtaattcaaagaccgcctcctgggcagaaagggcaatctgcgatgcgcaatcgcataagtcaagcggcgctacgctacgagcgattgataataatagtgtccgaggggaaccttgacgacgaaactgtacgcaatatgctggcttcagagcttatggcatacaccgagttcattggctttgtctcgagtcttgacacccagggtcaggtcatgtatgttggaggtggcgaggagacactcgcgaaatgggttgtgtctcaactcattcgctataaacacgaggcggcagcagtccaggagatcatactccaagatgaaacatattgggaggtcttcatgcgccgggcaggttttaatgcgttcgcggcgcaagcaatcttggctcagttcaagagttatgacagtgactcagagaaagattctcgctggcccgaatatgggttagctgcattcatgaatatttcggccaacgaacgtgtgcaaaagtttcgatcgctattgggcggggaaagggttctgaacagagtgaacagaatattggaggctcgctggaggtag

SEQ ID NO: 11974 - protein, 881 aa, Muscodor strobelii
  misc_feature: SGI Peptide ID NO. 563864
  misc_feature (122)..(880): NCBI GI: 145613734 Blast Desc: MGG_01405 [Magnaporthe grisea 70-15] gi|145020763|gb|EDK04892.1| MGG_01405 [Magnaporthe grisea 70-15]
  misc_feature (122)..(880): NCBI GI: 164425016 Blast Desc: NCU06612 [Neurospora crassa OR74A] gi|157070754|gb|EAA33118.2| [Neurospora crassa OR74A]
  misc_feature (24)..(880): NCBI GI: 156031279 Blast Desc: SS1G_14061 [Sclerotinia sclerotiorum 1980] gi|154699463|gb|EDN99201.1| SS1G_14061 [Sclerotinia sclerotiorum 1980]
  misc_feature (97)..(880): NCBI GI: 256727402 Blast Desc: NECHADRAFT_33083 [Nectria haematococca mpVI 77-13-4]
  misc_feature (199)..(880): NCBI GI: 116195198 Blast Desc: CHGG_04197 [Chaetomium globosum CBS 148.51] gi|88180110|gb|EAQ87578.1| CHGG_04197 [Chaetomium globosum CBS 148.51]
  misc_feature (82)..(827): NCBI GI: 154317671 Blast Desc: BC1G_03187 [Botryotinia fuckeliana B05.10] gi|150844361|gb|EDN19554.1| BC1G_03187 [Botryotinia fuckeliana B05.10]
  misc_feature (624)..(880): NCBI GI: 171691160 Blast Desc: protein product [Podospora anserina] gi|170945528|emb|CAP71640.1| protein product [Podospora anserina]
  misc_feature (122)..(880): NCBI GI: 169611178 Blast Desc: SNOG_08698 [Phaeosphaeria nodorum SN15] gi|160702239|gb|EAT83866.2| SNOG_08698 [Phaeosphaeria nodorum SN15]
  misc_feature (23)..(798): NCBI GI: 46121749 Blast Desc: FG05253.1 [Gibberella zeae PH-1]
  misc_feature (576)..(880): NCBI GI: 189205929 Blast Desc: conserved [Pyrenophora tritici-repentis Pt-1C-BFP] gi|187975392|gb|EDU42018.1| conserved [Pyrenophora tritici-repentis Pt-1C-BFP]
MFSPAAILDGCRTQLLSHVGWSNHGLSSDSALTHLRLPTLDIREQLHVPKKSFELLDAALKDKELDISASTGLGVSQYEARRLLSKSKIEDVLLPSDPDYDCRELARIIKKQREARISPSIFPQEILDVTKDESLEFPQSAYLFRIQLNQIIRDEKLSIAKPVLCHLAYALRSDWGDDDRRKLMEELDAHRMPMRQLAVTPPLSPLTSPGGGPFIPDADICEVPFASDPSSLLETDLESARGKVLQIEIEKEGSSISDPITPRLSPLLGSPVAVVQLPKLRSKRVETPLLPLTSSDKGLDMPSLVRSMDIDNALSKPEEVEQATNEMVANVDDDFHAAMVASADLLTKGIEQEHISVVEAIARVKVPVMDFSTPEAEWQMFPMEFTAHFMYLYDTLKIHDFPSAKKDRKADLQLRWVPFREKIDINDLTDECIEDGSDLDSLLGFADPGEVSATTNYVWKRPGLAILRDSGMTDGFEQLMTNSATNTAEDLPTLCKKRRNERRAEVDYPDDSSSPIALIGPSQNEGGAAAIPSKKEETRIARKSPTVSDLLSNYLDIHTSKRQKLDNSTFFPSVTQTRNSHCATKPAFHQTCRNTSSSKPNQPQKKAIQDAPCPKLSLSDEPTKIIKGLTLNRGLFSRIEQLYPAAEIIERDFSRWNEFSSALGSDSYSSFISSLEAEADIIVSPVTGIIVTTLLQVIQRPPPGQKGQSAMRNRISQAALRYERLIIIVSEGNLDDETVRNMLASELMAYTEFIGFVSSLDTQGQVMYVGGGEETLAKWVVSQLIRYKHEAAAVQEIILQDETYWEVFMRRAGFNAFAAQAILAQFKSYDSDSEKDSRWPEYGLAAFMNISANERVQKFRSLLGGERVLNRVNRILEARWR

SEQ ID NO: 11975 - DNA, 615 bp, Muscodor strobelii
  misc_feature: SGI cDNA ID NO. 563865
  misc_feature: Encodes the peptide sequence at SEQ ID NO 11976
atggccttgaagggtctattggcccgaggagctcctcgcctgcccaaatacttactttacatcgtgggagtcataattttactctctgtaatagtactagcattagccgcatatgctcaatcactttcgggaagaagttcctactactttgattcaggaatccccggtttcctgatctttgtcgcgatttggacctggttggtctatggtggtgcatttgctcttgagcatttcgcgccaagattttactttcgaattggtgtcttaatcgcccaaatccttgccattattttctggctatcagcctgggcctgggctgcatcttgggcggcatacatcctttctttcgacaactataacggattcgacgatgtcagaggttcttggaagactttcgggcaggccataggagcctgtgcaggcattggagcattgacttggatcctaagcatcgttgtcctgttcatcttctgccgcgggtgtatcaatgacacaaacacatcgactgccgatgtcgagctcggaaacgctgcgaagaacaatcataacgcaaatcccgcatcacaggatctggcggctcagccggtgcgtagcgaaggccaacacgcgctgtaa

SEQ ID NO: 11976 - protein, 204 aa, Muscodor strobelii
  misc_feature: SGI Peptide ID NO. 563865
  misc_feature (1)..(197): NCBI GI: 171683427 Blast Desc: protein product [Podospora anserina] gi|170941673|emb|CAP67327.1| protein product [Podospora anserina]
  misc_feature (2)..(203): NCBI GI: 85107920 Blast Desc: NCU07311 [Neurospora crassa OR74A] gi|28924076|gb|EAA33233.1| [Neurospora crassa OR74A]
  misc_feature (1)..(180): NCBI GI: 116194700 Blast Desc: [Chaetomium globosum CBS 148.51] gi|88179861|gb|EAQ87329.1| [Chaetomium globosum CBS 148.51]
  misc_feature (14)..(195): NCBI GI: 256720733 Blast Desc: NECHADRAFT_85730 [Nectria haematococca mpVI 77-13-4]
  misc_feature (5)..(169): NCBI GI: 46121893 Blast Desc: FG05324.1 [Gibberella zeae PH-1]
  misc_feature (1)..(164): NCBI GI: 39944220 Blast Desc: [Magnaporthe grisea 70-15] gi|145014856|gb|EDJ99424.1| [Magnaporthe grisea 70-15]
  misc_feature (3)..(101): NCBI GI: 261352484 Blast Desc: [Verticillium albo-atrum VaMs.102]
MALKGLLARGAPRLPKYLLYIVGVIILLSVIVLALAAYAQSLSGRSSYYFDSGIPGFLIFVAIWTWLVYGGAFALEHFAPRFYFRIGVLIAQILAIIFWLSAWAWAASWAAYILSFDNYNGFDDVRGSWKTFGQAIGACAGIGALTWILSIVVLFIFCRGCINDTNTSTADVELGNAAKNNHNANPASQDLAAQPVRSEGQHAL

SEQ ID NO: 11977 - DNA, 5532 bp, Muscodor strobelii
  misc_feature: SGI cDNA ID NO. 563866
  misc_feature: Encodes the peptide sequence at SEQ ID NO 11978
atgcgtcctgaagtcgagcaagagctcgctcacacactgctcgtagagctcctcgcataccaattcgcctcccccgtgaggtggatcgagacacaggatgtcttcttagccgagaagaccgccgagcgtatcgtcgaggttggtcctgccgacacgctcggcgtcatggccaaaaggacattggcatccaaatacgaggctttcgatgctgccaagtcggtccagcgacagatcctgtgctacaacaaagatgcaaaggaaatatactacgatgtcgacccggttgaagatgagccagaaccgacacccagtgctgcagagagctcctcgagtcctgcagcggcatcggcagcgactgctgctcccgtagctgcagctccggcgcccagtgcaggcccagccgctgccgtaccagatgcccccgtcacagctcttgagatcgtgcgggccttgattgcgcagaagctgaagaagccgttcctagaagtgccgttgggcaaagcggtgaaggaccttgtcggaggcaaatcgacattacaaaacgagatattgggagatttgggcaaagaatttggctcaaccccggaaaagccagaggacactcccttggacgagctttctggcttgatgcaggcaacattcaatggtcagctcggaaaacactcgcagtcactaattgcacgactcgtctcttccaaaatgcccggtggcttcaacatcacactggcaagaaagtatcttgaaagccggtggggcctggcctcaggtcgtcaagatggtgtactagtattagcaatcacaatggaaccggctgctcggcttgcctccgaagccgatgctaaggcatatttcgacgatgtcgtccagaaatatgccacgaatgccggaatctccttgtcaacagccgcagccgcgggacctgctgctgatggaagcggtggcatgatgatggaccctgctgccattgacgctcttactaaagaccaacgcgcattattcaagcagcagcttgaacttctggctcgatatctgaagatggatctcagagccggtgataaggctgcgcaggttaccaacgaatcccagcaagttctccaagcacagttagatctttggaatgcggaacacggagatttctacgctgctggaatcgagccagtcttcagtcccctcaaagcccgtacctatgattcatcatggaactgggctcgtcaggatgcgcttaccatgtactacgacgtcattttcggtagactgttggtcgttgatcgagaaatcgtcagtcagtgtatccgcattatgacgaaatcgaatcctctcttgctcgagtttatgcagtaccacattgataattgccctacagaccgtggagaaacttacaagcttgccaaacagctgggagagcaactcattgagaactgcaaagatgtactcgatgtcgcccctgcttataaggatgtagccgttcccacggggccacacaccacggttgatgctcgtggcaacctaagctatgaagagatccctcgccagagctgccggaagttggaacactacgttcaacagatggcagaaggcggcaaaatctccgagtatggcaaccgcaccaaggtccagaatgatctcggtcgacttgtgaagcttatcaaagagcaacacaagatgtcaaagaccgccaaactcgaattcaagaacttgtatggcaacgtgcttcgatctcttgccatgaatgagagccaaattttgcctaaagagaacagcaaagccagcggcctcgtcaaaaaggccggcctcaaggcgaatggccaagtcagcaaaggcaaaatggaaacaattcccttcttgcatctcaagcgacataaccttcacggatgggactacagtaagaaacttacaggcgtatatctcgactgtctcgaagaggctgccagaaacggtatctcctaccagggcaagtacgctctgatgactggtgccggcgccggttcaattggtgctgaagtgctgcaaggcctcatcagtggtggtgccaaagtagtggtgacaacaagtcgattttcgagacaagttacagaatactaccagtctatgtatgctagatatggcgctcgtggatctcagctggtagttgtgccgttcaaccaaggcagcaagcaagacgtggaagcgctagtggattacatttacgatgctaagactggtcttggctgggatcttgatttcattattccctttgccgcaatcccagagaacggccgtcagatcgatggcatcgactcgaaatccgaacttgcgcatagaatcatgttgactaacctcctacgcctgcttgggtgtgtcaagacccagaaatcagaacgtggtttcgagactcgtcctgcgcaagtggtgctgcccctatctcccaaccatggaactttcggcaatgacggtctgtactctgaatctaaactcggacttgagactctcttcaaccgctggcactccgaagactgggctaactatctcaccatctgtggcgctgtcatcggctggacacgcggtactggacttatgtctggtaacaatattgttgccgagggcgttgagaagtttggcgtccgcactttctctcagcaggaaatggccttcaacctacttgggttgatgtctcccgatattgtcgacatctgccagaacgaaccagtgtttgcagatctcaatggcggtctccagttcatcccggatttgaatgagacaatgaccaaacttcgaaaggacatcatggagacgagcgaagttcgccgagcagtgacgaaagaaaccgctctggagaacaagattgtccatggcgaagattcggaagttctgtacaagaagaagatcattgaaccccgagcaaatatcaagttcgacttccctcctctacctaattgggagaaggaaattaagcctcttaacaagaacttagagggtatggttgatctagacaaggttgtcgtagtcaccggtttctctgaagtcggaccatggggtaacgccagaacaagatgggagatggaagcttacggcgaattctccttggagggctgcatcgaaatggcttggatcatgggcttgatcaaaaatcataacgggcccatcaaaggccaggcctactccggttgggttgatgcaaagtccggcgagccagtggaagacaaagatgtcaagcccaaatacgaaaaattcatcttggagcatgccggcatccgtctcatcgagcccgagctgttcgatgggtacgatcccgagaagaagatgatgcttcacgagatttctctcgaagaagaccttgagccgtttgaaggctctaaggagactgcagaggaattcaaaaggcagcacggtgataaatgcgagatctttgaaatcccagaaactggcgaatacatcattcgcatgaagagaggtgccaccctctggattcccaaagccctgcgattcgatcgacttgtagctggtcaactccccaccggatgggacgctaagaaatatggcattcctgacgacatcatctctcaggtcgaccgtgtcacattattcgtcctagtttgtgtttctgaggctctgttaacatctggtatctcggatccgtacgagttctacaagtacgttcacgtgtcggagcttggcaattgtatcggatccggtatgggtggtatgacagccctgaacggaatgtacaacaagcgcaagatggaccagcaagttcagaacgatatcctacaagagtccttcatcaacaccatggctgcatgggtcaacatgctgctattgtcttcctctggccctatcaagactcccgttggcgcttgtgctactgcagtcgagtctattgacatcggttacgagacaatcatggagggcaaggctcgtgtgtgcattgtcggtggttttgatgacttcagcgaggaaggatcatttgagtttgccaatatgaaggcaacgagcaatgcagtagacgagtttgcacacggccgcacacctcaagaaatgtcccgtcctacaaccaccactcggaatgggttcatggaatcccagggttgtggtgttcaaatcattatgacagctcaattggcaattaacatgggtctgccaatctacggtattcttgctctgactacaacggccagtgacaagattggccggtcggtaccagctcccggccaaggtgtacttacgactgcccgcgaagcacctgggaagttcccctcccctcttcttgatctcaagtaccgtcgccgacagattgaactgcgcaagaagcagatccgtagctggaaagagctagaattggagtatctgtatgaagagatagcagccatgcgcgatcagggcaatgagagaaagaagctctgcgcagctttggcaacaatttctggaagcaagacaccactattgctccactgcgcggctgcctggccacttgggggtcttaccattgatgacctgggcgttgcttcgttccacggtacttctactaaagccaatgacaagaacgaatcttctgtcatctgccagcagctgcgccatcttggtcggaagaagggtaatgccgtcatgggtatcttccagaaatatctcaccggtcacccgaagggtgctgcgggtgcttggatgttcaacggctgtctccaggtgctgaacactgggcttgttcctggtaatcgcaatgctgacaacatcgacgaagtcatggagaaattcgaccttatcgtatacccaagtcgaagcatccagaccgatggcgtgaaggcattctccgttacatcgtttggattcggccaaaagggcgcccaggctatcggtattcaccctcggtacctctttgccgcgctagatgaacagacctacgccgaatattacgccaaggtgacagctcgccagaagaagtcgtaccgctatttccacaacggcatgatcaacaacactctattccaagccaaatccaactcgccatacaccgatgagcagctgtcttcggtcctcctgaaccctgaggcaagagtgagcgaagatcagaagaccgcgaatcttatctacacctcgaattttgctaagcaagtgagcgcaccacagcttgccagaaccaagactacaaaagagatggttgagggcttggctcgcaaccttcagactgggccgaacaacaaagttggtgttgatgtagaagacatttctgcaatcaatatcgacaacgatacatttgtggagcgcaatttcaccacgaaagagattgcctactgccaaaaaacaccaagtcctcagagctcgtttgccgggcggtggagtgccaaggaggcggtgttcaagagcctcggagttcaaagcaaaggtgctggtgcatctttgaaagatattgagatcctagctaatgagaagggcgctcccattgtctcgctccacggtgaagcggcagaagcggcgaaaaacgctggtgtgaaagagataagtgtctcgatctctcattccgagacgcaatcaattgctattgcagtagccgctttctag

SEQ ID NO: 11978 - protein, 1843 aa, Muscodor strobelii
  misc_feature: SGI Peptide ID NO. 563866
  misc_feature (1726)..(1789): Pfam Id: PF01648 Pfam Desc: 4'-phosphopantetheinyl transferase superfamily
  misc_feature (1129)..(1367): Pfam Id: PF00109 Pfam Desc: Beta-ketoacyl synthase, N-terminal domain
  misc_feature (1463)..(1567): Pfam Id: PF02801 Pfam Desc: Beta-ketoacyl synthase, C-terminal domain
  misc_feature (1148)..(1367): Pfam Id: PF00109 Pfam Desc: Beta-ketoacyl synthase, N-terminal domain
  misc_feature (1)..(1843): NCBI GI: 46121887 Blast Desc: FG05321.1 [Gibberella zeae PH-1]
  misc_feature (1)..(1823): NCBI GI: 154294043 Blast Desc: fatty acid synthase subunit alpha [Botryotinia fuckeliana B05.10] gi|150845100|gb|EDN20293.1| fatty acid synthase subunit alpha [Botryotinia fuckeliana B05.10]
  misc_feature (1)..(1843): NCBI GI: 256720933 Blast Desc: [Nectria haematococca mpVI 77-13-4]
  misc_feature (1)..(1843): NCBI GI: 156035741 Blast Desc: SS1G_13074 [Sclerotinia sclerotiorum 1980] gi|154698479|gb|EDN98217.1| SS1G_13074 [Sclerotinia sclerotiorum 1980]
  misc_feature (1)..(1841): NCBI GI: 145607265 Blast Desc: MGG_12154 [Magnaporthe grisea 70-15] gi|145014852|gb|EDJ99420.1| MGG_12154 [Magnaporthe grisea 70-15]
  misc_feature (1)..(1843): NCBI GI: 85107908 Blast Desc: fatty acid synthase alpha subunit reductase [Neurospora crassa OR74A] gi|28924073|gb|EAA33230.1| fatty acid synthase alpha subunit reductase [Neurospora crassa OR74A]
  misc_feature (1)..(1843): NCBI GI: 121711830 Blast Desc: fatty acid synthase alpha subunit FasA, [Aspergillus clavatus NRRL 1] gi|119401682|gb|EAW12104.1| fatty acid synthase alpha subunit FasA, [Aspergillus clavatus NRRL 1]
  misc_feature (1)..(1843): NCBI GI: 145228299 Blast Desc: An01g00060 [Aspergillus niger] gi|134054544|emb|CAK36857.1| protein product [Aspergillus niger]
  misc_feature (1)..(1843): NCBI GI: 169778598 Blast Desc: [Aspergillus oryzae RIB40] gi|238499007|ref|XP_002380738.1| fatty acid synthase alpha subunit FasA [Aspergillus flavus NRRL3357] protein product fatty
  misc_feature (1)..(1841): NCBI GI: 171683421 Blast Desc: protein product [Podospora anserina] gi|170941670|emb|CAP67324.1| protein product [Podospora anserina]
  misc_feature (1)..(1843): SWISSPROT Homolog: EC 1.1.1.100 3-oxoacyl-[acyl-carrier-protein] reductase
  misc_feature (1)..(1843): SWISSPROT Homolog: EC 2.3.1.86 Fatty-acyl-CoA synthase
  misc_feature (1)..(1843): SWISSPROT Homolog: EC 2.3.1.41 Beta-ketoacyl-acyl-carrier-protein synthase I
  misc_feature: Useful for fungicidal and/or biocontrol applications
MRPEVEQELAHTLLVELLAYQFASPVRWIETQDVFLAEKTAERIVEVGPADTLGVMAKRTLASKYEAFDAAKSVQRQILCYNKDAKEIYYDVDPVEDEPEPTPSAAESSSSPAAASAATAAPVAAAPAPSAGPAAAVPDAPVTALEIVRALIAQKLKKPFLEVPLGKAVKDLVGGKSTLQNEILGDLGKEFGSTPEKPEDTPLDELSGLMQATFNGQLGKHSQSLIARLVSSKMPGGFNITLARKYLESRWGLASGRQDGVLVLAITMEPAARLASEADAKAYFDDVVQKYATNAGISLSTAAAAGPAADGSGGMMMDPAAIDALTKDQRALFKQQLELLARYLKMDLRAGDKAAQVTNESQQVLQAQLDLWNAEHGDFYAAGIEPVFSPLKARTYDSSWNWARQDALTMYYDVIFGRLLVVDREIVSQCIRIMTKSNPLLLEFMQYHIDNCPTDRGETYKLAKQLGEQLIENCKDVLDVAPAYKDVAVPTGPHTTVDARGNLSYEEIPRQSCRKLEHYVQQMAEGGKISEYGNRTKVQNDLGRLVKLIKEQHKMSKTAKLEFKNLYGNVLRSLAMNESQILPKENSKASGLVKKAGLKANGQVSKGKMETIPFLHLKRHNLHGWDYSKKLTGVYLDCLEEAARNGISYQGKYALMTGAGAGSIGAEVLQGLISGGAKVVVTTSRFSRQVTEYYQSMYARYGARGSQLVVVPFNQGSKQDVEALVDYIYDAKTGLGWDLDFIIPFAAIPENGRQIDGIDSKSELAHRIMLTNLLRLLGCVKTQKSERGFETRPAQVVLPLSPNHGTFGNDGLYSESKLGLETLFNRWHSEDWANYLTICGAVIGWTRGTGLMSGNNIVAEGVEKFGVRTFSQQEMAFNLLGLMSPDIVDICQNEPVFADLNGGLQFIPDLNETMTKLRKDIMETSEVRRAVTKETALENKIVHGEDSEVLYKKKIIEPRANIKFDFPPLPNWEKEIKPLNKNLEGMVDLDKVVVVTGFSEVGPWGNARTRWEMEAYGEFSLEGCIEMAWIMGLIKNHNGPIKGQAYSGWVDAKSGEPVEDKDVKPKYEKFILEHAGIRLIEPELFDGYDPEKKMMLHEISLEEDLEPFEGSKETAEEFKRQHGDKCEIFEIPETGEYIIRMKRGATLWIPKALRFDRLVAGQLPTGWDAKKYGIPDDIISQVDRVTLFVLVCVSEALLTSGISDPYEFYKYVHVSELGNCIGSGMGGMTALNGMYNKRKMDQQVQNDILQESFINTMAAWVNMLLLSSSGPIKTPVGACATAVESIDIGYETIMEGKARVCIVGGFDDFSEEGSFEFANMKATSNAVDEFAHGRTPQEMSRPTTTTRNGFMESQGCGVQIIMTAQLAINMGLPIYGILALTTTASDKIGRSVPAPGQGVLTTAREAPGKFPSPLLDLKYRRRQIELRKKQIRSWKELELEYLYEEIAAMRDQGNERKKLCAALATISGSKTPLLLHCAAAWPLGGLTIDDLGVASFHGTSTKANDKNESSVICQQLRHLGRKKGNAVMGIFQKYLTGHPKGAAGAWMFNGCLQVLNTGLVPGNRNADNIDEVMEKFDLIVYPSRSIQTDGVKAFSVTSFGFGQKGAQAIGIHPRYLFAALDEQTYAEYYAKVTARQKKSYRYFHNGMINNTLFQAKSNSPYTDEQLSSVLLNPEARVSEDQKTANLIYTSNFAKQVSAPQLARTKTTKEMVEGLARNLQTGPNNKVGVDVEDISAINIDNDTFVERNFTTKEIAYCQKTPSPQSSFAGRWSAKEAVFKSLGVQSKGAGASLKDIEILANEKGAPIVSLHGEAAEAAKNAGVKEISVSISHSETQSIAIAVAAF

SEQ ID NO: 11979 - DNA, 6514 bp, Muscodor strobelii
  misc_feature: SGI EST ID NO. CUFF.28569.0
  misc_feature: Variant of the nucleotide sequence at SEQ ID NO 11977
cgcacactttggttcaacatttggggtcacgaaatccgtacctgtaccgtggactcgtacgccggttgtgcctggtgctgtgtaaagcacctgggcaccctgtacctctgggacattgcagtttgcttcactgctggagaggcagttgtagatcgtacatagaattcgccgaggccatccatcccacttgttcacaaatggtccacactgtcctcctggcgtgcgtgtcaaaagtgagccggccattgtgctcttgatctagcttgtctaaagtctgccacccgtccggctgcccatgctcgtctcgtgtctgcctctcgagcactggcgggaagggaaggaaatcttcacttcgtctcaacctccttcatactcacttcactcgtcgccaacttgtaatacccgcccctaatcgcccttaatccattcccgcctctcccaccgtatagacctggccaacctcgagctcctcccactcgaggaagccttgtattcaaggtcactgggccatcatcgaggtctgtagatagaccaattcgacgtcactctcattcgacaacacccccggcgctcatccacgtcgaatcatcaacatgcgtcctgaagtcgagcaagagctcgctcacacactgctcgtagagctcctcgcataccaattcgcctcccccgtgaggtggatcgagacacaggatgtcttcttagccgagaagaccgccgagcgtatcgtcgaggttggtcctgccgacacgctcggcgtcatggccaaaaggacattggcatccaaatacgaggctttcgatgctgccaagtcggtccagcgacagatcctgtgctacaacaaagatgcaaaggaaatatactacgatgtcgacccggttgaagatgagccagaaccgacacccagtgctgcagagagctcctcgagtcctgcagcggcatcggcagcgactgctgctcccgtagctgcagctccggcgcccagtgcaggcccagccgctgccgtaccagatgcccccgtcacagctcttgagatcgtgcgggccttgattgcgcagaagctgaagaagccgttcctagaagtgccgttgggcaaagcggtgaaggaccttgtcggaggcaaatcgacattacaaaacgagatattgggagatttgggcaaagaatttggctcaaccccggaaaagccagaggacactcccttggacgagctttctggcttgatgcaggcaacattcaatggtcagctcggaaaacactcgcagtcactaattgcacgactcgtctcttccaaaatgcccggtggcttcaacatcacactggcaagaaagtatcttgaaagccggtggggcctggcctcaggtcgtcaagatggtgtactagtattagcaatcacaatggaaccggctgctcggcttgcctccgaagccgatgctaaggcatatttcgacgatgtcgtccagaaatatgccacgaatgccggaatctccttgtcaacagccgcagccgcgggacctgctgctgatggaagcggtggcatgatgatggaccctgctgccattgacgctcttactaaagaccaacgcgcattattcaagcagcagcttgaacttctggctcgatatctgaagatggatctcagagccggtgataaggctgcgcaggttaccaacgaatcccagcaagttctccaagcacagttagatctttggaatgcggaacacggagatttctacgctgctggaatcgagccagtcttcagtcccctcaaagcccgtacctatgattcatcatggaactgggctcgtcaggatgcgcttaccatgtactacgacgtcattttcggtagactgttggtcgttgatcgagaaatcgtcagtcagtgtatccgcattatgacgaaatcgaatcctctcttgctcgagtttatgcagtaccacattgataattgccctacagaccgtggagaaacttacaagcttgccaaacagctgggagagcaactcattgagaactgcaaagatgtactcgatgtcgcccctgcttataaggatgtagccgttcccacggggccacacaccacggttgatgctcgtggcaacctaagctatgaagagatccctcgccagagctgccggaagttggaacactacgttcaacagatggcagaaggcggcaaaatctccgagtatggcaaccgcaccaaggtccagaatgatctcggtcgacttgtgaagcttatcaaagagcaacacaagatgtcaaagaccgccaaactcgaattcaagaacttgtatggcaacgtgcttcgatctcttgccatgaatgagagccaaattttgcctaaagagaacagcaaagccagcggcctcgtcaaaaaggccggcctcaaggcgaatggccaagtcagcaaaggcaaaatggaaacaattcccttcttgcatctcaagcgacataaccttcacggatgggactacagtaagaaacttacaggcgtatatctcgactgtctcgaagaggctgccagaaacggtatctcctaccagggcaagtacgctctgatgactggtgccggcgccggttcaattggtgctgaagtgctgcaaggcctcatcagtggtggtgccaaagtagtggtgacaacaagtcgattttcgagacaagttacagaatactaccagtctatgtatgctagatatggcgctcgtggatctcagctggtagttgtgccgttcaaccaaggcagcaagcaagacgtggaagcgctagtggattacatttacgatgctaagactggtcttggctgggatcttgatttcattattccctttgccgcaatcccagagaacggccgtcagatcgatggcatcgactcgaaatccgaacttgcgcatagaatcatgttgactaacctcctacgcctgcttgggtgtgtcaagacccagaaatcagaacgtggtttcgagactcgtcctgcgcaagtggtgctgcccctatctcccaaccatggaactttcggcaatgacggtctgtactctgaatctaaactcggacttgagactctcttcaaccgctggcactccgaagactgggctaactatctcaccatctgtggcgctgtcatcggctggacacgcggtactggacttatgtctggtaacaatattgttgccgagggcgttgagaagtttggcgtccgcactttctctcagcaggaaatggccttcaacctacttgggttgatgtctcccgatattgtcgacatctgccagaacgaaccagtgtttgcagatctcaatggcggtctccagttcatcccggatttgaatgagacaatgaccaaacttcgaaaggacatcatggagacgagcgaagttcgccgagcagtgacgaaagaaaccgctctggagaacaagattgtccatggcgaagattcggaagttctgtacaagaagaagatcattgaaccccgagcaaatatcaagttcgacttccctcctctacctaattgggagaaggaaattaagcctcttaacaagaacttagagggtatggttgatctagacaaggttgtcgtagtcaccggtttctctgaagtcggaccatggggtaacgccagaacaagatgggagatggaagcttacggcgaattctccttggagggctgcatcgaaatggcttggatcatgggcttgatcaaaaatcataacgggcccatcaaaggccaggcctactccggttgggttgatgcaaagtccggcgagccagtggaagacaaagatgtcaagcccaaatacgaaaaattcatcttggagcatgccggcatccgtctcatcgagcccgagctgttcgatgggtacgatcccgagaagaagatgatgcttcacgagatttctctcgaagaagaccttgagccgtttgaaggctctaaggagactgcagaggaattcaaaaggcagcacggtgataaatgcgagatctttgaaatcccagaaactggcgaatacatcattcgcatgaagagaggtgccaccctctggattcccaaagccctgcgattcgatcgacttgtagctggtcaactccccaccggatgggacgctaagaaatatggcattcctgacgacatcatctctcaggtcgaccgtgtcacattattcgtcctagtttgtgtttctgaggctctgttaacatctggtatctcggatccgtacgagttctacaagtacgttcacgtgtcggagcttggcaattgtatcggatccggtatgggtggtatgacagccctgaacggaatgtacaacaagcgcaagatggaccagcaagttcagaacgatatcctacaagagtccttcatcaacaccatggctgcatgggtcaacatgctgctattgtcttcctctggccctatcaagactcccgttggcgcttgtgctactgcagtcgagtctattgacatcggttacgagacaatcatggagggcaaggctcgtgtgtgcattgtcggtggttttgatgacttcagcgaggaaggatcatttgagtttgccaatatgaaggcaacgagcaatgcagtagacgagtttgcacacggccgcacacctcaagaaatgtcccgtcctacaaccaccactcggaatgggttcatggaatcccagggttgtggtgttcaaatcattatgacagctcaattggcaattaacatgggtctgccaatctacggtattcttgctctgactacaacggccagtgacaagattggccggtcggtaccagctcccggccaaggtgtacttacgactgcccgcgaagcacctgggaagttcccctcccctcttcttgatctcaagtaccgtcgccgacagattgaactgcgcaagaagcagatccgtagctggaaagagctagaattggagtatctgtatgaagagatagcagccatgcgcgatcagggcaatgagttcgatgagaaggaatatactcaagaccgtgccgttcacatcgaaaaggaggctgagaggcaggagaaagaagctctgcgcagctttggcaacaatttctggaagcaagacaccactattgctccactgcgcggctgcctggccacttgggggtcttaccattgatgacctgggcgttgcttcgttccacggtacttctactaaagccaatgacaagaacgaatcttctgtcatctgccagcagctgcgccatcttggtcggaagaagggtaatgccgtcatgggtatcttccagaaatatctcaccggtcacccgaagggtgctgcgggtgcttggatgttcaacggctgtctccaggtgctgaacactgggcttgttcctggtaatcgcaatgctgacaacatcgacgaagtcatggagaaattcgaccttatcgtatacccaagtcgaagcatccagaccgatggcgtgaaggcattctccgttacatcgtttggattcggccaaaagggcgcccaggctatcggtattcaccctcggtacctctttgccgcgctagatgaacagacctacgccgaatattacgccaaggtgacagctcgccagaagaagtcgtaccgctatttccacaacggcatgatcaacaacactctattccaagccaaatccaactcgccatacaccgatgagcagctgtcttcggtcctcctgaaccctgaggcaagagtgagcgaagatcagaagaccgcgaatcttatctacacctcgaattttgctaagcaagtgagcgcaccacagcttgccagaaccaagactacaaaagagatggttgagggcttggctcgcaaccttcagactgggccgaacaacaaagttggtgttgatgtagaagacatttctgcaatcaatatcgacaacgatacatttgtggagcgcaatttcaccacgaaagagattgcctactgccaaaaaacaccaagtcctcagagctcgtttgccgggcggtggagtgccaaggaggcggtgttcaagagcctcggagttcaaagcaaaggtgctggtgcatctttgaaagatattgagatcctagctaatgagaagggcgctcccattgtctcgctccacggtgaagcggcagaagcggcgaaaaacgctggtgtgaaagagataagtgtctcgatctctcattccgagacgcaatcaattgctattgcagtagccgctttctagctatgccataacagatatggtttaatgtcaaatgtacaataagcattcaggtcggcgtttagaacagccaggtcttggtggtagccgatatgtattttggtgagaaaggacttgagacgaaaagtctctgcttcccatgatgaaagatttacgccgcatagagcagtagaatgaacgagaccacgttggagtttggtgaccgcgggtcacgaaaggagccactagaaattttaaatcttcgtattagaatatcagtaatagaatatcatcagctctcacaaagacagacttcaattggtctatcaaagctgtacctcccgttcta

SEQ ID NO: 11980 - DNA, 6294 bp, Muscodor strobelii
  misc_feature: SGI cDNA ID NO. 563867
  misc_feature: Encodes the peptide sequence at SEQ ID NO 11981
atgtatggtaccaacaccggcccgcagacgggcgtctcgactcccagatcttcttcctcgctccgcccattaaccctctcacacggctcgctcgaggcgtcgttcctcgtaccgaccaacgtccattaccatgcctccgaactgaaagaccggttcaccgccggtctgcccgctcccacagacgagttagcccaagacgacgagccgtcgtcggtcgctgagctggttgctcgttacatggagttcgttgcccacgaggttgacgagggcgaagatgacgcccaagggtcgtacgaagaggttctgaagctcgtgcttaacgagttcgagcgtatgttcctccgaggcaacgatgtccatgctctagccaagagtctaccggggattctcgagaagcagatcacagttgtccggagctactttgccgctcgttcggtcgcaaaccgggcgattcggccacacgagtcagccctgttcagagccgcagacgaaggatcaacaaccatttatagcatcttcggcggccaaggaaacattgtggaatacttcgacgagcttcgtgagatctacgcaacatatccttcgttcgtaggcgaactcgttacgagctcggccgagctcctccacaatctagcgcgagattctcgagcagagaagctgtatgccaagggtcttgatgttatggaatggctgcgttccccagatgcgacaccagatgtggactatctggtttcggcaccggtcagctttcctctgattggtctcgtacagctatgtcactaccaagttctcggaaagggtctcggtgtccatccagggatccttcgcgatcgcatacaaggtgctacaggtcactcacaaggcgttgtggttgcagctgcaacagctgcctcggattcctgggcatccttcgaaaaacattcaaaacacgcgctcaccatcttgttctggatcggtgctcgcagccaacaggtgtttcctagaacctccttgacccctaacacactgagggactcgatcgacaatggggagggagaacccacacctatgttgagtattcgcgatctgccccaaagcgaggtacagaagcacattgacgcaacaaaccaatatcttccggaggatcgccacattgcaatttccttgataaacagcccccgcaacatggtcgtaactggtccgcccatctctctatatggtcttaatcttcagctgcgcaaagtcaaagcaccgaccggcctcgaccaaaaccgcataccacacacagagcgcaaggtccgattcgtaaaccgattcttacctatcactgctccctttcacagcaagtacctggccgatgcaactaaactaatcgatcaagatcttgcagagatcaagatcgatgtttctagcctgggaattgcagtgtataatacatatactggtgaggacttaagagaaaccgtcaagggtgacatcgttccctcactcattcgaatgatcacgagggatcctgtgcactgggagaaagcgaccacatttcccaaagcgactcatgtacttgactttggacctggaggcatatcgggtctcggcgtcttaaccagccgtaacaaggagggtactggcgttcgcgtcatcctcgccggaacacttgacggttctgcgcaagagatcggttacaagtcagaacttttcgatcgtgatgaggaacacgcagtagtccacgctgacgactgggttgctaaatatggacctcgcctcgtcaagacttccactggtgagatttacgtcgacaccaaaatgagcagacttcttggtgtgcccccgattgtagtcgctggcatgacgcccgccactgttccttgggattttgttgccgcgaccatgaacgccggttaccagatcgaattgggcggcggtggatatttcaatgctaagcaaatgaccgaagcattggctaaaattgaacaagcgatacctgctggccggggtataactgtcaatctgatttacgtcaacccgcgagcaatgggatggcaaatccccttgataggccgactcagatcagaaggtgtgccaatcgaaggcctcacaatcggtgctggtgtcccttccattgaagttgcgcaagaatacatcgagaccttgggcttgaagcatatctctttcaagcctggctcgatggaagcaatacagaatgttatcaacattgccaaggccaatcccacattccctgttattctgcaatggactggtggccgaggcggtggtcaccattcgtttgaggattttcaccaacccgttcttcagatgtatggccgtatacgccgatctgacaacatcattcttgttgctgggagcggtttcggtggtgctgaggacacttatccctacttgacaggtgactggtcgaagaaatatggctaccctcccatgcccttcgatggttgcctttttggcagtcgtatgatggtcgctaaggaagcccacacaagcaaggctgcaaagcaagcaatcgttgatgctgagggtctcgacgatgaccagtgggagaagacctacaaaggtccagctggtggagtcatcacagtgagatccgaaatgggtgagcctattcacaagctcgctacccgtggtgtcagattctgggccgaaatggatcaaaagatatttagtctacctaaagagaagcgagttgcagagctgaagaagagtcgcgactacatcatcaagaaactcaacgatgacttccaaaaagtttggtttggtcgcaacaaggcgggacaaactgttgacctggaggatatgacatacggtgaggtagtgcggcgcctggtcgagctcctctacgtcaggcacgaaagtcgctggattgatccctcgtacaaaaagcttactggtgacttcatacatcgtctggaagaacgattcaccactagccccaatcaagcttcgctattacagaactatggggatctcgatgagcctttcccgaccgttgagaagatcttgagccactatattgaagctgacaaccagatcatcaatgcgcaagatgtccagcacttcctgctgctttgccaacgccgaggacaaaagcctgtcacttttgttcctgccctggacgaaaactttgaattcttcttcaagaaggactccctctggcaatctgaagatcttgaggccgtcattgatcaagatgttggccggacttgcattcttcaagggcctatgtcagccaaattctctactaaattggacgagcctatcaaagatatcttgaatggtatacacgatggtcatatttcaatgttgacacgagaagtctataataatgaccccagctcgattccaactatagaatactttggtggcaagctgattgagacagaaatgcctgtcgatatcgagggtttgattgtctctgaagatgcacagaaaaacacgtatcggttgtcgtcgtcgccggccgcttcccttccatcgattgacagctggctcgctttacttgcaggccccaatcgcggctggcgccatgcgctctttacgtccgaggttcttgtgcaaggcaagaaataccagaccaatcccatgaagcgcatatttgcgcctgttcgcggcttgtttgtggaagtacgatatcccaatgagccttccaaaacttccatcattgttcgtgagcaaccgcgccacaaccactaccaggatgtgattgaagtcaaattcgatggaaaatccaggattgttgtcaacatgatcaaagacacgactgctctcggcgaaccagtctctctacctctcagattctactaccatcctgaagcgggatatgcacccatccacgaagtcattgagggtcgcaatgatcgcatcaaggagttctactggcgtgcatggtttggagatgatgaaatggatctggatggcgatgttcactgccaatttgatggaggtcgaaacaagattactagcaaggacatcaacgactttgtgcatgctgttggcaacactggtgaggcattcgttgaccgtcctggcaaggaaatgttcgcaccaatggacttcgccattgttgttggatggaaagccatcactaagcccatcttcccacgcaagattgacggagatctattgaaacttgtccacctttccaatggtttccgcatgatgccaggcgcagagcctctcaagaaaggcgatgaggtgagaacaaccgctcagatcaatgccgtgatcaatcaggaatccggcaagatggttgaggtttgcggtaccatttaccgcgatggtgcagccgtgatggaggtcacatctcaattcctgtatcgcggtgtttacaccgatttcgaaaatactttccagcggaaacttgaaacaccaatgcaagttcatcttgccacatcaaaggatgttgccgtcctccagtccaaggactggatacagttcgataacaaccagatcgagttgctgggtcagactttaacgttccgattacaaagtttagtggagttcaagaacaagaccgtctttgacagcgttgcgacgcgtggccaggtcttacttgaactgcccaccaaagaaatcatacagattggtagtgtagactacgaggcaggcgcttcacacggaaatcctgtcattgattacctccaacgccacggctcctctattgagcagcctatattgtttgagaacccaatccctctcagcggaaaagccccactactcttgaaagcaccagcctcgaacgaaacatatgctagagtttcgggcgactacaaccctattcatgtgtcgcgcgtcttttccagctacgctaacctgcccggaaccatcacccacggcatgtactcaagtgctgctgttcgaagtttggtcgaaacgtgggctgctgagaacaatgttggccgggttcgcagcttccacgcttctctggttggcatggttcttcccaacgacgacattgaagtcaaactgcaacacgttggtatgatcggcggtcgaaagattatcaaagtggaagccagtaacaaagagacggaagaaaaggttctccttggtgaagcagaggtcgagcagccagtcacagcatacgtatttactggccaaggctcccaagagcaaggtatgggcatggacctttatgcctccagtccagttgccaaagaagtttgggatcgggccgacaaatatcttctcgacacctatggcttctctatcttgaacattgtcaagaataacccgaaggaacttactgttcacttcggcggcccccgaggcaaagccatccgcgaaaactacatgcaaatgaactttgagacaattggcgcggacgggaccgtgaagtcggagcggattttcaaggaaatcaatgagagaacaacatgctacacatatcggtcgcctacgggcttgctatcagccacgcagttcactcaacctgccctaaccctgatggagaaagccagtttcgaagacatgaacgccaaaggcctagtgccacgagagagcacatttgcggggcactctcttggcgaatactcagctctggctgctttggcggacgtgctgcccattgagtctttggtatctgtcgtcttctatcgtggtttgacgatgcaagttgccgtcgagcgagacgcccagggtcgctccaactactccatgtgtgccgttaaccctagccgtatctccaagacgttcggggaggcagctcttcgctttgtcgtcgacaatatcgcagaggaaaccggctggcttttggagattgtgaactacaatatcgccaacatgcaatacgtctgcgccggtgatcttcgtgcactcgacacactgactagtgtgaccaatttcctgaaggcccaaaaagtcgatattagtcaactactcaacaacgtaagccaagaagagctcaagcagcagcttaccgatatcatcaagggctcggctcagcagactttggccaagccccagcctcttgaactccagcgaggatttgccaccatcccgctcaagggtatcgatgtgcctttccattctaccttccttcgatctggtgtgaagccattccgaaatattctactgaagaagatcaataagacttctattgatccttccaagctggttgggaagtatattcccaacgtcactgctcgtcccttcgagcttactaaggagtacttccaaaatgtgtatgacttgacaaattcgcccaagatcgcgcagatccttcaaaactgggagagttaccaggatgacacgaataaagtcagcagtgcagaagtcgcagtcaacggtgtcaatggtcattga

SEQ ID NO: 11981 - protein, 2097 aa, Muscodor strobelii
  misc_feature: SGI Peptide ID NO. 563867
  misc_feature (1691)..(2066): Pfam Id: PF00698 Pfam Desc: Acyl transferase domain
  misc_feature (1027)..(1088): Pfam Id: PF08354 Pfam Desc: Domain of function (DUF1729)
  misc_feature (1546)..(1677): Pfam Id: PF01575 Pfam Desc: MaoC like domain
  misc_feature (592)..(942): Pfam Id: PF03060 Pfam Desc: 2-nitropropane dioxygenase
  misc_feature (1691)..(1940): Pfam Id: PF00698 Pfam Desc: Acyl transferase domain
  misc_feature (1983)..(2066): Pfam Id: PF00698 Pfam Desc: Acyl transferase domain
  misc_feature (3)..(2096): NCBI GI: 116194708 Blast Desc: conserved [Chaetomium globosum CBS 148.51] gi|88179865|gb|EAQ87333.1| conserved [Chaetomium globosum CBS 148.51]
  misc_feature (1)..(2080): NCBI GI: 85107903 Blast Desc: fatty acid synthase beta subunit dehydratase [Neurospora crassa OR74A] gi|28924072|gb|EAA33229.1| fatty acid synthase beta subunit dehydratase [Neurospora crassa OR74A]
  misc_feature (1)..(2096): NCBI GI: 156035739 Blast Desc: SS1G_13073 [Sclerotinia sclerotiorum 1980] gi|154698478|gb|EDN98216.1| SS1G_13073 [Sclerotinia sclerotiorum 1980]
  misc_feature (1)..(2096): NCBI GI: 256720731 Blast Desc: [Nectria haematococca mpVI 77-13-4]
  misc_feature (1)..(2080): NCBI GI: 171683419 Blast Desc: protein product [Podospora anserina] gi|170941669|emb|CAP67323.1| protein product [Podospora anserina]
  misc_feature (1)..(2096): NCBI GI: 46121889 Blast Desc: FG05322.1 [Gibberella zeae PH-1]
  misc_feature (1)..(2093): NCBI GI: 145607267 Blast Desc: MGG_04118 [Magnaporthe grisea 70-15] gi|145014853|gb|EDJ99421.1| MGG_04118 [Magnaporthe grisea 70-15]
  misc_feature (1)..(2079): NCBI GI: 226288454 Blast Desc: fatty acid synthase subunit beta dehydratase [Paracoccidioides brasiliensis Pb18]
  misc_feature (1)..(2079): NCBI GI: 226283496 Blast Desc: fatty acid synthase subunit beta dehydratase [Paracoccidioides brasiliensis Pb01]
  misc_feature (1)..(2079): NCBI GI: 154272952 Blast Desc: fatty acid synthase beta subunit dehydratase [Ajellomyces capsulatus NAm1] gi|150415840|gb|EDN11184.1| fatty acid synthase beta subunit dehydratase [Ajellomyces capsulatus
  misc_feature (8)..(2078): SWISSPROT Homolog: EC 2.3.1.86 Fatty-acyl-CoA synthase
  misc_feature (8)..(2078): SWISSPROT Homolog: EC 2.3.1.39 [Acyl-carrier-protein] S-malonyltransferase
  misc_feature (8)..(2078): SWISSPROT Homolog: EC 2.3.1.38 [Acyl-carrier-protein] S-acetyltransferase
  misc_feature (8)..(2078): SWISSPROT Homolog: EC 3.1.2.14 Oleoyl-[acyl-carrier-protein] hydrolase
  misc_feature (8)..(2078): SWISSPROT Homolog: EC 4.2.1.61 3-hydroxypalmitoyl-[acyl-carrier-protein] dehydratase
  misc_feature (8)..(2078): SWISSPROT Homolog: EC 1.3.1.9 Enoyl-[acyl-carrier-protein] reductase (NADH)
  misc_feature: Useful for fungicidal and/or biocontrol applications
MYGTNTGPQTGVSTPRSSSSLRPLTLSHGSLEASFLVPTNVHYHASELKDRFTAGLPAPTDELAQDDEPSSVAELVARYMEFVAHEVDEGEDDAQGSYEEVLKLVLNEFERMFLRGNDVHALAKSLPGILEKQITVVRSYFAARSVANRAIRPHESALFRAADEGSTTIYSIFGGQGNIVEYFDELREIYATYPSFVGELVTSSAELLHNLARDSRAEKLYAKGLDVMEWLRSPDATPDVDYLVSAPVSFPLIGLVQLCHYQVLGKGLGVHPGILRDRIQGATGHSQGVVVAAATAASDSWASFEKHSKHALTILFWIGARSQQVFPRTSLTPNTLRDSIDNGEGEPTPMLSIRDLPQSEVQKHIDATNQYLPEDRHIAISLINSPRNMVVTGPPISLYGLNLQLRKVKAPTGLDQNRIPHTERKVRFVNRFLPITAPFHSKYLADATKLIDQDLAEIKIDVSSLGIAVYNTYTGEDLRETVKGDIVPSLIRMITRDPVHWEKATTFPKATHVLDFGPGGISGLGVLTSRNKEGTGVRVILAGTLDGSAQEIGYKSELFDRDEEHAVVHADDWVAKYGPRLVKTSTGEIYVDTKMSRLLGVPPIVVAGMTPATVPWDFVAATMNAGYQIELGGGGYFNAKQMTEALAKIEQAIPAGRGITVNLIYVNPRAMGWQIPLIGRLRSEGVPIEGLTIGAGVPSIEVAQEYIETLGLKHISFKPGSMEAIQNVINIAKANPTFPVILQWTGGRGGGHHSFEDFHQPVLQMYGRIRRSDNIILVAGSGFGGAEDTYPYLTGDWSKKYGYPPMPFDGCLFGSRMMVAKEAHTSKAAKQAIVDAEGLDDDQWEKTYKGPAGGVITVRSEMGEPIHKLATRGVRFWAEMDQKIFSLPKEKRVAELKKSRDYIIKKLNDDFQKVWFGRNKAGQTVDLEDMTYGEVVRRLVELLYVRHESRWIDPSYKKLTGDFIHRLEERFTTSPNQASLLQNYGDLDEPFPTVEKILSHYIEADNQIINAQDVQHFLLLCQRRGQKPVTFVPALDENFEFFFKKDSLWQSEDLEAVIDQDVGRTCILQGPMSAKFSTKLDEPIKDILNGIHDGHISMLTREVYNNDPSSIPTIEYFGGKLIETEMPVDIEGLIVSEDAQKNTYRLSSSPAASLPSIDSWLALLAGPNRGWRHALFTSEVLVQGKKYQTNPMKRIFAPVRGLFVEVRYPNEPSKTSIIVREQPRHNHYQDVIEVKFDGKSRIVVNMIKDTTALGEPVSLPLRFYYHPEAGYAPIHEVIEGRNDRIKEFYWRAWFGDDEMDLDGDVHCQFDGGRNKITSKDINDFVHAVGNTGEAFVDRPGKEMFAPMDFAIVVGWKAITKPIFPRKIDGDLLKLVHLSNGFRMMPGAEPLKKGDEVRTTAQINAVINQESGKMVEVCGTIYRDGAAVMEVTSQFLYRGVYTDFENTFQRKLETPMQVHLATSKDVAVLQSKDWIQFDNNQIELLGQTLTFRLQSLVEFKNKTVFDSVATRGQVLLELPTKEIIQIGSVDYEAGASHGNPVIDYLQRHGSSIEQPILFENPIPLSGKAPLLLKAPASNETYARVSGDYNPIHVSRVFSSYANLPGTITHGMYSSAAVRSLVETWAAENNVGRVRSFHASLVGMVLPNDDIEVKLQHVGMIGGRKIIKVEASNKETEEKVLLGEAEVEQPVTAYVFTGQGSQEQGMGMDLYASSPVAKEVWDRADKYLLDTYGFSILNIVKNNPKELTVHFGGPRGKAIRENYMQMNFETIGADGTVKSERIFKEINERTTCYTYRSPTGLLSATQFTQPALTLMEKASFEDMNAKGLVPRESTFAGHSLGEYSALAALADVLPIESLVSVVFYRGLTMQVAVERDAQGRSNYSMCAVNPSRISKTFGEAALRFVVDNIAEETGWLLEIVNYNIANMQYVCAGDLRALDTLTSVTNFLKAQKVDISQLLNNVSQEELKQQLTDIIKGSAQQTLAKPQPLELQRGFATIPLKGIDVPFHSTFLRSGVKPFRNILLKKINKTSIDPSKLVGKYIPNVTARPFELTKEYFQNVYDLTNSPKIAQILQNWESYQDDTNKVSSAEVAVNGVNGH

SEQ ID NO: 11982 - DNA, 6990 bp, Muscodor strobelii
  misc_feature: SGI EST ID NO. CUFF.29680.1
  misc_feature: Variant of the nucleotide sequence at SEQ ID NO 11980
caaaattatcatcgtagcctcccgcaataggaggggtcccagctgtctattgaagaagggtcccacgcaacgacttctctgtgtggagcctccgacatcttgacacaaccgcaactcctccgaaaaaaacccatcctcccttatctcaagtgaagcagctgcccaagaactaccaattctcaacttgggcttcctcttctcttccccgtaaccaataatcctatataccacgggggatcttcattctaattcaagctgtcgttctaatccacttcaagccaaacacgtccccagctctgtccatttcccaagataattcacaccattgccgaccattgcccctcgtctagcattcggaattcctgtgctccttgatattgtcttgttctgtcgagaacgaaagggttgggcattattcaaagagccgtttccagagcgtcatctcctgctcttcgctgagtccacggagacgctctacgtgtttgtctgcatgtgacatcgtctgaacaccttcgtattgaagccaaaaacaccgtaaagatgtatggtaccaacaccggcccgcagacgggcgtctcgactcccagatcttcttcctcgctccgcccattaaccctctcacacggctcgctcgaggcgtcgttcctcgtaccgaccaacgtccattaccatgcctccgaactgaaagaccggttcaccgccggtctgcccgctcccacagacgagttagcccaagacgacgagccgtcgtcggtcgctgagctggttgctcgttacatggagttcgttgcccacgaggttgacgagggcgaagatgacgcccaagggtcgtacgaagaggttctgaagctcgtgcttaacgagttcgagcgtatgttcctccgaggcaacgatgtccatgctctagccaagagtctaccggggattctcgagaagcagatcacagttgtccggagctactttgccgctcgttcggtcgcaaaccgggcgattcggccacacgagtcagccctgttcagagccgcagacgaaggatcaacaaccatttatagcatcttcggcggccaaggaaacattgtggaatacttcgacgagcttcgtgagatctacgcaacatatccttcgttcgtaggcgaactcgttacgagctcggccgagctcctccacaatctagcgcgagattctcgagcagagaagctgtatgccaagggtcttgatgttatggaatggctgcgttccccagatgcgacaccagatgtggactatctggtttcggcaccggtcagctttcctctgattggtctcgtacagctatgtcactaccaagttctcggaaagggtctcggtgtccatccagggatccttcgcgatcgcatacaaggtgctacaggtcactcacaaggcgttgtggttgcagctgcaacagctgcctcggattcctgggcatccttcgaaaaacattcaaaacacgcgctcaccatcttgttctggatcggtgctcgcagccaacaggtgtttcctagaacctccttgacccctaacacactgagggactcgatcgacaatggggagggagaacccacacctatgttgagtattcgcgatctgccccaaagcgaggtacagaagcacattgacgcaacaaaccaatatcttccggaggatcgccacattgcaatttccttgataaacagcccccgcaacatggtcgtaactggtccgcccatctctctatatggtcttaatcttcagctgcgcaaagtcaaagcaccgaccggcctcgaccaaaaccgcataccacacacagagcgcaaggtccgattcgtaaaccgattcttacctatcactgctccctttcacagcaagtacctggccgatgcaactaaactaatcgatcaagatcttgcagagatcaagatcgatgtttctagcctgggaattgcagtgtataatacatatactggtgaggacttaagagaaaccgtcaagggtgacatcgttccctcactcattcgaatgatcacgagggatcctgtgcactgggagaaagcgaccacatttcccaaagcgactcatgtacttgactttggacctggaggcatatcgggtctcggcgtcttaaccagccgtaacaaggagggtactggcgttcgcgtcatcctcgccggaacacttgacggttctgcgcaagagatcggttacaagtcagaacttttcgatcgtgatgaggaacacgcagtagtccacgctgacgactgggttgctaaatatggacctcgcctcgtcaagacttccactggtgagatttacgtcgacaccaaaatgagcagacttcttggtgtgcccccgattgtagtcgctggcatgacgcccgccactgttccttgggattttgttgccgcgaccatgaacgccggttaccagatcgaattgggcggcggtggatatttcaatgctaagcaaatgaccgaagcattggctaaaattgaacaagcgatacctgctggccggggtataactgtcaatctgatttacgtcaacccgcgagcaatgggatggcaaatccccttgataggccgactcagatcagaaggtgtgccaatcgaaggcctcacaatcggtgctggtgtcccttccattgaagttgcgcaagaatacatcgagaccttgggcttgaagcatatctctttcaagcctggctcgatggaagcaatacagaatgttatcaacattgccaaggccaatcccacattccctgttattctgcaatggactggtggccgaggcggtggtcaccattcgtttgaggattttcaccaacccgttcttcagatgtatggccgtatacgccgatctgacaacatcattcttgttgctgggagcggtttcggtggtgctgaggacacttatccctacttgacaggtgactggtcgaagaaatatggctaccctcccatgcccttcgatggttgcctttttggcagtcgtatgatggtcgctaaggaagcccacacaagcaaggctgcaaagcaagcaatcgttgatgctgagggtctcgacgatgaccagtgggagaagacctacaaaggtccagctggtggagtcatcacagtgagatccgaaatgggtgagcctattcacaagctcgctacccgtggtgtcagattctgggccgaaatggatcaaaagatatttagtctacctaaagagaagcgagttgcagagctgaagaagagtcgcgactacatcatcaagaaactcaacgatgacttccaaaaagtttggtttggtcgcaacaaggcgggacaaactgttgacctggaggatatgacatacggtgaggtagtgcggcgcctggtcgagctcctctacgtcaggcacgaaagtcgctggattgatccctcgtacaaaaagcttactggtgacttcatacatcgtctggaagaacgattcaccactagccccaatcaagcttcgctattacagaactatggggatctcgatgagcctttcccgaccgttgagaagatcttgagccactatattgaagctgacaaccagatcatcaatgcgcaagatgtccagcacttcctgctgctttgccaacgccgaggacaaaagcctgtcacttttgttcctgccctggacgaaaactttgaattcttcttcaagaaggactccctctggcaatctgaagatcttgaggccgtcattgatcaagatgttggccggacttgcattcttcaagggcctatgtcagccaaattctctactaaattggacgagcctatcaaagatatcttgaatggtatacacgatggtcatatttcaatgttgacacgagaagtctataataatgaccccagctcgattccaactatagaatactttggtggcaagctgattgagacagaaatgcctgtcgatatcgagggtttgattgtctctgaagatgcacagaaaaacacgtatcggttgtcgtcgtcgccggccgcttcccttccatcgattgacagctggctcgctttacttgcaggccccaatcgcggctggcgccatgcgctctttacgtccgaggttcttgtgcaaggcaagaaataccagaccaatcccatgaagcgcatatttgcgcctgttcgcggcttgtttgtggaagtacgatatcccaatgagccttccaaaacttccatcattgttcgtgagcaaccgcgccacaaccactaccaggatgtgattgaagtcaaattcgatggaaaatccaggattgttgtcaacatgatcaaagacacgactgctctcggcgaaccagtctctctacctctcagattctactaccatcctgaagcgggatatgcacccatccacgaagtcattgagggtcgcaatgatcgcatcaaggagttctactggcgtgcatggtttggagatgatgaaatggatctggatggcgatgttcactgccaatttgatggaggtcgaaacaagattactagcaaggacatcaacgactttgtgcatgctgttggcaacactggtgaggcattcgttgaccgtcctggcaaggaaatgttcgcaccaatggacttcgccattgttgttggatggaaagccatcactaagcccatcttcccacgcaagattgacggagatctattgaaacttgtccacctttccaatggtttccgcatgatgccaggcgcagagcctctcaagaaaggcgatgaggtgagaacaaccgctcagatcaatgccgtgatcaatcaggaatccggcaagatggttgaggtttgcggtaccatttaccgcgatggtgcagccgtgatggaggtcacatctcaattcctgtatcgcggtgtttacaccgatttcgaaaatactttccagcggaaacttgaaacaccaatgcaagttcatcttgccacatcaaaggatgttgccgtcctccagtccaaggactggatacagttcgataacaaccagatcgagttgctgggtcagactttaacgttccgattacaaagtttagtggagttcaagaacaagaccgtctttgacagcgttgcgacgcgtggccaggtcttacttgaactgcccaccaaagaaatcatacagattggtagtgtagactacgaggcaggcgcttcacacggaaatcctgtcattgattacctccaacgccacggctcctctattgagcagcctatattgtttgagaacccaatccctctcagcggaaaagccccactactcttgaaagcaccagcctcgaacgaaacatatgctagagtttcgggcgactacaaccctattcatgtgtcgcgcgtcttttccagctacgctaacctgcccggaaccatcacccacggcatgtactcaagtgctgctgttcgaagtttggtcgaaacgtgggctgctgagaacaatgttggccgggttcgcagcttccacgcttctctggttggcatggttcttcccaacgacgacattgaagtcaaactgcaacacgttggtatgatcggcggtcgaaagattatcaaagtggaagccagtaacaaagagacggaagaaaaggttctccttggtgaagcagaggtcgagcagccagtcacagcatacgtatttactggccaaggctcccaagagcaaggtatgggcatggacctttatgcctccagtccagttgccaaagaagtttgggatcgggccgacaaatatcttctcgacacctatggcttctctatcttgaacattgtcaagaataacccgaaggaacttactgttcacttcggcggcccccgaggcaaagccatccgcgaaaactacatgcaaatgaactttgagacaattggcgcggacgggaccgtgaagtcggagcggattttcaaggaaatcaatgagagaacaacatgctacacatatcggtcgcctacgggcttgctatcagccacgcagttcactcaacctgccctaaccctgatggagaaagccagtttcgaagacatgaacgccaaaggcctagtgccacgagagagcacatttgcggggcactctcttggcgaatactcagctctggctgctttggcggacgtgctgcccattgagtctttggtatctgtcgtcttctatcgtggtttgacgatgcaagttgccgtcgagcgagacgcccagggtcgctccaactactccatgtgtgccgttaaccctagccgtatctccaagacgttcggggaggcagctcttcgctttgtcgtcgacaatatcgcagaggaaaccggctggcttttggagattgtgaactacaatatcgccaacatgcaatacgtctgcgccggtgatcttcgtgcactcgacacactgactagtgtgaccaatttcctgaaggcccaaaaagtcgatattagtcaactactcaacaacgtaagccaagaagagctcaagcagcagcttaccgatatcatcaagggctcggctcagcagactttggccaagccccagcctcttgaactccagcgaggatttgccaccatcccgctcaagggtatcgatgtgcctttccattctaccttccttcgatctggtgtgaagccattccgaaatattctactgaagaagatcaataagacttctattgatccttccaagctggttgggaagtatattcccaacgtcactgctcgtcccttcgagcttactaaggagtacttccaaaatgtgtatgacttgacaaattcgcccaagatcgcgcagatccttcaaaactgggagagttaccaggatgacacgaataaagtcagcagtgcagaagtcgcagtcaacggtgtcaatggtcattgaaatgaccccaatcatgagctaacaaaatgtgccatctgaagtatgacggcgtaccatgggttatttcgagaagttgaaattttaactagactaaagtatagatatagagtaattatgtatattatttccaacatgatccgtgaacctggaaccagt

SEQ ID NO: 11983 - DNA, 2625 bp, Muscodor strobelii
  misc_feature: SGI cDNA ID NO. 563868
  misc_feature: Encodes the peptide sequence at SEQ ID NO 11984
atggcaggccagtcgctgccagcccagaactcgggtgccagcgattccaccgatgcttcagcgccccctcccgccaaaaagaagtcgaggcggggcggcgacgcatccatgcagaagcgccggtgtgtcagtacagcctgcgtcgcatgtcgccgccgcaagtcgaaatgcgatggcgctctgcccaaatgcgccgcttgcgcgagcgtctacggtacagagtgtacctacgatccggggtcagaccatcgtcgaaaaggcgtctatcgagagaagatcgatagtatgaaggcatctaactcgaccctccagatcatcatagaagcaattctaaatgctgaggaagatgatgttggggacctcgttaagcgaatccgaacctgtgatagtctagattctgtagctgagtcaatactcaagcaagaattcgaaacgacctcagctcaagatccagatgcactggaagacgactacacgacagacatgcccattgaaggcgagagagacttggcccgaaaaatgggcgaactgcgtctcgagaatggtgcgatccgattcattggcggcacctctcatctaattcattgggacgtgctcagctccccggatatcggtcaacaggacgtagacatggatgcaatcgacgcgaacccaatcacaagctggtccaacgtaacgaaggatccagaagctatcactcaccttttgaatatgtattttacatggcactatccttactttaccaccctatcccgaagcttattctatcgcgacttttctaaaggccggcggcgtgtcgcatcgtccagaacgacagcgtattgctcttcgttgctcgttaatgcaatgcttgcccttggctgccactttacgaacgtcaccagcgcctacggcactataggtgatagctggtccaaaggtgatcacttttttggcgaagccaaaagactcataattgacaacgacgaatacgaaaaacctcgcataacaactgtccaggctcttgccttgatgtctgtcagggaggcagggtgtggacgagaagcaaaaggctgggtctattctggcatgagcttcaggatggcccaggatataggactaaacatggatctaggaggtcttcagggtgatggtggtgttcttgacgatgcggaagtcgatgctcggagggtcacattttggggttgtttcctgttcgacaaatgttggtctaattatcttgggcggctcccccagctccccaagaactcatatagtgtcccaaagtacgacgtttttcctaacgaagatgccggaaactggtgcccctatacggactcaggtttcgacgaagtttcgaaacaaccggctcgaaccaggaccatcggcttacaaatgttaaagctctgtgaaattagcagcgatcttctgatattcttttatcacccgacacacatcggcagatctatgggtaaatcggtcgaattaaagaagctaagtgagctgcaccgccggcttgaggagtggcataaagagctacctgcagaactcgagccaaaagatgggcaattgccgaatgctatcctcatgcacatgttctttcatcttcagtatatccacttgttccggcctttccttaggtacaagcctagtgcctctccgttaccacctcacgtttcgccgcggcggatatgcactgcaaatgctagtgctatcagcaagctaatgcgattatataagaagacatacaatcttcgtcagatttgtaatattgctgtctacatgctgcactctgcctgtactatccatctattaaacttacccgaaaagacagcgagaagagatatcactcatggtgttaaacatcttgaagaaattgccgaagattggctttgcgggcggagaacactaagtattatcagtgtcctctcccgtaagtggaatgtcgatctccccgacgaagccgctcagatccttcagagaacagatgagcgatggggtacctttcatacttcggatgttccctctccacggtcacctgtgctgagaatcggctctcagagtcctatcagtcaacaaaccgcaggtccctcaccacccgaggcttcgcgctccagcatatctcctcagccgttgaatgtcggagcccatcctcgctcagatttccccccacatggacacgaagtcgatcaagtcgcagacaacatgtcgctcatgggacaatcgattcctttggatttcaacgcattgaatactccaaattggtcgtccccggctaccaacggtcccgtgcccagttacgcgcagagttttgttccgctgtctcgcagtggacaacctccacagagcgttgcaggacaatctgccacacattcacatgcggctaactctatatttgctgttgatgggcaagattggtatttaaacgatggcgtgaactggcaggctggatttgacgcgtggaatatgggaactgcatcgcagtcacctaacaatgtaccggaacagcaaatgtatgtctttggaacgaacacccagacagccccagtaccagccgcaacgcagtcgccgtcagccttagctttggatttcaacttcgacagcctgtcatcgatggacggctgggatctctctaacattgattag

SEQ ID NO: 11984 - protein, 874 aa, Muscodor strobelii
  misc_feature: SGI Peptide ID NO. 563868
  misc_feature (45)..(84): Pfam Id: PF00172 Pfam Desc: Fungal Zn(2)-Cys(6) binuclear cluster domain
  misc_feature (328)..(425): Pfam Id: PF04082 Pfam Desc: Fungal specific transcription factor domain
  misc_feature (19)..(834): NCBI GI: 171690394 Blast Desc: protein product [Podospora anserina] gi|170945145|emb|CAP71256.1| protein product [Podospora anserina]
  misc_feature (20)..(867): NCBI GI: 256720936 Blast Desc: NECHADRAFT_85733 [Nectria haematococca mpVI 77-13-4]
  misc_feature (12)..(866): NCBI GI: 116196226 Blast Desc: CHGG_04711 [Chaetomium globosum CBS 148.51] gi|88180624|gb|EAQ88092.1| CHGG_04711 [Chaetomium globosum CBS 148.51]
  misc_feature (1)..(718): NCBI GI: 182628303 Blast Desc: CHGG_04711 [Chaetomium globosum CBS 148.51] gi|88180624|gb|EAQ88092.1| CHGG_04711 [Chaetomium globosum CBS 148.51]
  misc_feature (1)..(718): NCBI GI: 245224 Blast Desc: NIT4=protein product involved in nitrate assimilation [Neurospora intermedia, Peptide, 1090 aa]
  misc_feature (1)..(718): NCBI GI: 168849 Blast Desc: pathway-specific regulatory protein [Neurospora crassa]
  misc_feature (1)..(837): NCBI GI: 6901427 Blast Desc: pathway-specific nitrogen regulator [Tolypocladium inflatum]
  misc_feature (1)..(718): NCBI GI: 164423545 Blast Desc: nitrogen assimilation transcription factor nirA [Neurospora crassa OR74A] gi|157070140|gb|EAA33271.2| nitrogen assimilation transcription factor nirA [Neurospora crassa OR74A]
  misc_feature (26)..(670): NCBI GI: 39951751 Blast Desc: MGG_01518 [Magnaporthe grisea 70-15] gi|145020637|gb|EDK04766.1| MGG_01518 [Magnaporthe grisea 70-15]
  misc_feature (16)..(845): NCBI GI: 169611234 Blast Desc: SNOG_08725 [Phaeosphaeria nodorum SN15] gi|111062773|gb|EAT83893.1| SNOG_08725 [Phaeosphaeria nodorum SN15]
MAGQSLPAQNSGASDSTDASAPPPAKKKSRRGGDASMQKRRCVSTACVACRRRKSKCDGALPKCAACASVYGTECTYDPGSDHRRKGVYREKIDSMKASNSTLQIIIEAILNAEEDDVGDLVKRIRTCDSLDSVAESILKQEFETTSAQDPDALEDDYTTDMPIEGERDLARKMGELRLENGAIRFIGGTSHLIHWDVLSSPDIGQQDVDMDAIDANPITSWSNVTKDPEAITHLLNMYFTWHYPYFTTLSRSLFYRDFSKGRRRVASSRTTAYCSSLLVNAMLALGCHFTNVTSAYGTIGDSWSKGDHFFGEAKRLIIDNDEYEKPRITTVQALALMSVREAGCGREAKGWVYSGMSFRMAQDIGLNMDLGGLQGDGGVLDDAEVDARRVTFWGCFLFDKCWSNYLGRLPQLPKNSYSVPKYDVFPNEDAGNWCPYTDSGFDEVSKQPARTRTIGLQMLKLCEISSDLLIFFYHPTHIGRSMGKSVELKKLSELHRRLEEWHKELPAELEPKDGQLPNAILMHMFFHLQYIHLFRPFLRYKPSASPLPPHVSPRRICTANASAISKLMRLYKKTYNLRQICNIAVYMLHSACTIHLLNLPEKTARRDITHGVKHLEEIAEDWLCGRRTLSIISVLSRKWNVDLPDEAAQILQRTDERWGTFHTSDVPSPRSPVLRIGSQSPISQQTAGPSPPEASRSSISPQPLNVGAHPRSDFPPHGHEVDQVADNMSLMGQSIPLDFNALNTPNWSSPATNGPVPSYAQSFVPLSRSGQPPQSVAGQSATHSHAANSIFAVDGQDWYLNDGVNWQAGFDAWNMGTASQSPNNVPEQQMYVFGTNTQTAPVPAATQSPSALALDFNFDSLSSMDGWDLSNID

SEQ ID NO: 11985 - DNA, 3326 bp, Muscodor strobelii
  misc_feature: SGI EST ID NO. CUFF.28401.0
  misc_feature: Variant of the nucleotide sequence at SEQ ID NO 11983
atttgctagaagctccgagcatccgcaacacatcctacgtgtaatgtagtttcgccattgacactcttacatctgtgtcttactatcatccttatcaatatggctcaatggtacagcgaagtggattgacgcttctttgaagttggaccctctggacccctgaacccctgtcccgccttaaggtcgaccccgcgagcagcggccggacgaaccgtaggctttaagttagtcaatcgtcactgtcaattaccaacccatccacgctgttgagacatctccgtggaacttgcaccttcgatcgcctccagtacatacgcttctgtacgtacccgtagcttgcccgcctgccttatctcggccgtcccaatggcaggccagtcgctgccagcccagaactcgggtgccagcgattccaccgatgcttcagcgccccctcccgccaaaaagaagtcgaggcggggcggcgacgcatccatgcagaagcgccggtgtgtcagtacagcctgcgtcgcatgtcgccgccgcaagtcgaaatgcgatggcgctctgcccaaatgcgccgcttgcgcgagcgtctacggtacagagtgtacctacgatccggggtcagaccatcgtcgaaaaggcgtctatcgagagaagatcgatagtatgaaggcatctaactcgaccctccagatcatcatagaagcaattctaaatgctgaggaagatgatgttggggacctcgttaagcgaatccgaacctgtgatagtctagattctgtagctgagtcaatactcaagcaagaattcgaaacgacctcagctcaagatccagatgcactggaagacgactacacgacagacatgcccattgaaggcgagagagacttggcccgaaaaatgggcgaactgcgtctcgagaatggtgcgatccgattcattggcggcacctctcatctaattcattgggacgtgctcagctccccggatatcggtcaacaggacgtagacatggatgcaatcgacgcgaacccaatcacaagctggtccaacgtaacgaaggatccagaagctatcactcaccttttgaatatgtattttacatggcactatccttactttaccaccctatcccgaagcttattctatcgcgacttttctaaaggccggcggcgtgtcgcatcgtccagaacgacagcgtattgctcttcgttgctcgttaatgcaatgcttgcccttggctgccactttacgaacgtcaccagcgcctacggcactataggtgatagctggtccaaaggtgatcacttttttggcgaagccaaaagactcataattgacaacgacgaatacgaaaaacctcgcataacaactgtccaggctcttgccttgatgtctgtcagggaggcagggtgtggacgagaagcaaaaggctgggtctattctggcatgagcttcaggatggcccaggatataggactaaacatggatctaggaggtcttcagggtgatggtggtgttcttgacgatgcggaagtcgatgctcggagggtcacattttggggttgtttcctgttcgacaaatgttggtctaattatcttgggcggctcccccagctccccaagaactcatatagtgtcccaaagtacgacgtttttcctaacgaagatgccggaaactggtgcccctatacggactcaggtttcgacgaagtttcgaaacaaccggctcgaaccaggaccatcggcttacaaatgttaaagctctgtgaaattagcagcgatcttctgatattcttttatcacccgacacacatcggcagatctatgggtaaatcggtcgaattaaagaagctaagtgagctgcaccgccggcttgaggagtggcataaagagctacctgcagaactcgagccaaaagatgggcaattgccgaatgctatcctcatgcacatgttctttcatcttcagtatatccacttgttccggcctttccttaggtacaagcctagtgcctctccgttaccacctcacgtttcgccgcggcggatatgcactgcaaatgctagtgctatcagcaagctaatgcgattatataagaagacatacaatcttcgtcagatttgtaatattgctgtctacatgctgcactctgcctgtactatccatctattaaacttacccgaaaagacagcgagaagagatatcactcatggtgttaaacatcttgaagaaattgccgaagattggctttgcgggcggagaacactaagtattatcagtgtcctctcccgtaagtggaatgtcgatctccccgacgaagccgctcagatccttcagagaacagatgagcgatggggtacctttcatacttcggatgttccctctccacggtcacctgtgctgagaatcggctctcagagtcctatcagtcaacaaaccgcaggtccctcaccacccgaggcttcgcgctccagcatatctcctcagccgttgaatgtcggagcccatcctcgctcagatttccccccacatggacacgaagtcgatcaagtcgcagacaacatgtcgctcatgggacaatcgattcctttggatttcaacgcattgaatactccaaattggtcgtccccggctaccaacggtcccgtgcccagttacgcgcagagttttgttccgctgtctcgcagtggacaacctccacagagcgttgcaggacaatctgccacacattcacatgcggctaactctatatttgctgttgatgggcaagattggtatttaaacgatggcgtgaactggcaggctggatttgacgcgtggaatatgggaactgcatcgcagtcacctaacaatgtaccggaacagcaaatgtatgtctttggaacgaacacccagacagccccagtaccagccgcaacgcagtcgccgtcagccttagctttggatttcaacttcgacagcctgtcatcgatggacggctgggatctctctaacattgattagttcgtcgtcgtgtacagcgcaatcatttcttacaacggttgggtaccatgttttttaagctaggcgcctcacagagcggataggaattttcggaaaatctaacgtcatgacactatactttcaacaggccatgagatttgggaacactgtttactgcttagttcatcttgttgtatccattttcttggcaggcattatagtataaatcgagagcgacaattagcgttggtgttccagcaacattgcatatagctaggaagtcttctatactcatactcaccacttgaaaacaccgacccttacgcatcagtgaggtatactgatgaaaggttctg

SEQ ID NO: 11986 - DNA, 3184 bp, Muscodor strobelii
  misc_feature: SGI cDNA ID NO. 563869
  misc_feature: Encodes the peptide sequence at SEQ ID NO 11987
atggccgcctcgaaaagtgcgaatgagccgattgccatcgtaggcagtggctgcagactccccggcggagctaactcgccctccagactatggaatttactgcagcagccccgtgatctgttacgaaagatcacccctgagacgcgattcaactccgacggttggtaccacgagaacacgcagcatccggggcgaactaacacccggcacgcgtacctacttgacgagaatattcgagagttcgatgcgcagttcttcaacatcaagggcgtcgaggccgtggccgttgacccccagcaccgtatcctcctcgagacaacgtacgaggccctcgaggcggctggtcttaccatcgaaggcctcaatgggtcagacacagcagtgtttgtcggccagatgaacaacgactacgactacgccggcgtacgtgatctgcagggtctgcacacctaccacgcaaccggcaccgcgccgagcatcacgtccaaccggatttcctacttctacgactggcacggaccgtccgcaacggtggatacggcatgttcatccagtcttgtcgccctgaatatggctgtccaggccttgagatcggggacctcccgagtagcgctcgcctgcggcaccaacttgatcctaggccccgagcgattcgtctcggagagcaacttccagatgttgtctgccgatgggcagagccgcatgtgggacgagtcagccaacggctacggacgcggggaaggcgtcgccgccgtcgtgctcaagacactgtcgtcggcactggctgatggcgattctatcgactgcatcattcgcgagatcgacgtgaaccacgatggtcggagtcaaggcatcaccatgccccgggcatcggcgcagacggccctgatccgaaaggtttacgccaaggcgggtctcgacgtggacagcgcggaagatcgttgccaatatttcgaggcccatggtacaggcacccctgccggcgatcctattgaagcagaggctatatatgaaacgtttttcaaagccggggccgacaccattacaccccaaccgccgatgtatgtaggatccatcgaaacggtcattggccacacggagagtacggctgggctagccggagtcctcaaggttgcaatggccatgaaaagggggtttatcccccctaaccttctcttcaagacattgcacccgagaatacgcgagttctatgggccaatgcaggtaccaacagaactgactccatggcccgagctgcctcatggccagccgcgcagagcgagtgtcaatagcttcggcttcggtggcacaaacgcgcatgtgattctagagagttacgagggaccgacttcgacttctagtatcttgcctaggcgcgcatcatcaccatcactatacacccccataatattctctgcgcatactagacagtctcttatcgacaatctgaagtcgatggcattgtatctagcggaaaacccgcagacggatctgtctgatctagcattcactctgcgaactcgaaagtcgcagctcttggagcgtgtctcgttaccagctccaagttcgatcgaggaacttcgcgaagcgctgttgtccaccgcttccagaattaaagggaacgacagcactgaatcgacgagaacggtgacaacgacaacccggcgcacctcagcgaacggcgccgcagccactatccttggcatctttactggacagggagcacagtacattcgcatgggcgctgagctactagaaccacgtggtggcgaaagaactgacgccctggcgcagtttgtcgagaagacactggcagatttggaccagagtcttgcgacgctccccgaaccagaccgtcctcagtggaggatcagggatgagctattagccgccgaaggcttgtctcgggtcaacgaggccgctctgtcccagccgctttgcacggccgtccagatagtgctcgtcggtctcctacgtctagcccatgtagaattcgcagcggtagtgggtcactcatcaggtgaaatcggagcagcctttgctgctgggcgtctttccgcgcacgacgccatccgtatcgcgtactatcgggggctgtatgcccacttggcaatgggcaacgacggcaaacgcggtgcaatgctggcagccggcctcagtttcgaagcagcggaagagctctgcgctgaggagcaattttgggggcgcctagctgtagcagcgaataatgccccagccagcgtgactatctcaggcgacgaggatgccgtgctggacgtcaaagaaagactcgatactgaaaatattttcgtgcagcagctcaaggtcgataaggcttaccactcttaccacatggaggcatcgtctgctgcctacttggatgccctcggccgttgcggcattcaaccactgagccaaggagctgggacgctatggttttcaagtgtccgcccagactcaaacccgaccactagcgataacctcgggctagatggcgcatactggaacgagaacctcgtctcgcctgtgcttttcatggacgccattgatgcggccatatcggcgtttcctggggggttcgacgccatcatagaggtaggtccgcatccagctctgaagcggccagtactctcgacgatcctggagttgtcggatcagggcagcgacccgatgtacatcgcaactctacagcgtaagtccaatgcccggcagagtatttcagctattctgggtgagctgtgggtcgacctaccgactggcacagtcgacatcaatgcgtttgagaatgcctttcgtcattctccttcccaattccgatatttgcccgacctaccatcttacaaatggacacacggccgtgaatactggcacgaatcacccgtgtcacgcaacctgcgacttcgcacaaacgccgcgcatcctctcctcggcgagctgacgcccgagagtagtatgggcagaagcgagagctcgcccgtgcggaggctactatggcgcaatactattcgcacaagtgatcttccttggatcacaggacacaaggttcagaatacttgtgtcttcccggcggcgggatatatcgcaacggctgtcgagacggtgcctttcatcaccggcgggcgggcgtacagcatgacggagatcagcgattttcgcattctccaacctttgatgttccagtccg

SEQ ID NO: 11987 - protein, 1061 aa, Muscodor strobelii
  misc_feature: SGI Peptide ID NO. 563869
  misc_feature (569)..(924): Pfam Id: PF00698 Pfam Desc: Acyl transferase domain
  misc_feature (9)..(260): Pfam Id: PF00109 Pfam Desc: Beta-ketoacyl synthase, N-terminal domain
  misc_feature (268)..(394): Pfam Id: PF02801 Pfam Desc: Beta-ketoacyl synthase, C-terminal domain
  misc_feature (644)..(787): Pfam Id: PF00698 Pfam Desc: Acyl transferase domain
  misc_feature (830)..(872): Pfam Id: PF00698 Pfam Desc: Acyl transferase domain
  misc_feature (276)..(394): Pfam Id: PF02801 Pfam Desc: Beta-ketoacyl synthase, C-terminal domain
  misc_feature (174)..(209): Pfam Id: PF00108 Pfam Desc: Thiolase, N-terminal domain
  misc_feature (8)..(1059): NCBI GI: 212545767 Blast Desc: polyketide synthase, [Penicillium marneffei ATCC 18224] gi|210064557|gb|EEA18652.1| polyketide synthase, [Penicillium marneffei ATCC 18224]
  misc_feature (2)..(1060): NCBI GI: 225678468 Blast Desc: lovastatin nonaketide synthase [Paracoccidioides brasiliensis Pb03]
  misc_feature (2)..(1060): NCBI GI: 226294825 Blast Desc: lovastatin nonaketide synthase [Paracoccidioides brasiliensis Pb18]
  misc_feature (8)..(1059): NCBI GI: 242801931 Blast Desc: polyketide synthase, [Talaromyces stipitatus ATCC 10500] gi|218717216|gb|EED16637.1| polyketide synthase, [Talaromyces stipitatus ATCC 10500]
  misc_feature (9)..(1059): NCBI GI: 189196478 Blast Desc: lovastatin nonaketide synthase [Pyrenophora tritici-repentis Pt-1C-BFP] gi|187980456|gb|EDU47082.1| lovastatin nonaketide synthase [Pyrenophora tritici-repentis
  misc_feature (5)..(1060): NCBI GI: 47109416 Blast Desc: polyketide synthase/peptide synthetase [Magnaporthe grisea]
  misc_feature (1)..(1059): NCBI GI: 40787393 Blast Desc: polyketide synthase [Cochliobolus heterostrophus]
  misc_feature (9)..(1060): NCBI GI: 255938466 Blast Desc: Pc14g00080 [Penicillium chrysogenum Wisconsin 54-1255] gi|211584624|emb|CAP74149.1| Pc14g00080 [Penicillium chrysogenum Wisconsin 54-1255]
  misc_feature (9)..(1059): NCBI GI: 121704363 Blast Desc: hybrid NRPS/PKS enzyme, [Aspergillus clavatus NRRL 1] gi|119398590|gb|EAW09019.1| hybrid NRPS/PKS enzyme, [Aspergillus clavatus NRRL 1]
  misc_feature (9)..(1059): NCBI GI: 145239699 Blast Desc: An08g03790 [Aspergillus niger] gi|134077007|emb|CAK45416.1| protein product [Aspergillus niger]
  misc_feature (1)..(1059): SWISSPROT Homolog: EC 2.3.1.161 Lovastatin nonaketide synthase
  misc_feature: Useful for fungicidal and/or biocontrol applications
MAASKSANEPIAIVGSGCRLPGGANSPSRLWNLLQQPRDLLRKITPETRFNSDGWYHENTQHPGRTNTRHAYLLDENIREFDAQFFNIKGVEAVAVDPQHRILLETTYEALEAAGLTIEGLNGSDTAVFVGQMNNDYDYAGVRDLQGLHTYHATGTAPSITSNRISYFYDWHGPSATVDTACSSSLVALNMAVQALRSGTSRVALACGTNLILGPERFVSESNFQMLSADGQSRMWDESANGYGRGEGVAAVVLKTLSSALADGDSIDCIIREIDVNHDGRSQGITMPRASAQTALIRKVYAKAGLDVDSAEDRCQYFEAHGTGTPAGDPIEAEAIYETFFKAGADTITPQPPMYVGSIETVIGHTESTAGLAGVLKVAMAMKRGFIPPNLLFKTLHPRIREFYGPMQVPTELTPWPELPHGQPRRASVNSFGFGGTNAHVILESYEGPTSTSSILPRRASSPSLYTPIIFSAHTRQSLIDNLKSMALYLAENPQTDLSDLAFTLRTRKSQLLERVSLPAPSSIEELREALLSTASRIKGNDSTESTRTVTTTTRRTSANGAAATILGIFTGQGAQYIRMGAELLEPRGGERTDALAQFVEKTLADLDQSLATLPEPDRPQWRIRDELLAAEGLSRVNEAALSQPLCTAVQIVLVGLLRLAHVEFAAVVGHSSGEIGAAFAAGRLSAHDAIRIAYYRGLYAHLAMGNDGKRGAMLAAGLSFEAAEELCAEEQFWGRLAVAANNAPASVTISGDEDAVLDVKERLDTENIFVQQLKVDKAYHSYHMEASSAAYLDALGRCGIQPLSQGAGTLWFSSVRPDSNPTTSDNLGLDGAYWNENLVSPVLFMDAIDAAISAFPGGFDAIIEVGPHPALKRPVLSTILELSDQGSDPMYIATLQRKSNARQSISAILGELWVDLPTGTVDINAFENAFRHSPSQFRYLPDLPSYKWTHGREYWHESPVSRNLRLRTNAAHPLLGELTPESSMGRSESSPVRRLLWRNTIRTSDLPWITGHKVQNTCVFPAAGYIATAVETVPFITGGRAYSMTEISDFRILQPLMFQS

SEQ ID NO: 11988 - DNA, 1542 bp, Muscodor strobelii
  misc_feature: SGI cDNA ID NO. 563870
  misc_feature: Encodes the peptide sequence at SEQ ID NO 11989
atgtcctggctgctgaatttcgaggccttgagcaccgtagcccgacagaaatggcttgcttggggggctatctttgtcctcatatatgccattctcagaacagtatatctagccaaatatcacccattgtccaaatttccaggacctagactagcggccatttcgtatgtctggtatggttggtcttggttatccggtcgttatccatttgtcatacgagaactattcgagaaatatggcactgtccacacaggcgatgttgttcggattggacctaacgaggtcgttttcttctctcctgaagcctatgctcaaatatataccgcatctgccaagggtcggcctacctttctcaaggacaacatgatggctgacccgtcgaaatatcccggcatgttctcaatcctagatgtagacgagcaccgtgctgcacggcgtgtgtttaacccagcctttagcccccgtctgtaccgcgaatacgagccgataatccacagatacatttccactttcttttcaacgttggaaattctaagctcgtcggataagggtgtcgatatgtcccactggctcgagtatttatttggggatattggcgggtcgttggcaatgggcactgattatggaaacatggagttaggacatgcggagccctttctcgatctttttagccgcctgggctggtggctgacagtgcgactcgtggcgagaaaattccccttgctttctccactacaatatctcatgctatcccccaagatgctcagcagcttcgtcaagaccacatcttccaatactcgactagttgagaagcgcgtacaggaccgcaatcccaatcggaaagattatttgacaccagtcgtaacgcgtgatgatcaggctctaccacccgttgagtacctaacatcgcatgcggcaatcttgctcactgggcacattgaatcagcgacagttgctacggctggggtgtactacctcttagaaaaccccgaagctcttcggactttgcagctagagttgcgacaaagattccagtcacttgaagagctcaccgacgatgccctgcaggaactgccatggctggacgcagtgatcaacgaatcgatgcgaatccatacgaatgtaccgtacggtctacctagagttagtccaggtgcaagcatcgatggccactttgtggcaaaggggtgcgtggttcacacagcggcatatgcaacaacacatttggcaaagtacttcaagaagccatacgaatttcgtcccgagagatggttgccgcccacacacccgcgccacaacaagatattcgacgacgactgcaagaccggtttccgtccattcagtgttggcccacgaggctgtatcgggcagggggtcgcgctgatgatcatgcgcctcgtgtttgggcgtctcgcttggaactacgactgggaaatgctaaataaaggcgagatctgctgggacaaggatctaaggttgtatagtatatggtacaagccctcagtcatgattcgtttccacaaccggcctcttgcggaataa

SEQ ID NO: 11989 - protein, 513 aa, Muscodor strobelii
  misc_feature: SGI Peptide ID NO. 563870
  misc_feature (47)..(506): Pfam Id: PF00067 Pfam Desc: Cytochrome P450
  misc_feature (315)..(486): Pfam Id: PF00067 Pfam Desc: Cytochrome P450
  misc_feature (62)..(506): NCBI GI: 156054726 Blast Desc: SS1G_06211 [Sclerotinia sclerotiorum 1980] gi|154703991|gb|EDO03730.1| SS1G_06211 [Sclerotinia sclerotiorum 1980]
  misc_feature (65)..(506): NCBI GI: 154296440 Blast Desc: BC1G_13046 [Botryotinia fuckeliana B05.10] gi|150843407|gb|EDN18600.1| BC1G_13046 [Botryotinia fuckeliana B05.10]
  misc_feature (19)..(507): NCBI GI: 46138361 Blast Desc: FG10695.1 [Gibberella zeae PH-1]
  misc_feature (26)..(510): NCBI GI: 259485752 Blast Desc: TPA: cytochrome P450, (Eurofung) [Aspergillus nidulans FGSC A4]
  misc_feature (109)..(501): NCBI GI: 145606883 Blast Desc: MGG_03819 [Magnaporthe grisea 70-15] gi|145014505|gb|EDJ99073.1| MGG_03819 [Magnaporthe grisea 70-15]
  misc_feature (18)..(506): NCBI GI: 154289577 Blast Desc: BC1G_16084 [Botryotinia fuckeliana B05.10] gi|150849019|gb|EDN24212.1| BC1G_16084 [Botryotinia fuckeliana B05.10] gi|169635728|emb|CAP58782.1| cytochrome P40 monooxygenase
  misc_feature (26)..(508): NCBI GI: 255931847 Blast Desc: Pc12g06380 [Penicillium chrysogenum Wisconsin 54-1255] gi|211582099|emb|CAP80265.1| Pc12g06380 [Penicillium chrysogenum Wisconsin 54-1255]
  misc_feature (17)..(509): NCBI GI: 189202834 Blast Desc: cytochrome P450 4F3 omega-hydroxylase [Pyrenophora tritici-repentis Pt-1C-BFP] gi|187984852|gb|EDU50340.1| cytochrome P450 4F3 omega-hydroxylase [Pyrenophora Pt-1C-BFP]
  misc_feature (23)..(509): NCBI GI: 121712467 Blast Desc: benzoate 4-monooxygenase cytochrome P450 [Aspergillus clavatus NRRL 1] gi|119401997|gb|EAW12419.1| benzoate 4-monooxygenase cytochrome P450 [Aspergillus clavatus NRRL 1]
  misc_feature (41)..(505): NCBI GI: 259485758 Blast Desc: TPA: cytochrome P450, (Eurofung) [Aspergillus nidulans FGSC A4]
  misc_feature (43)..(483): SWISSPROT Homolog: EC 1.14.13.12 Benzoate 4-monooxygenase
MSWLLNFEALSTVARQKWLAWGAIFVLIYAILRTVYLAKYHPLSKFPGPRLAAISYVWYGWSWLSGRYPFVIRELFEKYGTVHTGDVVRIGPNEVVFFSPEAYAQIYTASAKGRPTFLKDNMMADPSKYPGMFSILDVDEHRAARRVFNPAFSPRLYREYEPIIHRYISTFFSTLEILSSSDKGVDMSHWLEYLFGDIGGSLAMGTDYGNMELGHAEPFLDLFSRLGWWLTVRLVARKFPLLSPLQYLMLSPKMLSSFVKTTSSNTRLVEKRVQDRNPNRKDYLTPVVTRDDQALPPVEYLTSHAAILLTGHIESATVATAGVYYLLENPEALRTLQLELRQRFQSLEELTDDALQELPWLDAVINESMRIHTNVPYGLPRVSPGASIDGHFVAKGCVVHTAAYATTHLAKYFKKPYEFRPERWLPPTHPRHNKIFDDDCKTGFRPFSVGPRGCIGQGVALMIMRLVFGRLAWNYDWEMLNKGEICWDKDLRLYSIWYKPSVMIRFHNRPLAE

SEQ ID NO: 11990 - DNA, 1404 bp, Muscodor strobelii
  misc_feature: SGI EST ID NO. CUFF.28410.0
  misc_feature: Variant of the nucleotide sequence at SEQ ID NO 11988
ctgaagcctatgctcaaatatataccgcatctgccaagggtcggcctacctttctcaaggacaacatgatggctgacccgtcgaaatatcccggcatgttctcaatcctagatgtagacgagcaccgtgctgcacggcgtgtgtttaacccagcctttagcccccgtctgtaccgcgaatacgagccgataatccacagatacatttccactttcttttcaacgttggaaattctaagctcgtcggataagggtgtcgatatgtcccactggctcgagtatttatttggggatattggcgggtcgttggcaatgggcactgattatggaaacatggagttaggacatgcggagccctttctcgatctttttagccgcctgggctggtggctgacagtgcgactcgtggcgagaaaattccccttgctttctccactacaatatctcatgctatcccccaagatgctcagcagcttcgtcaagaccacatcttccaatactcgactagttgagaagcgcgtacaggaccgcaatcccaatcggaaagattatttgacaccagtcgtaacgcgtgatgatcaggctctaccacccgttgagtacctaacatcgcatgcggcaatcttgctcactgggcacattgaatcagcgacagttgctacggctggggtgtactacctcttagaaaaccccgaagctcttcggactttgcagctagagttgcgacaaagattccagtcacttgaagagctcaccgacgatgccctgcaggaactgccatggctggacgcagtgatcaacgaatcgatgcgaatccatacgaatgtaccgtacggtctacctagagttagtccaggtgcaagcatcgatggccactttgtggcaaagggggtaagcaatgcccgattcatccacccccttcctcctctatcacctcaggggtgtatatgcccattcgtcggacgcttagaataacgaatctgttgaatcgcatgcagtgcgtggttcacacagcggcatatgcaacaacacatttggcaaagtacttcaagaagccatacgaatttcgtcccgagagatggttgccgcccacacacccgcgccacaacaagatattcgacgacgactgcaagaccggtttccgtccattcagtgttggcccacgaggctgtatcgggcagggggtcgcgctgatgatcatgcgcctcgtgtttgggcgtctcgcttggaactacgactgggaaatgctaaataaaggcgagatctgctgggacaaggatctaaggttgtatagtatatggtacaagccctcagtcatgattcgtttccacaaccggcctcttgcggaataaggcgtagtcagatagttgtataggttaacatgattgtaaactttcgggctcga

SEQ ID NO: 11991 - DNA, 744 bp, Muscodor strobelii
  misc_feature: SGI cDNA ID NO. 563871
  misc_feature: Encodes the peptide sequence at SEQ ID NO 11992
atgcagtttcccgatatcgaggaacccttctccccgggatcaaaggccatcacgggtgatggagatcgggccactaatgacgggttcacggctgctcgcgttgctcaagcccttagctcaacattggctgagatggcggcatacacgcctcagctttcgacccggctgaggctcgactggctcgactctaacgccgcccccgacactccagggtcctgggaaacagcatccgaaccttacgatctgactgcaataaccgaaaagtatctcatggccttccaagtcttggtgccaccccgagcatcggccatgctcacaccagtagagcccgtggcctcggtggcaaccaaattgatgctgctgtcgtcgtacattcaactcatccaactcatcgacaccatcctcaacagctacttctatcgcccggccggcgattgctccgagcccgctctcgtgctgcaggaccacaccaagggtgctaaattccatgttttagcttcggcgcgcattatagagcatcagctcagtgccatcgaaaccttgttgggtttcccggtcgagtaccgggcttggtcggtctgtgcagggagctacggtgttttcagctacccgggctgtgaggagttgctctcggccgttatgatgcgacagcagtcagttgggtcatttacagggatggactacattagaagcctcaagcagacatttgaacgactgcatgtcttaggtagccaatggttgtag

SEQ ID NO: 11992 - protein, 247 aa, Muscodor strobelii
  misc_feature: SGI Peptide ID NO. 563871
MQFPDIEEPFSPGSKAITGDGDRATNDGFTAARVAQALSSTLAEMAAYTPQLSTRLRLDWLDSNAAPDTPGSWETASEPYDLTAITEKYLMAFQVLVPPRASAMLTPVEPVASVATKLMLLSSYIQLIQLIDTILNSYFYRPAGDCSEPALVLQDHTKGAKFHVLASARIIEHQLSAIETLLGFPVEYRAWSVCAGSYGVFSYPGCEELLSAVMMRQQSVGSFTGMDYIRSLKQTFERLHVLGSQWL

SEQ ID NO: 11993 - DNA, 788 bp, Muscodor strobelii
  misc_feature: SGI EST ID NO. CUFF.28418.0
  misc_feature: Variant of the nucleotide sequence at SEQ ID NO 11991
gacgagactcgctgtaaaagccgctcaagagtctctacctcaccatgagcactccgacgagcaaacggacggcgtgcgatagatgccgtaatctgaaagtagcctgcaacaggtctgatggcacggccaacaattcatactgcgagcgttgtctccgagcccgagtcaagtgccgtacgacccataaccgcggcctgtcaatgtcatcgtcccatcgacccggtgaaagcgatttatggtcgcaccactttcccgaccccttcataatatcacctctagactcgcaacagtacaatccgctcagtattgattgcccggctactgcttccgaccgcatcgacatatccgggatgcagtttcccgatatcgaggaacccttctccccgggatcaaaggccatcacgggtgatggagatcgggccactaatgacgggttcacggctgctcgcgttgctcaagcccttagctcaacattggctgagatggcggcatacacgcctcagctttcgacccggctgaggctcgactggctcgactctaacgccgcccccgacactccagggtcctgggaaacagcatccgaaccttacgatctgactgcaataaccgaaaagtatctcatggccttccaagtcttggtgccaccccgagcatcggccatgctcacaccagtagagcccgtggcctcggtggcaaccaaattgatgctgctgtcgtcgtacattcaactcatccaactcatcgacaccatcctcaacagctacttctatcgcccggccggcgattgc

SEQ ID NO: 11994 - DNA, 1557 bp, Muscodor strobelii
  misc_feature: SGI cDNA ID NO. 563872
  misc_feature: Elevated expression when VOC is produced
  misc_feature: Encodes the peptide sequence at SEQ ID NO 11995
atggcgtcccctacccaggccgtacggctaccaatacactcgaagatcaagaaattgtttgatgagacgagcttctttcctcttttgtgttctattaccatcaatatattacacatccttttcaccgaaaacaaggcggaattgaccaggcatgttgctgccgccgccggcgctattccgtacatcgacggcgacgcggaatactattcgctatggtgggctgcccagggtagaaacaaatttcccgaggcacaacataacctgatcgaacaccagtcacttcctgaaaatcgagtctggagcgtcgtaagtagcgtgatccaatggtttcaaacacgttcccaatccttcaattgggtcgtcggccctatggaccagtcatacctcgagcttgctttacaaaaaaacggactggtcttggcagagactcagttagctatggctcgcgatctgcaacaagacaacaacccgaaatgtcagaaagggtcgtcggtttggcttaccaggatggatgaagtaagcgggaccatgatgaaatacgcatccatctcgacaaaacagtgtcagtcgcaggcgctgcgcgtaaatcgcccgtatccacttcaagactatcagatgcagttaatgctactggagcaacaaaacaaaaagaggctcctggaagcgcaacttagacagcaagaggttgctgaatctgataccaaacctactaccgatgtcccttccactgccaaaatagaacagcagttggctttatttgccgaggcaaactctcagatgcttctaagagcagacaggaacgaaggcagtcccgttccgagttttccggaatataccgtcgagcctgttatcaacgtggacatggtaagcacatgggttgaagcctgggcttatatggtatccccgatttgtgcgggagtttcccattggaggtccatctaccagaaattattcaacacactatctccgactcagttcgaaatgatagtcgctaagacgagccatccaaacccagaggacaaagatggggtcgttggcacggcctacatacactactacaaaggaatcgcatcggttcactgtgttactgtgaagccggctcacagagggagaggagtcggtcctggactactaaatatcgcggcgaaactggccaagagtaaagggtacaacatcatgaccgcaaccagcactgaccaaggccgagctatgttgttcaaagccggtttccaccagattggtgtcgtgaagcagtactgctataatctcaaaattttgcagagagcgatgaaaatgcagaatgataagcaagagaagccagaagaagcagcgaaagtagacacagggcccgttgccgagcccacttctccagaattagaggatgtttccacaaaaagggaggccactacaacagacgcggagatagcctcaaaaattgcgtcgctgaaattgaataaagagtcgggtaaagatgaggaggttagcgagggagattcaagcgattcaggagggtggacaatggtggatgactcaaatgaggagaccaacaatcgttga

SEQ ID NO: 11995 - protein, 518 aa, Muscodor strobelii
  misc_feature: SGI Peptide ID NO. 563872
  misc_feature (336)..(411): Pfam Id: PF00583 Pfam Desc: Acetyltransferase (GNAT) family
  misc_feature (339)..(411): Pfam Id: PF00583 Pfam Desc: Acetyltransferase (GNAT) family
  misc_feature (201)..(244): NCBI GI: 240107600 Blast Desc: CPC735_042230 [Coccidioides posadasii C735 delta SOWgp]
  misc_feature (201)..(236): NCBI GI: 255954925 Blast Desc: Pc21g11840 [Penicillium chrysogenum Wisconsin 54-1255] gi|211589926|emb|CAP96081.1| Pc21g11840 [Penicillium chrysogenum Wisconsin 54-1255]
  misc_feature (201)..(244): NCBI GI: 119177675 Blast Desc: CIMG_07752 [Coccidioides immitis RS]
  misc_feature (167)..(236): NCBI GI: 239609778 Blast Desc: cAMP-dependent protein kinase pathway protein [Ajellomyces dermatitidis ER-3]
  misc_feature (201)..(236): NCBI GI: 225562580 Blast Desc: conserved [Ajellomyces capsulatus G186AR]
  misc_feature (201)..(244): NCBI GI: 258576817 Blast Desc: OefA protein [Uncinocarpus reesii 1704] gi|237902856|gb|EEP77257.1| OefA protein [Uncinocarpus reesii 1704]
  misc_feature (201)..(236): NCBI GI: 154279502 Blast Desc: conserved [Ajellomyces capsulatus NAm1] gi|150412507|gb|EDN07894.1| conserved [Ajellomyces capsulatus NAm1]
  misc_feature (201)..(236): NCBI GI: 115385352 Blast Desc: ATEG_01858 [Aspergillus terreus NIH2624] gi|114196915|gb|EAU38615.1| ATEG_01858 [Aspergillus terreus NIH2624]
  misc_feature (201)..(236): NCBI GI: 145245731 Blast Desc: An12g00390 [Aspergillus niger] gi|134079835|emb|CAK40968.1| protein product [Aspergillus niger]
  misc_feature (201)..(236): NCBI GI: 169782074 Blast Desc: [Aspergillus oryzae RIB40] gi|238498930|ref|XP_002380700.1| cAMP-dependent protein kinase pathway protein (Som1), [Aspergillus flavus NRRL3357] protein
  misc_feature: Useful for introducing or modulating the production of volatile compounds
MASPTQAVRLPIHSKIKKLFDETSFFPLLCSITINILHILFTENKAELTRHVAAAAGAIPYIDGDAEYYSLWWAAQGRNKFPEAQHNLIEHQSLPENRVWSVVSSVIQWFQTRSQSFNWVVGPMDQSYLELALQKNGLVLAETQLAMARDLQQDNNPKCQKGSSVWLTRMDEVSGTMMKYASISTKQCQSQALRVNRPYPLQDYQMQLMLLEQQNKKRLLEAQLRQQEVAESDTKPTTDVPSTAKIEQQLALFAEANSQMLLRADRNEGSPVPSFPEYTVEPVINVDMVSTWVEAWAYMVSPICAGVSHWRSIYQKLFNTLSPTQFEMIVAKTSHPNPEDKDGVVGTAYIHYYKGIASVHCVTVKPAHRGRGVGPGLLNIAAKLAKSKGYNIMTATSTDQGRAMLFKAGFHQIGVVKQYCYNLKILQRAMKMQNDKQEKPEEAAKVDTGPVAEPTSPELEDVSTKREATTTDAEIASKIASLKLNKESGKDEEVSEGDSSDSGGWTMVDDSNEETNNR

SEQ ID NO: 11996 - DNA, 2328 bp, Muscodor strobelii
  misc_feature: SGI EST ID NO. CUFF.28436.0
  misc_feature: Variant of the nucleotide sequence at SEQ ID NO 11994
tagcgcatggggattcatcgaatggcgcagctgtaggcaacaacagacgataggtaagctgtaggactttatgtgcttgggtcgcaagcactgcagatggtgtgactcgagatgcggggtcaagctggcacttgatgagcacattgccctgagcatatgtcctcttcccaagtctcgacagaaataagctcaatcttgaagtgagcattacttgaaatccgctgcaaatgctctaatttgtcttgactacttgaaatacgtgtgcctccaagactaacaattcgagtactttcaccccacctccagtatttccaaccaacccttgatttcgtctccttttttagtcagcaactacctatccacatggcgtcccctacccaggccgtacggctaccaatacactcgaagatcaagaaattgtttgatgagacgagcttctttcctcttttgtgttctattaccatcaatatattacacatccttttcaccgaaaacaaggcggaattgaccaggcatgttgctgccgccgccggcgctattccgtacatcgacggcgacgcggaatactattcgctatggtgggctgcccagggtagaaacaaatttcccgaggcacaacataacctgatcgaacaccagtcacttcctgaaaatcgagtctggagcgtcgtaagtagcgtgatccaatggtttcaaacacgttcccaatccttcaattgggtcgtcggccctatggaccagtcatacctcgagcttgctttacaaaaaaacggactggtcttggcagagactcagttagctatggctcgcgatctgcaacaagacaacaacccgaaatgtcagaaagggtcgtcggtttggcttaccaggatggatgaagtaagcgggaccatgatgaaatacgcatccatctcgacaaaacagtgtcagtcgcaggcgctgcgcgtaaatcgcccgtatccacttcaagactatcagatgcagttaatgctactggagcaacaaaacaaaaagaggctcctggaagcgcaacttagacagcaagaggttgctgaatctgataccaaacctactaccgatgtcccttccactgccaaaatagaacagcagttggctttatttgccgaggcaaactctcagatgcttctaagagcagacaggaacgaaggcagtcccgttccgagttttccggaatataccgtcgagcctgttatcaacgtggacatggtaagcacatgggttgaagcctgggcttatatggtatccccgatttgtgcgggagtttcccattggaggtccatctaccagaaattattcaacacactatctccgactcagttcgaaatgatagtcgctaagacgagccatccaaacccagaggacaaagatggggtcgttggcacggcctacatacactactacaaaggaatcgcatcggttcactgtgttactgtgaagccggctcacagagggagaggagtcggtcctggactactaaatatcgcggcgaaactggccaagagtaaagggtacaacatcatgaccgcaaccagcactgaccaaggccgagctatgttgttcaaagccggtttccaccagattggtgtcgtgaagcagtactgctataatctcaaaattttgcagagagcgatgaaaatgcagaatgataagcaagagaagccagaagaagcagcgaaagtagacacagggcccgttgccgagcccacttctccagaattagaggatgtttccacaaaaagggaggccactacaacagacgcggagatagcctcaaaaattgcgtcgctgaaattgaataaagagtcgggtaaagatgaggaggttagcgagggagattcaagcgattcaggagggtggacaatggtggatgactcaaatgaggagaccaacaatcgttgagtagtttctttgatggtcacaaattgagaacgactgagccccagactaaatgatcgtcatgttcaaaggcgatgtgtagttcatttcaggtgcttcgcatacgatcccaattggctacacctcctaagacgtaagcccaatctggcggtacctcagatgcatcctacaaataacccatactgcttatgcctattcgcctgtctggctggtcatgctgggtcggctgtgggaaaccatgaaggaaaggtctttgatggatattggacggagattggtgatagttttcaaactcgttgctctggggaattggttattagcggaaaacatttcatagtcgattgcttagctcaatggcgtcatgttcgaatgcttgaatgattacctaatgcccactctacattgttatct

SEQ ID NO: 11997 - DNA, 1866 bp, Muscodor strobelii
  misc_feature: SGI cDNA ID NO. 563873
  misc_feature: Encodes the peptide sequence at SEQ ID NO 11998
atggtcgcacacgcctccaagtctcagacgcctcgtaacgagtcaccctctggctctatcgacccctatgtgcttttcgaagctcttactgggagaaagtttgagaaaacaactctgccctcacggtctgtctctgaggattatgatgacctcagtgatatcaaggacaacaatgacaacgagagaagaaaccgagagcccaagcccgactctagaccaaagaatgtcgccgttggtgccatcaatccttttgccctggttgaaaatatgatcgggcataagatcgatcgtaactcgatggctgccattcgtatcatcgaggatacccttcagactgactacgaagagctatttgacctacgacacggctcagtcctgtacgctggtctcaagctgaaccgcaaggatcgtgaagctgaggagctcaatgagaaggagatcaagatcctgagagagcgagacctcgtcactcccgatctaagcaacctcgaaagacttcaggatctcaaggaaatcggactgaaagagatgggtgacacacgaatcaagcgagctgccattcagaatggcaagcttcacattgtgctccatgccgacagtgttgcccgaactgtttgcaaccgagaagtaactcaaactatgaatgacttctctcttccattccgccgtgatgacagagagagaacttctttcaccccgcccaacagtagctggagagacgcaaatgagattgccatgcgcaacatgccccgccgcatgatctccaactacaacgacactttcttcgagtttggccgcgagcatcgtgattatttcaacagcgagcgtggctttcacgtgagacgctttgacgatccggttcagggtgctgccgccaacagctggttcatcgctgctctgttctccgtttactgggcggacccagcctcgatcaatcgctttactcgattcaacaacatgcacatgggtggtggcaatggtggcaatgatgacaatgagaaccgccgccggcgtttcgaagtcaagttccacgacaagggcggccgcaacaatagcaagaccgagactgtcgaggttgactaccaagtccctgtgaacaactcgagcgaggatctagtctactgccgctcgagtgatggcctagccatttggccttcgctctacgagaaagctttcactaagtggatcacccgtgtccagagcaaccacggcaacagctctgagcatgtcgacatcacacagacccaccatggtgatcccgtgaaggcgatggctcagatcaatggacgtgagccagagtattggcagacacgccgccatgaagctcgcgatattgtaggtgttgtgcgctcgcacagtgtcaaccaccgcactattgtacccatggttgcgtggactcatgccacacgccgcgagaacagggagaatcgagacgaccgtgatcgcgatgatcgcgatcgcgatgaccgcaacagaggtgaccgtaacaaagatgaccgtgacagaggcgatcgcaaccgacgcgaccgcgatcgcgatgaccgcgacaacgactcctctgatcaggaccgagaacgcgatatgaccggcggtcgcgatgtgtatcgtggctccaaccttgtcgcaaatcacgcctactctgtgctcggatggtcatctgtcggccagggagacaagcagtacatcattgttcgcaacccatggggcgttactgagcctcacggccttacaagctacccgggtgttttgacacgtgtcgagcctgagtactggcgccctgcttcgctcctcgatcaggatggtgtcatggctatcgaagcacacgcgttccgagagtacttcgcctacattggtgccgcccgttag

SEQ ID NO: 11998 - protein, 621 aa, Muscodor strobelii
  misc_feature: SGI Peptide ID NO. 563873
  misc_feature (20)..(469): NCBI GI: 256724159 Blast Desc: NECHADRAFT_86428 [Nectria haematococca mpVI 77-13-4]
  misc_feature (19)..(469): NCBI GI: 39946748 Blast Desc: MGG_08526 [Magnaporthe grisea 70-15] gi|145012368|gb|EDJ97024.1| MGG_08526 [Magnaporthe grisea 70-15]
  misc_feature (533)..(620): NCBI GI: 256724159 Blast Desc: NECHADRAFT_86428 [Nectria haematococca mpVI 77-13-4]
  misc_feature (533)..(621): NCBI GI: 39946748 Blast Desc: MGG_08526 [Magnaporthe grisea 70-15] gi|145012368|gb|EDJ97024.1| MGG_08526 [Magnaporthe grisea 70-15]
MVAHASKSQTPRNESPSGSIDPYVLFEALTGRKFEKTTLPSRSVSEDYDDLSDIKDNNDNERRNREPKPDSRPKNVAVGAINPFALVENMIGHKIDRNSMAAIRIIEDTLQTDYEELFDLRHGSVLYAGLKLNRKDREAEELNEKEIKILRERDLVTPDLSNLERLQDLKEIGLKEMGDTRIKRAAIQNGKLHIVLHADSVARTVCNREVTQTMNDFSLPFRRDDRERTSFTPPNSSWRDANEIAMRNMPRRMISNYNDTFFEFGREHRDYFNSERGFHVRRFDDPVQGAAANSWFIAALFSVYWADPASINRFTRFNNMHMGGGNGGNDDNENRRRRFEVKFHDKGGRNNSKTETVEVDYQVPVNNSSEDLVYCRSSDGLAIWPSLYEKAFTKWITRVQSNHGNSSEHVDITQTHHGDPVKAMAQINGREPEYWQTRRHEARDIVGVVRSHSVNHRTIVPMVAWTHATRRENRENRDDRDRDDRDRDDRNRGDRNKDDRDRGDRNRRDRDRDDRDNDSSDQDRERDMTGGRDVYRGSNLVANHAYSVLGWSSVGQGDKQYIIVRNPWGVTEPHGLTSYPGVLTRVEPEYWRPASLLDQDGVMAIEAHAFREYFAYIGAAR

SEQ ID NO: 11999 - DNA, 344 bp, Muscodor strobelii
  misc_feature: SGI EST ID NO. CUFF.28442.0
  misc_feature: Variant of the nucleotide sequence at SEQ ID NO 11997
cccgaactgtttgcaaccgagaagtaactcaaactatgaatgacttctctcttccattccgccgtgatgacagagagagaacttctttcaccccgcccaacagtagctggagagacgcaaatgagattgccatgcgcaacatgccccgccgcatgatctccaactacaacgacactttcttcgagtttggccgcgagcatcgtgattatttcaacagcgagcgtggctttcacgtgagacgctttgacgatccggttcagggtgctgccgccaacagctggttcatcgctgctctgttctccgtttactgggcggacccagcctcgatcaatcgctttactcga

SEQ ID NO: 12000 - DNA, 1980 bp, Muscodor strobelii
  misc_feature: SGI cDNA ID NO. 563874
  misc_feature: Encodes the peptide sequence at SEQ ID NO 12001
atgtctcctattattcacgaaatggactctgttgactccaattcgctttttgggagcgatgatgatacagctggattcgtgacgatcaagtgggagagtgacgaactcacggtacaaaatgaggatacaccaaatgcggtcccggggactgatcttggcgacgacatgcccatggcgcaatccgctgctgtcaccgaaaatgatctgtctccgttcactaccaaatatgaaataccttttaccgagctggagtcttccactgcaaatgattatccaagttcaagtggtgtcgaaaccgagactcttcctggccacggctctgggtcatctcctactcccgaaggcagttccatctcccgagatgaagctcttgctactgggatcgagtatcatcctttaccttattcccagaccctgtcttcttcccctatccacgatgacgccgcatttcctcgctactcatctggctcttcatcacgtaatggatccgtcatacccgccgatgcgccggcatccgatgatgttgaagtttcacatagaccgagtttgcctataacatcaaatctaccagtcactccagtcggggctacaggcgtccaagtatctgttggtggcgtcctagacagtcctgtagccgctgttcccgacttggacgacgtcccacacacagctgctgtgcctaagactgttacggacgttgtcaatctccatggtcccgatgtcgatattcctggaaattccccatcggatggtgatactttggatacccttccgcaaagccgtgtcctgaatgctctcgctcacaacaacgataatccggacgatgcgcgagcgctccccaccaagcgacatgtgtttgacagccatatttcagatgctggggtccctagcgaggtagagaactaccaatcgactcccgctcattctgtagcttctcctgagactttatactccatcggtcatgcttcgcgcctcgtcgagtctacttctcagttttcgtactgttcttctactctgatcgactctaccaacgttattgtgagcgaggagcttgatatacataacacgaggatgactatcgccccgcctcaagatctgcctactgctaaagaggattctggcgtcgatcctgctatgagcaaaccaaggccagactattacatgtacatcaagcaactggatatcgaactagttgccaattccatcggtaatcttcaaaccgccgtggatagtgctactcaattgtcagaagaactgagggacgaggtcttgatacgtgctgaaaatagcgttcccacggcttgggctgtcgaacgcctccacggaagtatacaggttgcagaaacaagctacgcgcaagcagatgacatgaaggatatgctcagtcgatcatacggttacggcgatggtgttcatgaccaggtaaaagagatcctaaatatagagacatatcaattggaagtcttggacatgttagaagatgcagaggagcagattcgagatgccatgaaaatctatcaacatgccaaagccgtcttagaggagcgtggcgaaccgctgttattagtcgccgaagaacctaatgacccgcgaacggacgataatgaagatcatatcattaaaactggccaggaaccaaacgttgtagctaaagcagagcctatatctcccgttcgcgtgacaatggaacgcctacctacccaagaagcgacagaacacatctctgtcggaggggcgacaaaaaatattgcagttcagggatcgacggaacagctatctatcaaagtagcgataaagaatcctcctgtacaagaggggccggcttctcctttaccaattaccacaaagcatcccattacgaagaagcgcaggcatggaaaatcatgttatactataaagaaaggcatagatggtcaagacattaaaatattaaggccgccaaagaggcacaggacccttggaagggtcgagacatattag

SEQ ID NO: 12001 - protein, 659 aa, Muscodor strobelii
  misc_feature: SGI Peptide ID NO. 563874
MSPIIHEMDSVDSNSLFGSDDDTAGFVTIKWESDELTVQNEDTPNAVPGTDLGDDMPMAQSAAVTENDLSPFTTKYEIPFTELESSTANDYPSSSGVETETLPGHGSGSSPTPEGSSISRDEALATGIEYHPLPYSQTLSSSPIHDDAAFPRYSSGSSSRNGSVIPADAPASDDVEVSHRPSLPITSNLPVTPVGATGVQVSVGGVLDSPVAAVPDLDDVPHTAAVPKTVTDVVNLHGPDVDIPGNSPSDGDTLDTLPQSRVLNALAHNNDNPDDARALPTKRHVFDSHISDAGVPSEVENYQSTPAHSVASPETLYSIGHASRLVESTSQFSYCSSTLIDSTNVIVSEELDIHNTRMTIAPPQDLPTAKEDSGVDPAMSKPRPDYYMYIKQLDIELVANSIGNLQTAVDSATQLSEELRDEVLIRAENSVPTAWAVERLHGSIQVAETSYAQADDMKDMLSRSYGYGDGVHDQVKEILNIETYQLEVLDMLEDAEEQIRDAMKIYQHAKAVLEERGEPLLLVAEEPNDPRTDDNEDHIIKTGQEPNVVAKAEPISPVRVTMERLPTQEATEHISVGGATKNIAVQGSTEQLSIKVAIKNPPVQEGPASPLPITTKHPITKKRRHGKSCYTIKKGIDGQDIKILRPPKRHRTLGRVETY

SEQ ID NO: 12002 - DNA, 359 bp, Muscodor strobelii
  misc_feature: SGI EST ID NO. CUFF.28454.0
  misc_feature: Variant of the nucleotide sequence at SEQ ID NO 12000
aagaaaatgaaactgggtcggagggattacccactgaaaacatgtctcctattattcacgaaatggactctgttgactccaattcgctttttgggagcgatgatgatacagctggattcgtgacgatcaagtgggagagtgacgaactcacggtacaaaatgaggatacaccaaatgcggtcccggggactgatcttggcgacgacatgcccatggcgcaatccgctgctgtcaccgaaaatgatctgtctccgttcactaccaaatatgaaataccttttaccgagctggagtcttccactgcaaatgattatccaagttcaagtggtgtcgaaaccgagactcttcctggccacggc

SEQ ID NO: 12003 - DNA, 5313 bp, Muscodor strobelii
  misc_feature: SGI cDNA ID NO. 563875
  misc_feature: Encodes the peptide sequence at SEQ ID NO 12004
atgggtgtcgacaccagaagagctcctcccctgcctgcccctaccgagtccgagtctttcatcgcccgccccgaagaagtcgagtctgaagtttccacctccaccaacgttgctgctgacgagaaatcccactactctctccccgatgacggcacgcctgtaaccatcaagacgcgcggccacagagcgaaccgctcacagacctccctgctgatcgagtacttcgagggaggcaagactcgcgtcacttctcccggcggctcaggctcaacagagcgcaagcccagcgtccgcgtgcgcctcaccccttccaagacgaggggaaagaacgaccacatccagatcaccgagaccaggagcaccaggaaggcttctctctcgagacgcgccacctcaagtccccctctgacccgaagcgcattagagatgaccgatctcgacgacgatctcagcatgaattcctacgcttccgcaaccgaagagtccaacgtctcgcgccaccccatcgaggtcgagattgaccctgggagtggcccgcgtcgcgcccggcgcaaggtctccagtcctctcatacccgccgccgacagcaagacctcttacaatcccgccatgtcggacatttctgctatcccgaccgacagtttcctggatggttccggacctaccaccacattagaaaacttcaatactcctctgggcaacgtaccagttgcgagcaccgtcgacaggatgaatcgcaaacaacgcggcgaaaatcacgagcacagcctgatgcaaaaggcggtcgataaggccagcaaaccagagaagaagcatagatcaaagagcaggacgacaagtctcgagaaggagcccgactataagagctcaccgcgacggaaatccagggggacccctaaggaatccgttgtctcagcagcagattccagcgtcctctcatcacaacttacgccaagccaccggtccaatgactcatattcctcatctaaaatatccataaacaaccctaaactgctagagaccgtcgaagatgccattcgaagactcatccttcccgaattagatgccataaaacgagaaaacagtcggcgcgacaccagacgaagcaaagatcgagaatccctttcaagtctcacatcacgggaagatgtctcggctgtcgacaaacgacggtctgcagatacaacgtattcgaccaaatccaagaatacacgggaccgagaggctaggaatgatctgtctccgcatagtagcatcgatcaattttcatataccgaagagaaccacgaggacgatgcgacccctcgccggactcgcgatgtactcactgacgccgctttgggcgctgcagtcggtgcggcagcactgcgctcaagatctagaggtgacgagaaacgccagcgacgacgtcgcagagctgaaacacccaaacgtgactttgctgaacaagactcagagcatcatgaggaggagcacaaggtcgtgccaccgatgccgcttttaccgctttcaagcgagatcaatccttcggagctaacccggacctccatattgtcggccgatactgacaggcctcattctgctagtgaacagatgatgcctgttcatgaggttgcccgtggtgttgcttctatggagtcgatgaacgacacgcccacaccaactagatcaccagtacatacactgcaaggcttaggcacgcagcacgcgaatgtatcccacggagacctacgggctctgccacgacaaggccaagcccaatatcaagaggagtacgaagaggatgaatttggtcacagatatagctcccgtggccgggacgagtatgaagaagaatatgacgagggccatcttgctgaacctggcatgtatgaagacgagggtgacatgccacattcattttacgcttctcaggatgttcccgcaccacttcgatacgttccataccaggctgagagacggggtctcagcccaattcaaagtgtgtctggctacacagaaggcggcgagagcgaagttcagggatatcgcgattctaggtctatgcacacggccagtgaaatatcttcacctgaaaagcgcaaccgggatgtccattcccctaactccattccaagcattccaagcaacatgcgtagtcgtgaatttggagacgaggccagcagcgttcgaagctcaggcgtgggctatcgaaacagtatatttaccgatggcagtgaattggatccaacatcggcgcaggctgtcaaagtcgtcggaggaagcgctcaaatggtccatcagaacttcggacctgaatctgctgtagcttcattggtggatggatccatgctcgacccttcgttgttgagtggatccggagctggacaacactcgcaggtttctcagttatcctacgacgagaatgtaaagagcccgaactccagaggcgttagccccgaaaaacgatcagtcgcatcggaacagtctgctcactctccatcgccgagcagaggcgatattggctcacatcacgagtacacggaatatgatgtcaacgaatatggtcaaaaaatccccaatacgggacggcgtcattcgcccactacgtccgagacggctattactgctgctgctctgagccgtgcggcggcggcggcgttgaaaaggcagaaccagggccatgagtctcccagcgcagagtatgatgagagtgcattcgtcggagagggcgtctcacgaaaccgctctttcaaggaacgagccaagaccggctacagaccagatgccacaccacgtcacagtgtggatcgtctatctgagtacagcaatccgaagatgggtgctagcggcatgccagacttctacaatccagagccggagataggatacggttatgatgatgaccatcactctgagcgacgcacgccctccgccacggatgagcgtcacgaggtcacttaccaagaagactcacaacactggcaggatccaggaaccccaactcaggagactcaagagcactatgatcgcgccgtaactccgaaggccagcaagagcagcgcacctattggtctcgttgatgctgccgctgctgcgactctcgctaccgctggggcaatggctgcttcgcatagcagacaaccgagtcaggacgatgaatggcagcgaacttctggtgatagaaagagagacactctagtcacgaacccatacgagggtgccagtccaattgccaacttacctggtctcgagaatattatggatacgaccggctacggagcagacacatacagaggtggatatcacactggaagccccggcttggcaggcggtgatgagggctacatatctggcgctcccaacgaggggatcaatagtaaaggcaagggtcctgccctgccaccaacctccatcggaaacatggacgatcccttctacgctcccaataagatgcacctcagtggcatgtcacaaggaatgcgcactcctctgttcgatggttctactggaactggtattgatcgaatcgagaacaaggacattattgcgctaatggagcatcttatggtacgggatgctcaaagaagtgcccgagacactgagatcctcgtcacattggtccgatcagctgcagatatgcgcaactcatttgatgatatcaagagaatgctagccgatacggaggagcagattattggcgaggtgaacacgaataccgaaaagtctctgaagcgtcatctcggtggaccaagacctttccctggaagcagcgccagatccgtacaaggagcaagctcacaagcgggcaccgaagatggcccaactaagaagcgcaatctgctgcgacgagcactacagggcctcagcgccaagggcgcaggagacttgagcagaattgaagatatgctaattcagctcctcaccgatgttgatgtcctcaagcatcagactgctggtcctgtgggcctgagtacacatgctccttctctagagaacttgcagccggagatcccgtatgaacaggaccatggttatgaaccagagggcaacgctggaacttcgactgcaagccatgctagtcagtcaggtcatttatctattccgcagtctcgtggcggagcatcaatgaggggacctggcagcgagcgtaagttctcggaccatcgcatcagcaccgtacccgaggatgagggcgaatacgatcagactccaggaatacagcagacctatactaatgaaggtatgctctcgcctcctgccgatagacagcgaggtggatccgttccccttggaactccacctcaaacatcgcacggtcagcacttttcagccagtagcgagaacacccctcgcactgaggacagtaagaaacataaatcaaagggctcaaaaagtttcttcccaaagatttcacggtggtcagaaacaactgcttctagcattggcaaggctttccgcagcagtggcagctctaacaaacaacatgaagacctcacgcacatgcctccttctcgatctgggtcagatctagccgaattcgatccataccaaagccaagatttgtatggcgaagataaactccattccggcttttctcagcctgatctgctaccccagggtatggacgttcgcaacacgcctggcttgcaccatcaatccactgcccctatgacatacgcaacgcccgaggatcctaaataccgagcccatcgtgattcgctcaaccttcagcacccgcagcctcgtcccgggcaaacagagcgttttagaactgccctggagacatctgctgctgactatgacactccaatgtcacccagatcggctgatttcggatctgtgacgtctctgaaccgactccctcaaaatatgaacagatacagtgataacagtgccgcgaatgctgctaccggtggcgctgactacaactgggagagaaccgcgtcacctgcttcccaaggtcctcctcgtcctcccaaagagccccttgatagtcactctatagacgcacagaccccgccacagcagtcaacaagagtgaacaagctgcagaagaagcaaagcccactcccattccaaagtgtcgaaagtggttatggtactggtactgccacccatttcggaagtcatcactcaggcagcccgaggttcgaaaatcgtaatctgagcggcgctctcggagtacccacccggcggcctagtgggccccgggctatgacaccatcacgcagtgatgatggtgacgctagtgaccgacgacgcaagcgagacactttcggcaccgtggctagcccttcgagcgcattaagtcaagaatcagagacgttttag

SEQ ID NO: 12004 - protein, 1770 aa, Muscodor strobelii
  misc_feature: SGI Peptide ID NO. 563875
  misc_feature (17)..(1770): NCBI GI: 39971423 Blast Desc: MGG_07027 [Magnaporthe grisea 70-15] gi|145019489|gb|EDK03717.1| MGG_07027 [Magnaporthe grisea 70-15]
  misc_feature (1)..(1753): NCBI GI: 256732194 Blast Desc: NECHADRAFT_41527 [Nectria haematococca mpVI 77-13-4]
  misc_feature (1)..(1770): NCBI GI: 171694275 Blast Desc: protein product [Podospora anserina] gi|170947086|emb|CAP73891.1| protein product [Podospora anserina]
  misc_feature (1)..(1750): NCBI GI: 46136921 Blast Desc: FG09976.1 [Gibberella zeae PH-1]
  misc_feature (1)..(1770): NCBI GI: 116197861 Blast Desc: CHGG_07086 [Chaetomium globosum CBS 148.51] gi|88178365|gb|EAQ85833.1| CHGG_07086 [Chaetomium globosum CBS 148.51]
  misc_feature (501)..(1735): NCBI GI: 261352141 Blast Desc: conserved [Verticillium albo-atrum VaMs.102]
  misc_feature (1)..(1744): NCBI GI: 85101977 Blast Desc: NCU04258 [Neurospora crassa OR74A] gi|28922791|gb|EAA32013.1| [Neurospora crassa OR74A]
  misc_feature (1)..(1744): NCBI GI: 16944618 Blast Desc: [Neurospora crassa]
  misc_feature (300)..(1770): NCBI GI: 154315718 Blast Desc: BC1G_04431 [Botryotinia fuckeliana B05.10] gi|150846827|gb|EDN22020.1| BC1G_04431 [Botryotinia fuckeliana B05.10]
  misc_feature (300)..(1522): NCBI GI: 156059676 Blast Desc: SS1G_03850 [Sclerotinia sclerotiorum 1980] gi|154701637|gb|EDO01376.1| SS1G_03850 [Sclerotinia sclerotiorum 1980]
MGVDTRRAPPLPAPTESESFIARPEEVESEVSTSTNVAADEKSHYSLPDDGTPVTIKTRGHRANRSQTSLLIEYFEGGKTRVTSPGGSGSTERKPSVRVRLTPSKTRGKNDHIQITETRSTRKASLSRRATSSPPLTRSALEMTDLDDDLSMNSYASATEESNVSRHPIEVEIDPGSGPRRARRKVSSPLIPAADSKTSYNPAMSDISAIPTDSFLDGSGPTTTLENFNTPLGNVPVASTVDRMNRKQRGENHEHSLMQKAVDKASKPEKKHRSKSRTTSLEKEPDYKSSPRRKSRGTPKESVVSAADSSVLSSQLTPSHRSNDSYSSSKISINNPKLLETVEDAIRRLILPELDAIKRENSRRDTRRSKDRESLSSLTSREDVSAVDKRRSADTTYSTKSKNTRDREARNDLSPHSSIDQFSYTEENHEDDATPRRTRDVLTDAALGAAVGAAALRSRSRGDEKRQRRRRRAETPKRDFAEQDSEHHEEEHKVVPPMPLLPLSSEINPSELTRTSILSADTDRPHSASEQMMPVHEVARGVASMESMNDTPTPTRSPVHTLQGLGTQHANVSHGDLRALPRQGQAQYQEEYEEDEFGHRYSSRGRDEYEEEYDEGHLAEPGMYEDEGDMPHSFYASQDVPAPLRYVPYQAERRGLSPIQSVSGYTEGGESEVQGYRDSRSMHTASEISSPEKRNRDVHSPNSIPSIPSNMRSREFGDEASSVRSSGVGYRNSIFTDGSELDPTSAQAVKVVGGSAQMVHQNFGPESAVASLVDGSMLDPSLLSGSGAGQHSQVSQLSYDENVKSPNSRGVSPEKRSVASEQSAHSPSPSRGDIGSHHEYTEYDVNEYGQKIPNTGRRHSPTTSETAITAAALSRAAAAALKRQNQGHESPSAEYDESAFVGEGVSRNRSFKERAKTGYRPDATPRHSVDRLSEYSNPKMGASGMPDFYNPEPEIGYGYDDDHHSERRTPSATDERHEVTYQEDSQHWQDPGTPTQETQEHYDRAVTPKASKSSAPIGLVDAAAAATLATAGAMAASHSRQPSQDDEWQRTSGDRKRDTLVTNPYEGASPIANLPGLENIMDTTGYGADTYRGGYHTGSPGLAGGDEGYISGAPNEGINSKGKGPALPPTSIGNMDDPFYAPNKMHLSGMSQGMRTPLFDGSTGTGIDRIENKDIIALMEHLMVRDAQRSARDTEILVTLVRSAADMRNSFDDIKRMLADTEEQIIGEVNTNTEKSLKRHLGGPRPFPGSSARSVQGASSQAGTEDGPTKKRNLLRRALQGLSAKGAGDLSRIEDMLIQLLTDVDVLKHQTAGPVGLSTHAPSLENLQPEIPYEQDHGYEPEGNAGTSTASHASQSGHLSIPQSRGGASMRGPGSERKFSDHRISTVPEDEGEYDQTPGIQQTYTNEGMLSPPADRQRGGSVPLGTPPQTSHGQHFSASSENTPRTEDSKKHKSKGSKSFFPKISRWSETTASSIGKAFRSSGSSNKQHEDLTHMPPSRSGSDLAEFDPYQSQDLYGEDKLHSGFSQPDLLPQGMDVRNTPGLHHQSTAPMTYATPEDPKYRAHRDSLNLQHPQPRPGQTERFRTALETSAADYDTPMSPRSADFGSVTSLNRLPQNMNRYSDNSAANAATGGADYNWERTASPASQGPPRPPKEPLDSHSIDAQTPPQQSTRVNKLQKKQSPLPFQSVESGYGTGTATHFGSHHSGSPRFENRNLSGALGVPTRRPSGPRAMTPSRSDDGDASDRRRKRDTFGTVASPSSALSQESETF

SEQ ID NO: 12005 - DNA, 6626 bp, Muscodor strobelii
  misc_feature: SGI EST ID NO. CUFF.28584.2
  misc_feature: Variant of the nucleotide sequence at SEQ ID NO 12003
caagaataactcgaacgttatcacatctccattctatccaaggcgcgcgggcgaaccgctcctgtaggcagagacattctgttctgctccttcttttcggtctgtctataccgaggtgcaaggacattcattcatacacgatttgggtattggacttgacgaaccagcactataatcgttgcagcagttcttggcccgagccagagtacagtgtacctgtacctgtgggctggtgggtgcagcacctgtgaggaaagtcctctcgccgtcccgcatctccactgcgcccagtgcccaccacccgattagctgctcatcagctcgtcgtctccctcccataacacaacctcttataattcctccagctctatcgcacaatcctccctcaccgtgtgcgctggagggctggtttgcgcaacagtattctttgtggtttcctgcctctttcgccgaacaccacaattttggtttggcggatgtttccacaaccacctttcgccgcttaatatctcatcattgggacttcagtctcagttgaatcgccgacctcccacttcaatcatttcgagcaaacagtgcacaccgagtttgattgaccgccggcataacaaaccgaatcggcaaggacaggccctgggcgggtcttccaggacaaacagctctggtggcacaccaccgcccacgccctagagccagtgttgccgtgtcaaaatgggtgtcgacaccagaagagctcctcccctgcctgcccctaccgagtccgagtctttcatcgcccgccccgaagaagtcgagtctgaagtttccacctccaccaacgttgctgctgacgagaaatcccactactctctccccgatgacggcacgcctgtaaccatcaagacgcgcggccacagagcgaaccgctcacagacctccctgctgatcgagtacttcgagggaggcaagactcgcgtcacttctcccggcggctcaggctcaacagagcgcaagcccagcgtccgcgtgcgcctcaccccttccaagacgaggggaaagaacgaccacatccagatcaccgagaccaggagcaccaggaaggcttctctctcgagacgcgccacctcaagtccccctctgacccgaagcgcattagagatgaccgatctcgacgacgatctcagcatgaattcctacgcttccgcaaccgaagagtccaacgtctcgcgccaccccatcgaggtcgagattgaccctgggagtggcccgcgtcgcgcccggcgcaaggtctccagtcctctcatacccgccgccgacagcaagacctcttacaatcccgccatgtcggacatttctgctatcccgaccgacagtttcctggatggttccggacctaccaccacattagaaaacttcaatactcctctgggcaacgtaccagttgcgagcaccgtcgacaggatgaatcgcaaacaacgcggcgaaaatcacgagcacagcctgatgcaaaaggcggtcgataaggccagcaaaccagagaagaagcatagatcaaagagcaggacgacaagtctcgagaaggagcccgactataagagctcaccgcgacggaaatccagggggacccctaaggaatccgttgtctcagcagcagattccagcgtcctctcatcacaacttacgccaagccaccggtccaatgactcatattcctcatctaaaatatccataaacaaccctaaactgctagagaccgtcgaagatgccattcgaagactcatccttcccgaattagatgccataaaacgagaaaacagtcggcgcgacaccagacgaagcaaagatcgagaatccctttcaagtctcacatcacgggaagatgtctcggctgtcgacaaacgacggtctgcagatacaacgtattcgaccaaatccaagaatacacgggaccgagaggctaggaatgatctgtctccgcatagtagcatcgatcaattttcatataccgaagagaaccacgaggacgatgcgacccctcgccggactcgcgatgtactcactgacgccgctttgggcgctgcagtcggtgcggcagcactgcgctcaagatctagaggtgacgagaaacgccagcgacgacgtcgcagagctgaaacacccaaacgtgactttgctgaacaagactcagagcatcatgaggaggagcacaaggtcgtgccaccgatgccgcttttaccgctttcaagcgagatcaatccttcggagctaacccggacctccatattgtcggccgatactgacaggcctcattctgctagtgaacagatgatgcctgttcatgaggttgcccgtggtgttgcttctatggagtcgatgaacgacacgcccacaccaactagatcaccagtacatacactgcaaggcttaggcacgcagcacgcgaatgtatcccacggagacctacgggctctgccacgacaaggccaagcccaatatcaagaggagtacgaagaggatgaatttggtcacagatatagctcccgtggccgggacgagtatgaagaagaatatgacgagggccatcttgctgaacctggcatgtatgaagacgagggtgacatgccacattcattttacgcttctcaggatgttcccgcaccacttcgatacgttccataccaggctgagagacggggtctcagcccaattcaaagtgtgtctggctacacagaaggcggcgagagcgaagttcagggatatcgcgattctaggtctatgcacacggccagtgaaatatcttcacctgaaaagcgcaaccgggatgtccattcccctaactccattccaagcattccaagcaacatgcgtagtcgtgaatttggagacgaggccagcagcgttcgaagctcaggcgtgggctatcgaaacagtatatttaccgatggcagtgaattggatccaacatcggcgcaggctgtcaaagtcgtcggaggaagcgctcaaatggtccatcagaacttcggacctgaatctgctgtagcttcattggtggatggatccatgctcgacccttcgttgttgagtggatccggagctggacaacactcgcaggtttctcagttatcctacgacgagaatgtaaagagcccgaactccagaggcgttagccccgaaaaacgatcagtcgcatcggaacagtctgctcactctccatcgccgagcagaggcgatattggctcacatcacgagtacacggaatatgatgtcaacgaatatggtcaaaaaatccccaatacgggacggcgtcattcgcccactacgtccgagacggctattactgctgctgctctgagccgtgcggcggcggcggcgttgaaaaggcagaaccagggccatgagtctcccagcgcagagtatgatgagagtgcattcgtcggagagggcgtctcacgaaaccgctctttcaaggaacgagccaagaccggctacagaccagatgccacaccacgtcacagtgtggatcgtctatctgagtacagcaatccgaagatgggtgctagcggcatgccagacttctacaatccagagccggagataggatacggttatgatgatgaccatcactctgagcgacgcacgccctccgccacggatgagcgtcacgaggtcacttaccaagaagactcacaacactggcaggatccaggaaccccaactcaggagactcaagagcactatgatcgcgccgtaactccgaaggccagcaagagcagcgcacctattggtctcgttgatgctgccgctgctgcgactctcgctaccgctggggcaatggctgcttcgcatagcagacaaccgagtcaggacgatgaatggcagcgaacttctggtgatagaaagagagacactctagtcacgaacccatacgagggtgccagtccaattgccaacttacctggtctcgagaatattatggatacgaccggctacggagcagacacatacagaggtggatatcacactggaagccccggcttggcaggcggtgatgagggctacatatctggcgctcccaacgaggggatcaatagtaaaggcaagggtcctgccctgccaccaacctccatcggaaacatggacgatcccttctacgctcccaataagatgcacctcagtggcatgtcacaaggaatgcgcactcctctgttcgatggttctactggaactggtattgatcgaatcgagaacaaggacattattgcgctaatggagcatcttatggtacgggatgctcaaagaagtgcccgagacactgagatcctcgtcacattggtccgatcagctgcagatatgcgcaactcatttgatgatatcaagagaatgctagccgatacggaggagcagattattggcgaggtgaacacgaataccgaaaagtctctgaagcgtcatctcggtggaccaagacctttccctggaagcagcgccagatccgtacaaggagcaagctcacaagcgggcaccgaagatggcccaactaagaagcgcaatctgctgcgacgagcactacagggcctcagcgccaagggcgcaggagacttgagcagaattgaagatatgctaattcagctcctcaccgatgttgatgtcctcaagcatcagactgctggtcctgtgggcctgagtacacatgctccttctctagagaacttgcagccggagatcccgtatgaacaggaccatggttatgaaccagagggcaacgctggaacttcgactgcaagccatgctagtcagtcaggtcatttatctattccgcagtctcgtggcggagcatcaatgaggggacctggcagcgagcgtaagttctcggaccatcgcatcagcaccgtacccgaggatgagggcgaatacgatcagactccaggaatacagcagacctatactaatgaaggtatgctctcgcctcctgccgatagacagcgaggtggatccgttccccttggaactccacctcaaacatcgcacggtcagcacttttcagccagtagcgagaacacccctcgcactgaggacagtaagaaacataaatcaaagggctcaaaaagtttcttcccaaagatttcacggtggtcagaaacaactgcttctagcattggcaaggctttccgcagcagtggcagctctaacaaacaacatgaagacctcacgcacatgcctccttctcgatctgggtcagatctagccgaattcgatccataccaaagccaagatttgtatggcgaagataaactccattccggcttttctcagcctgatctgctaccccagggtatggacgttcgcaacacgcctggcttgcaccatcaatccactgcccctatgacatacgcaacgcccgaggatcctaaataccgagcccatcgtgattcgctcaaccttcagcacccgcagcctcgtcccgggcaaacagagcgttttagaactgccctggagacatctgctgctgactatgacactccaatgtcacccagatcggctgatttcggatctgtgacgtctctgaaccgactccctcaaaatatgaacagatacagtgataacagtgccgcgaatgctgctaccggtggcgctgactacaactgggagagaaccgcgtcacctgcttcccaaggtcctcctcgtcctcccaaagagccccttgatagtcactctatagacgcacagaccccgccacagcagtcaacaagagtgaacaagctgcagaagaagcaaagcccactcccattccaaagtgtcgaaagtggttatggtactggtactgccacccatttcggaagtcatcactcaggcagcccgaggttcgaaaatcgtaatctgagcggcgctctcggagtacccacccggcggcctagtgggccccgggctatgacaccatcacgcagtgatgatggtgacgctagtgaccgacgacgcaagcgagacactttcggcaccgtggctagcccttcgagcgcattaagtcaagaatcagagacgttttaggaacttcgttctcgctatcttgacataatcgagcccgtgtcaccttttaatattgatctaaaacattgatcagaactttcgcattctcttcgcccgatcccatacatttggctaccggttagccagtgctaccccgagatataccctgcttaatcatattttgcgtttgcatatagcacatgctccagagctcttgcgcgttgttctttgctcttcctctatacggtacatcagttcgctctatagacgtggatcacgcaagtttgaaaatacggtgcgaagtcaattcggtctggacatataaacacaccatccattcagcataaaaagttgcaagggcggaatacgacacccgttcttctcctctcctcttacgacgatacgaattgtattgattgagataccgattgatttggaatgcgcggtggatggagagattctgcatttcgggtgagataccaagtggtctgttgtgggaggaacgataggaggagaaggaggagttgaataggagagttaagtagggagttgctgataacttgctattggctgtagtgcgaataaaatgatactctcccacgacgcctatatgtatgtctttg

SEQ ID NO: 12006 - DNA, 1542 bp, Muscodor strobelii
  misc_feature: SGI cDNA ID NO. 563876
  misc_feature: Encodes the peptide sequence at SEQ ID NO 12007
atggcagaaatgctcttcgtagtcggagtgttaaccgggcttttgaaccttgttatcgagaaagcgagtcttatggggagctcctgggtaccccccgagtatacctactccatcgtcagagtgcgagttgggctgttcccgtatgagggaaacgaaagaaataaaggtgaccctaatgaggagatatccgatggaatgaagaagagaccgacaggtgacatgtgcttctcaccaggatgctggtccagcttcggcggtacctttccaaatcttacactatatgatgaaaccggagtcaacattggtgaaaaacatgctgatattctctggccatggattggaaatcaggttgccgatggaagtttttatgaagggagagtgcgccactatgatcaaagcgccccccagacggggtatattcacgttacggcatcatatgacccgctctgtatcgcaacggtaacgattaccgatgaggatgacacgaagcttgggtggtatgctgattgggctgtggcgtgtggtggaaagtggtattactcgaatgtcaaagtaactccagagggtcgaaaaactaaatgcgtatggattaacgcgaacaagactgtgccgtacccgatcgaacactcaggaatcgtcatccagccgtccgaatttctcgctgccaaacaaaagtggaatgaaacgacaggcgagttactggcaaatgtgacacaacttgctaattatctctgctatagcggtcgtacgttgaggctgttgttgcctggcgagaaacctgaattctggaacccagctctaggtaacatcgatgaacgccgggagcgatggtatgagcctcctcggaccaacgattgcgtttgtcgttatgagccgccaggtgacaatttcgatgagagggtacaaggtccatttgttactaagttgctcgaggcaaagggcattgaattcaatgctagagatctatgcaatagtccttcgtcttggggccccgacatggctgatcactacaataacatgttttgccgcatgtgggataagtcgctgtggccattctgcgacgacacgcacaaggatcattgttatgatactatttcaaggactaccgtgacggaaggcgtttctagacggcgagctgtgccatatacaaacgtagaaagatgggggttcgacgacctctcggatcaaattatcgatattgcttcttgggattctttggaagatgaggatacacccgaagaaaccgatgatgagtctgaaaccgaatacgatgagcccgacgatacccccgagctacagcctgaaatgatcccaagtcccaatatatcgcgaactcttgaacacgaggacgagacaggagatgagccaaatacgcttgtatatcaaccccataaaggacgttgttgggcaagtttctgtaatgatgctgacggccgcgctggatgtggtcaacctgccttaacctaccaactcggaggctatgcccagctgactgttgtcaagtttaacaaagagggggttcatacgctgaggaatttgtag

SEQ ID NO: 12007 - protein, 513 aa, Muscodor strobelii
  misc_feature: SGI Peptide ID NO. 563876
  misc_feature (1)..(388): NCBI GI: 39942458 Blast Desc: MGG_03309 [Magnaporthe grisea 70-15] gi|145015685|gb|EDK00175.1| MGG_03309 [Magnaporthe grisea 70-15]
  misc_feature (2)..(388): NCBI GI: 171682656 Blast Desc: protein product [Podospora anserina] gi|170941287|emb|CAP66937.1| protein product [Podospora anserina]
  misc_feature (98)..(388): NCBI GI: 240106694 Blast Desc: CPC735_014790 [Coccidioides posadasii C735 delta SOWgp]
  misc_feature (98)..(388): NCBI GI: 119174098 Blast Desc: CIMG_09031 [Coccidioides immitis RS]
  misc_feature (86)..(381): NCBI GI: 258570055 Blast Desc: [Uncinocarpus reesii 1704] gi|237904101|gb|EEP78502.1| [Uncinocarpus reesii 1704]
  misc_feature (82)..(367): NCBI GI: 238842244 Blast Desc: conserved [Microsporum canis CBS 113480]
  misc_feature (83)..(368): NCBI GI: 121719470 Blast Desc: conserved [Aspergillus clavatus NRRL 1] gi|119404632|gb|EAW15008.1| conserved [Aspergillus clavatus NRRL 1]
  misc_feature (82)..(353): NCBI GI: 119173723 Blast Desc: CIMG_10284 [Coccidioides immitis RS]
  misc_feature (1)..(388): NCBI GI: 67540572 Blast Desc: AN6456.2 [Aspergillus nidulans FGSC A4] gi|40739288|gb|EAA58478.1| AN6456.2 [Aspergillus nidulans FGSC A4] gi|259479315|tpe|CBF69436.1| TPA: conserved [Aspergillus FGSC
  misc_feature (53)..(368): NCBI GI: 121712018 Blast Desc: ACLA_061600 [Aspergillus clavatus NRRL 1] gi|119401776|gb|EAW12198.1| ACLA_061600 [Aspergillus clavatus NRRL 1]
MAEMLFVVGVLTGLLNLVIEKASLMGSSWVPPEYTYSIVRVRVGLFPYEGNERNKGDPNEEISDGMKKRPTGDMCFSPGCWSSFGGTFPNLTLYDETGVNIGEKHADILWPWIGNQVADGSFYEGRVRHYDQSAPQTGYIHVTASYDPLCIATVTITDEDDTKLGWYADWAVACGGKWYYSNVKVTPEGRKTKCVWINANKTVPYPIEHSGIVIQPSEFLAAKQKWNETTGELLANVTQLANYLCYSGRTLRLLLPGEKPEFWNPALGNIDERRERWYEPPRTNDCVCRYEPPGDNFDERVQGPFVTKLLEAKGIEFNARDLCNSPSSWGPDMADHYNNMFCRMWDKSLWPFCDDTHKDHCYDTISRTTVTEGVSRRRAVPYTNVERWGFDDLSDQIIDIASWDSLEDEDTPEETDDESETEYDEPDDTPELQPEMIPSPNISRTLEHEDETGDEPNTLVYQPHKGRCWASFCNDADGRAGCGQPALTYQLGGYAQLTVVKFNKEGVHTLRNL

SEQ ID NO: 12008 - DNA, 1356 bp, Muscodor strobelii
  misc_feature: SGI cDNA ID NO. 563877
  misc_feature: Reduced expression when VOC is produced
  misc_feature: Encodes the peptide sequence at SEQ ID NO 12009
atgcacgacttacgcaagaaggccctgctggagagcgggaaaaccatttcgcgcaaagcacgctcgcgccccgactcgcaggttgcatcgcccgccatctccccagtcccatcacgaggcggctctcgagccaatagccgatatgcctccgaggaagaaatctcgagcgacgaggactacgaggacagcatgaccaactctgttattgggtcggacgacggcgaagatgtcgccgttgccagctggactgatagactgcgagatcgcatcgctgagcttctcgatcgcaagcgcagcagcacaaagggccgcgaagccactctcgtcgcttacacgcatctcctccgataccactacgcagaagaacaaatcgactcccaactcaacgagatagtgccggccttactcaagtgcatgcggggcggcagtactaccgatgagtccatggccgccattcaggccttgatgctgacaactttctccgtcgagtccgacagtatctgcgatcgcgtatacccaactctgaagcagatctgccaagattctcaggaggcgtcgctcaaggagaaagccatccaggccatgagcatcgtgacgatgtgtggaggaggcgggtctggcgaggcagaggagcttctggagtttttgatcgagatcatcgaaagcgatgggcacagcatcgaggctggagacaatgcacccgtcgtgaacgccgccttgcaggcctggggctttgttgccagctatttggacgatctccaagagcagagcaaacaggctttagaggcgttcactgaacagcttgatagtgccgatgtagatatccaggtcacagcaggtgccaatgttgcggccattttcgaatccgagcggaactacaaagatgagaccgacgagacgtggaacctccagtacgatcaacacaaattggttcagcggatgacagcgcttgctcgcgagtcttcgaaaggcatctcgaagaaggaccgcaagctcctccacagcagtttcaatagcgtcctaacgtccatcgaactcggcaaaggccccgggtactcgacagcccgacaagatcctagcgttctaggcggtgaaaaccttgattttgacggtttcaaagagtatggatatcgcgagaaggcacggatcggcgaccttgtcatcataatcgacagctggtcgctcaaggcccgtgtatcaatgctacgatcggtcttagggggtgggctccccatccattttctgcagaacccgatcgtctcggatgtccttagcgcagcacaagttaagttcgtgtctgcgcctcaaaagccgacgcccgcgaacaagaagcgaggaaacaaatcgagccgataa

SEQ ID NO: 12009 - protein, 451 aa, Muscodor strobelii
  misc_feature: SGI Peptide ID NO. 563877
  misc_feature (56)..(345): Pfam Id: PF05004 Pfam Desc: Interferon-related developmental regulator (IFRD)
  misc_feature (1)..(437): NCBI GI: 116197857 Blast Desc: CHGG_07084 [Chaetomium globosum CBS 148.51] gi|88178363|gb|EAQ85831.1| CHGG_07084 [Chaetomium globosum CBS 148.51]
  misc_feature (1)..(432): NCBI GI: 85101969 Blast Desc: NCU04256 [Neurospora crassa OR74A] gi|16944616|emb|CAD11385.1| conserved [Neurospora crassa] gi|28922789|gb|EAA32011.1| NCU04256 [Neurospora crassa OR74A]
  misc_feature (1)..(451): NCBI GI: 261352140 Blast Desc: conserved [Verticillium albo-atrum VaMs.102]
  misc_feature (1)..(419): NCBI GI: 39971421 Blast Desc: MGG_07026 [Magnaporthe grisea 70-15] gi|145019487|gb|EDK03715.1| MGG_07026 [Magnaporthe grisea 70-15]
  misc_feature (1)..(427): NCBI GI: 46137487 Blast Desc: FG10259.1 [Gibberella zeae PH-1]
  misc_feature (1)..(424): NCBI GI: 169605235 Blast Desc: SNOG_05640 [Phaeosphaeria nodorum SN15] gi|111065584|gb|EAT86704.1| SNOG_05640 [Phaeosphaeria nodorum SN15]
  misc_feature (1)..(437): NCBI GI: 256731685 Blast Desc: [Nectria haematococca mpVI 77-13-4]
  misc_feature (3)..(426): NCBI GI: 156043567 Blast Desc: SS1G_10787 [Sclerotinia sclerotiorum 1980] gi|154695174|gb|EDN94912.1| SS1G_10787 [Sclerotinia sclerotiorum 1980]
  misc_feature (1)..(416): NCBI GI: 145245525 Blast Desc: An11g10730 [Aspergillus niger] gi|134079733|emb|CAK40871.1| protein product [Aspergillus niger]
  misc_feature (1)..(449): NCBI GI: 169779942 Blast Desc: [Aspergillus oryzae RIB40] gi|238506040|ref|XP_002384222.1| IFRD domain protein [Aspergillus flavus NRRL3357] gi|83773175|dbj|BAE63302.1| protein product IFRD
  misc_feature: Useful for introducing or modulating the production of volatile compounds
MHDLRKKALLESGKTISRKARSRPDSQVASPAISPVPSRGGSRANSRYASEEEISSDEDYEDSMTNSVIGSDDGEDVAVASWTDRLRDRIAELLDRKRSSTKGREATLVAYTHLLRYHYAEEQIDSQLNEIVPALLKCMRGGSTTDESMAAIQALMLTTFSVESDSICDRVYPTLKQICQDSQEASLKEKAIQAMSIVTMCGGGGSGEAEELLEFLIEIIESDGHSIEAGDNAPVVNAALQAWGFVASYLDDLQEQSKQALEAFTEQLDSADVDIQVTAGANVAAIFESERNYKDETDETWNLQYDQHKLVQRMTALARESSKGISKKDRKLLHSSFNSVLTSIELGKGPGYSTARQDPSVLGGENLDFDGFKEYGYREKARIGDLVIIIDSWSLKARVSMLRSVLGGGLPIHFLQNPIVSDVLSAAQVKFVSAPQKPTPANKKRGNKSSR

SEQ ID NO: 12010 - DNA, 2411 bp, Muscodor strobelii
  misc_feature: SGI EST ID NO. CUFF.28487.0
  misc_feature: Variant of the nucleotide sequence at SEQ ID NO 12008
atttggtcctgccgcttcgacgattcaagcaaccgaattgattaacttggggatatattgtgttacgactttattgaaaggggaattgcctacttaggcaggctccttgattacgtcgttccgcggtacctggtcaccctgctgagaatcgccaccggacggtactgcgtccgccttgcccctcgcctgcaattcatcccgccattcatcccagcatccatcctaccgcatcccaccattattaaggttcatgcacccgccgccctgccctaggtcagcactgcacctgccggcgactgacgtgtggcattttcgagaaattctagtgcgcctcacgaatttacgtgaatagcttgcgttgaaattgcatctatctccgcgagcacgtcgagcacattgtccacctctgactcaccttcatccaaacccgtctatctctatcaaaagcctattctacacactgagtgcattctctgcattctcaaacacatatataagtatcaaaatcaccctcatggaattccagtcgcagagaaccccgaactcgttgcgtcgttttcacaccagaaaccagacttgatagtcacttccgccatttctgcccgccgcgaagctggtacttccactacgacacctttcttactagaacccgactctcgactacggtctaaaccacgaaaatgcacgacttacgcaagaaggccctgctggagagcgggaaaaccatttcgcgcaaagcacgctcgcgccccgactcgcaggttgcatcgcccgccatctccccagtcccatcacgaggcggctctcgagccaatagccgatatgcctccgaggaagaaatctcgagcgacgaggactacgaggacagcatgaccaactctgttattgggtcggacgacggcgaagatgtcgccgttgccagctggactgatagactgcgagatcgcatcgctgagcttctcgatcgcaagcgcagcagcacaaagggccgcgaagccactctcgtcgcttacacgcatctcctccgataccactacgcagaagaacaaatcgactcccaactcaacgagatagtgccggccttactcaagtgcatgcggggcggcagtactaccgatgagtccatggccgccattcaggccttgatgctgacaactttctccgtcgagtccgacagtatctgcgatcgcgtatacccaactctgaagcagatctgccaagattctcaggaggcgtcgctcaaggagaaagccatccaggccatgagcatcgtgacgatgtgtggaggaggcgggtctggcgaggcagaggagcttctggagtttttgatcgagatcatcgaaagcgatgggcacagcatcgaggctggagacaatgcacccgtcgtgaacgccgccttgcaggcctggggctttgttgccagctatttggacgatctccaagagcagagcaaacaggctttagaggcgttcactgaacagcttgatagtgccgatgtagatatccaggtcacagcaggtgccaatgttgcggccattttcgaatccgagcggaactacaaagatgagaccgacgagacgtggaacctccagtacgatcaacacaaattggttcagcggatgacagcgcttgctcgcgagtcttcgaaaggcatctcgaagaaggaccgcaagctcctccacagcagtttcaatagcgtcctaacgtccatcgaactcggcaaaggccccgggtactcgacagcccgacaagatcctagcgttctaggcggtgaaaaccttgattttgacggtttcaaagagtatggatatcgcgagaaggcacggatcggcgaccttgtcatcataatcgacagctggtcgctcaaggcccgtgtatcaatgctacgatcggtcttagggggtgggctccccatccattttctgcagaacccgatcgtctcggatgtccttagcgcagcacaagttaagttcgtgtctgcgcctcaaaagccgacgcccgcgaacaagaagcgaggaaacaaatcgagccgataagaaatcctcgagcaacggttatcattgactttttcacacacttatctttctgtacataggctatggagagccgtctattgcgcgcttccgttatagctctttattttgttactgccgtttatctggaatacccgcgttcggaggcgaagagaaggaaaccagcgttgttttgcgcagtgagggccgcatgggtgttcggatacgtattgcatctatacattcgcgtttttgagagggacactacgttagcaagaatgtttctagacgcggcatgatagagtatgatctctacactataaataactacaagaggtagctatgagaatgctctacaatactacaggcttactgacttagaccttttgagtgtaatgc

SEQ ID NO: 12011 - DNA, 2451 bp, Muscodor strobelii
  misc_feature: SGI cDNA ID NO. 563878
  misc_feature: Encodes the peptide sequence at SEQ ID NO 12012
atggcatctcctccccttccatctcatttcgaccagcagactgctaccaaggctaaggacaagatctctgttgttctatcggagcgtagcgactctaagacagttgctgagcgacatctcgtcctttctcgggagcatccaactgtccctatcggtcgagcctccaaggtcctcaccaagggttttgtccccgccgaggataacgcctggttcgagaatcctgttatgtccagggaccacgccgaacttaccgttgatctagacaaccaagaatctcctgccgtctacattgaggacatcaagtcattccacggcacattctacacgcccaacgacgggtcgaatcaagagcgtcgactgcagccgcatgagccccagaagctcgtgaccggcgacataatccgcttcggcatcgacatcttccgacacaacagcggctatttcccgccttgctgtgtcgacgtactcatcgaggagatggatacaaaggctgatcagagagcttcccttgtggaaccgccgaagcctggcttcagcgttccagacgatattgacgacgaggatgacgaagatctttttgttcccaccgtagttgaagattctacccagttcaccatgatgcgctccggcccccttgaccgccatccgattgccattgatctcaccgtcgactctgaagttatcgcccgcaagcctaacttttcgagctcccagcgcactgatgtcatcgacctgacctcagaggccggcccggaatcaactgtcgcttcgcccattctgggcacgccgcgcccatccacgcttcagactcaagactgcagtattattttgtcgaccgcaccacagcctgtcgtcaaaaaatcaagcaccatcaagatgttgccaacttttgtcttggactcccagggcgataatgaatccgagctaggtggcatggatctgccatgtggatcttcacaaaggggttcctctgttgactctgacgatggatactctagccaagacctccatgctctcgatgctgatgccgaccatgacacagaaatgagttctgacgactcggcttctaactcctctcgagcttcttcagaggcaagtttcgacagccccgtccaccgttgggccgtagcatccctcgcctccgacgtcgactccgaaaattcgtaccatagttctgatgagtcagatcttgactctgaactctctgagcccggattcgatccttctgaccttggcgacgaatatggagcgtccgagttcgaagacgaaatcgatgaggccaacgatacactgacatattaccctgacattgatgacaactcgtccgttcattcatcttgcgattcgcctatgtacagcgacgacgatgacgatgttgcggagcccgcagccgagggcgtgaacactgagacctccgtggaccgttcgagtccgactactgctccacagcctccaaaacctggcaactgcaatgctcttctcgaccagaccagagagatggacagttgcccggctgctcctccatttccaaagtcgaatgtcgagactatgaagggcgcacagtcttccaactctcttgccaagaatgtcacgcaacatgctcgtgacccaagcccttcagatgctgctttgttcagacgcctcccaaagccagatgaacagagagcccagatacttggagagaagagcggaaaatatgaatatttccaggcacgtgaagacaatcgtgccaagtggtcgccaaacgaccacatgatgttaggtccctctatccctgagcccgcctcagtgtcaccgcagtcgggcgcttcgggctggttggctgagggcacgagattcatcaacaacccgagtattgacgaacttccaccgctgggggcagcgcaagatttggtacgggaatacgacatgacaagcgcgtacacgtatcaacagagtcaaatggctgcaaagcgtgatcactttgtaccctactgggaagtattggcgaccaagcaagattcggccgaggcgcctcagcgcgtcaagattgccgatctcctacaacgggaacccaagcaagcctcgccggagattgtaaccgacacgaaagagactgctgttgtagatgcagtacccgcctcatgtccgcaatcaccacctcgtgccaagcgttccttccaagaggccttcatcgacgatattgcaactccgcgattgcctttgcccaacagacacgatgaatcggacagcgaggagcgctctaagcctgattatgaacacaggaccggttcgttgcagttgactggagaacaacgagatgtcgctgtcccaaagactgcggccccagcggcacagcccgaggtcggtcgtccttccaagaagctacgcctagctcaagcaggtgcttgcgtgctacttggaggggctgcggctttctcattcttggtgaacaccgctcctgttttctaa

SEQ ID NO: 12012 - protein, 816 aa, Muscodor strobelii
  misc_feature: SGI Peptide ID NO. 563878
  misc_feature (49)..(137): Pfam Id: PF00498 Pfam Desc: FHA domain
  misc_feature (73)..(137): Pfam Id: PF00498 Pfam Desc: FHA domain
  misc_feature (36)..(190): NCBI GI: 85101965 Blast Desc: NCU04255 [Neurospora crassa OR74A] gi|28922788|gb|EAA32010.1| [Neurospora crassa OR74A]
  misc_feature (37)..(187): NCBI GI: 256732058 Blast Desc: NECHADRAFT_100483 [Nectria haematococca mpVI 77-13-4]
  misc_feature (20)..(182): NCBI GI: 261352139 Blast Desc: [Verticillium albo-atrum VaMs.102]
  misc_feature (34)..(149): NCBI GI: 116197855 Blast Desc: CHGG_07083 [Chaetomium globosum CBS 148.51] gi|88178362|gb|EAQ85830.1| CHGG_07083 [Chaetomium globosum CBS 148.51]
  misc_feature (18)..(186): NCBI GI: 242822341 Blast Desc: FHA domain protein [Talaromyces stipitatus ATCC 10500] gi|218712788|gb|EED12213.1| FHA domain protein [Talaromyces stipitatus ATCC 10500]
  misc_feature (22)..(186): NCBI GI: 212546807 Blast Desc: FHA domain protein [Penicillium marneffei ATCC 18224] gi|210065077|gb|EEA19172.1| FHA domain protein [Penicillium marneffei ATCC 18224]
  misc_feature (21)..(161): NCBI GI: 39971419 Blast Desc: [Magnaporthe grisea 70-15] gi|145019486|gb|EDK03714.1| [Magnaporthe grisea 70-15]
  misc_feature (34)..(191): NCBI GI: 46137489 Blast Desc: FG10260.1 [Gibberella zeae PH-1]
  misc_feature (35)..(194): NCBI GI: 240107462 Blast Desc: FHA domain containing protein [Coccidioides posadasii C735 delta SOWgp]
  misc_feature (35)..(194): NCBI GI: 119191163 Blast Desc: CIMG_05629 [Coccidioides immitis RS]
MASPPLPSHFDQQTATKAKDKISVVLSERSDSKTVAERHLVLSREHPTVPIGRASKVLTKGFVPAEDNAWFENPVMSRDHAELTVDLDNQESPAVYIEDIKSFHGTFYTPNDGSNQERRLQPHEPQKLVTGDIIRFGIDIFRHNSGYFPPCCVDVLIEEMDTKADQRASLVEPPKPGFSVPDDIDDEDDEDLFVPTVVEDSTQFTMMRSGPLDRHPIAIDLTVDSEVIARKPNFSSSQRTDVIDLTSEAGPESTVASPILGTPRPSTLQTQDCSIILSTAPQPVVKKSSTIKMLPTFVLDSQGDNESELGGMDLPCGSSQRGSSVDSDDGYSSQDLHALDADADHDTEMSSDDSASNSSRASSEASFDSPVHRWAVASLASDVDSENSYHSSDESDLDSELSEPGFDPSDLGDEYGASEFEDEIDEANDTLTYYPDIDDNSSVHSSCDSPMYSDDDDDVAEPAAEGVNTETSVDRSSPTTAPQPPKPGNCNALLDQTREMDSCPAAPPFPKSNVETMKGAQSSNSLAKNVTQHARDPSPSDAALFRRLPKPDEQRAQILGEKSGKYEYFQAREDNRAKWSPNDHMMLGPSIPEPASVSPQSGASGWLAEGTRFINNPSIDELPPLGAAQDLVREYDMTSAYTYQQSQMAAKRDHFVPYWEVLATKQDSAEAPQRVKIADLLQREPKQASPEIVTDTKETAVVDAVPASCPQSPPRAKRSFQEAFIDDIATPRLPLPNRHDESDSEERSKPDYEHRTGSLQLTGEQRDVAVPKTAAPAAQPEVGRPSKKLRLAQAGACVLLGGAAAFSFLVNTAPVF

SEQ ID NO: 12013 - DNA, 3905 bp, Muscodor strobelii
  misc_feature: SGI EST ID NO. CUFF.28782.1
  misc_feature: Variant of the nucleotide sequence at SEQ ID NO 12011
atcacttcctgactgcgatccgattgcccctccttctcccccatatgtgtgtgtcattctgtcgattccagcctcaggttttagcagtccagacttcgccgatgcctcttggttcatgtactgcggacgcccttctcccctcgcgcgacctctgcttgtgatatctggtctaacatttgtacttaacacgtaccatcaaagttaagtgattgtgggctgtttggcagtgattgcatcaacatcctaagttccatcactctgacatctgcgtgccccgtgcccgccattgcccgctgctgcctcgccgtgcttgcggcccccaggctctgagctcgacggcccgtgtcaagcttcgtccagtcgtgaggtagcttgcctcccctcttcaagtaccagtacgtggtggcagcttccggcctccatcgtccatcgtccaacactgccggtctggatctgaccggagagcacgcctaccacagcctacagcctaccttgggcccgtagcctgccttcaccttacctctctacattccactcttccagtatctcgtcgttgcttgcgtttcttcctctctagtactctcgcatcccatcaagcgtgttctcttgcgtttgacctttgaccattcaacctcgcgaggtaccttctacccgtcggcatcatcctcacctacctatgttaggcttcgggcctttatctacaggtgttaattgagcacatttgcacatgagcaagcggactgccgccgacccaaagtctacttgcgtcggtacccctctggccgcagcttatccagcaccgctcctggcgccgtctctcgcctattcacaccttaaacacgtgaacggtcaaataaatccagccatcatggcatctcctccccttccatctcatttcgaccagcagactgctaccaaggctaaggacaagatctctgttgttctatcggagcgtagcgactctaagacagttgctgagcgacatctcgtcctttctcgggagcatccaactgtccctatcggtcgagcctccaaggtcctcaccaagggttttgtccccgccgaggataacgcctggttcgagaatcctgttatgtccagggaccacgccgaacttaccgttgatctagacaaccaagaatctcctgccgtctacattgaggacatcaagtcattccacggcacattctacacgcccaacgacgggtcgaatcaagagcgtcgactgcagccgcatgagccccagaagctcgtgaccggcgacataatccgcttcggcatcgacatcttccgacacaacagcggctatttcccgccttgctgtgtcgacgtactcatcgaggagatggatacaaaggctgatcagagagcttcccttgtggaaccgccgaagcctggcttcagcgttccagacgatattgacgacgaggatgacgaagatctttttgttcccaccgtagttgaagattctacccagttcaccatgatgcgctccggcccccttgaccgccatccgattgccattgatctcaccgtcgactctgaagttatcgcccgcaagcctaacttttcgagctcccagcgcactgatgtcatcgacctgacctcagaggccggcccggaatcaactgtcgcttcgcccattctgggcacgccgcgcccatccacgcttcagactcaagactgcagtattattttgtcgaccgcaccacagcctgtcgtcaaaaaatcaagcaccatcaagatgttgccaacttttgtcttggactcccagggcgataatgaatccgagctaggtggcatggatctgccatgtggatcttcacaaaggggttcctctgttgactctgacgatggatactctagccaagacctccatgctctcgatgctgatgccgaccatgacacagaaatgagttctgacgactcggcttctaactcctctcgagcttcttcagaggcaagtttcgacagccccgtccaccgttgggccgtagcatccctcgcctccgacgtcgactccgaaaattcgtaccatagttctgatgagtcagatcttgactctgaactctctgagcccggattcgatccttctgaccttggcgacgaatatggagcgtccgagttcgaagacgaaatcgatgaggccaacgatacactgacatattaccctgacattgatgacaactcgtccgttcattcatcttgcgattcgcctatgtacagcgacgacgatgacgatgttgcggagcccgcagccgagggcgtgaacactgagacctccgtggaccgttcgagtccgactactgctccacagcctccaaaacctggcaactgcaatgctcttctcgaccagaccagagagatggacagttgcccggctgctcctccatttccaaagtcgaatgtcgagactatgaagggcgcacagtcttccaactctcttgccaagaatgtcacgcaacatgctcgtgacccaagcccttcagatgctgctttgttcagacgcctcccaaagccagatgaacagagagcccagatacttggagagaagagcggaaaatatgaatatttccaggcacgtgaagacaatcgtgccaagtggtcgccaaacgaccacatgatgttaggtccctctatccctgagcccgcctcagtgtcaccgcagtcgggcgcttcgggctggttggctgagggcacgagattcatcaacaacccgagtattgacgaacttccaccgctgggggcagcgcaagatttggtacgggaatacgacatgacaagcgcgtacacgtatcaacagagtcaaatggctgcaaagcgtgatcactttgtaccctactgggaagtattggcgaccaagcaagattcggccgaggcgcctcagcgcgtcaagattgccgatctcctacaacgggaacccaagcaagcctcgccggagattgtaaccgacacgaaagagactgctgttgtagatgcagtacccgcctcatgtccgcaatcaccacctcgtgccaagcgttccttccaagaggccttcatcgacgatattgcaactccgcgattgcctttgcccaacagacacgatgaatcggacagcgaggagcgctctaagcctgattatgaacacaggaccggttcgttgcagttgactggagaacaacgagatgtcgctgtcccaaagactgcggccccagcggcacagcccgaggtcggtcgtccttccaagaagctacgcctagctcaagcaggtgcttgcgtgctacttggaggggctgcggctttctcattcttggtgaacaccgctcctgttttctaatttgagggaagacgtgtcttcctccatcggactgcgtttcccgttattattgactaacaatgtctctttcatatctgcgaggaggattatgggaatggcgtcaggtcactaggtgttcaaggttatggaagacggaattttacatgagagcccaaaagctcctcggagagagaactgcacgactcaattggccaggcatttgaggtcaatggactaggaaaataacccaatggctgttttgctatcgatatggtctgtggatagcctaaatagttgcccctgctgcaccttgccatatctagtagctctcattatttgtacgctttactccggtgccaagatgccagtagtaaatatgaatgaacttatttctttacagccatggattcgttttttttttttttttctgcactttggtgaacaattgacaggcattttgagattgagctcctaagggacaaaagtcattgaggcaggatcatctatcgccgcgcttacctctcgttagttcttgaagtatggtgtagctaggctacctaagtacttacttgtactatatagttcctgatactagttacaatcatca

SEQ ID NO: 12014 - DNA, 594 bp, Muscodor strobelii
  misc_feature: SGI cDNA ID NO. 563879
  misc_feature: Encodes the peptide sequence at SEQ ID NO 12015
atgcagttcactaccttcgcccttgccgctctttctatcggctctacgttcgccgtcgccgtacctcagcccaaggtcctctccactgccgttagcgcagccaacgatgctaaaaccgcagttgataccgaggccgctatcatccagaaggcagtcgttaacactgtcaacaatgaggtcattccggctgtcaacgcctccatcgccaacatcgagaaagagatagagaatctcacaaacaccattgtccccatcatcacaactatcgttctgcccctcgcaacctccgagctggcccaactcctcatcctcatcaacgatgcccagtctattgtcggcgatttgaaagattccttatctcttcttctagctaatctccctcacgatctccttgtcctcatcaaaactgaagtcgagctcgccatcgccaccatcgagcccttcactacccccgtcgtcaaatttgccaatgatgccaccaaaggtatctccggtacttccgtcgccgacatcaacaaggctgtcaagatcctccaggccgacggcgctaatatcgttggccctatcaaagccgctttcgaccagatctactag

SEQ ID NO: 12015 - protein, 197 aa, Muscodor strobelii
  misc_feature: SGI Peptide ID NO. 563879
  misc_feature (67)..(163): NCBI GI: 85086715 Blast Desc: NCU00265 [Neurospora crassa OR74A] gi|28918831|gb|EAA28500.1| [Neurospora crassa OR74A]
MQFTTFALAALSIGSTFAVAVPQPKVLSTAVSAANDAKTAVDTEAAIIQKAVVNTVNNEVIPAVNASIANIEKEIENLTNTIVPIITTIVLPLATSELAQLLILINDAQSIVGDLKDSLSLLLANLPHDLLVLIKTEVELAIATIEPFTTPVVKFANDATKGISGTSVADINKAVKILQADGANIVGPIKAAFDQIY

SEQ ID NO: 12016 - DNA, 585 bp, Muscodor strobelii
  misc_feature: SGI cDNA ID NO. 563880
  misc_feature: Encodes the peptide sequence at SEQ ID NO 12017
atgtgtgagcctcaaacttaccttcaatctcccttgcctcctccccatggcatttatgatcgttccctgtccataagctttgacccttgtcctggaattgttcctgatacttacatcgacgtggatcccggactatatgtatttgtggacatgttctggagtgcatgtgtagagggagagggtgccgtgcttccagaagatggcaccaatgtggctgggtgggtatcctattatcttgtgaagaacgagacgggaagggagaagcaggaaataatcgatctgatcaaagggcagtggaccgcctcggaggtcgagcagttgatgcagagtatctggccaaacacaaggatctggagggatgtatccttggcaagaatcgagggtccagaattgcttgtaaaagcgctgaaggagggcgtagaggagccttgcatgatgatggtgctagagggatacttagagcctaagaaaaaagaggaaggggaaggatactggcttgatccataccggcacaccgaggagttagtacctggctggttttcaggggaagagaatgcattcaccccctggaatactggtctgtag

SEQ ID NO: 12017 - protein, 194 aa, Muscodor strobelii
  misc_feature: SGI Peptide ID NO. 563880
MCEPQTYLQSPLPPPHGIYDRSLSISFDPCPGIVPDTYIDVDPGLYVFVDMFWSACVEGEGAVLPEDGTNVAGWVSYYLVKNETGREKQEIIDLIKGQWTASEVEQLMQSIWPNTRIWRDVSLARIEGPELLVKALKEGVEEPCMMMVLEGYLEPKKKEEGEGYWLDPYRHTEELVPGWFSGEENAFTPWNTGL

SEQ ID NO: 12018 - DNA, 5253 bp, Muscodor strobelii
  misc_feature: SGI EST ID NO. CUFF.28523.0
  misc_feature: Variant of the nucleotide sequence at SEQ ID NO 12016
gccgactgcacgtcgccaactgtgtgccaccgactgttttgacaacttcaaagcatcatcgccgagagctgggcctggtcatcatgtcggtcattctctgcacagctggctacgaccacacgatccggttctgggaggcgctctcgggcatctgctcgcggacgatccagcacccggactcgcaggtcaaccgcctgtgcatctcgcccgacaagcgctttctcgccgccgccggccaccacaccgtcaagctctacgatatcaagtccaccaaccccaaccccctgctgaccttcgagggccacagcggcaacatcacgggtgtcgccttccactgcgagggcaagtggatggtcaccagcagcgaggacggcaccgtcaagatctgggagacccgctccggcaccatccagcgctcctacaaccacggcatcgccgccaacgacgtcgtcatccaccccaaccagggcgagatcatctcctgcgaccgcggcggcagcgtgcgtgtctgggacctcgccgagaacaactgctcccaccagctgatccccgaggaggatgtctccgtctcctctgtcaccgtcgccagcgatggctccctgctctgcgctgccaacaacgccggcaacgtctttgtctggcagctgatccagaccggcgagcgcacccagctgctgcccgtcacccagttctccgcccacaaggagtacatcacccgcgtcctcctatcccccgacgtcaagaagctcgccacctgctccgctgaccacaccgccaagatctgggctgtgcctgccaccgacctcgccgacatgcctgccctgcccgtcataactaatggtaatgccaacggcaacgggaatgctaatggcactaatggttttcatcctggagccgccaccactaccacgaccaccactggcatcgcaagccccaacaccaagccttttcccctcgaggcaactctcacgggtcaccagcgctgggtctgggactgtgctttcagtgccgattcggcctacctcgtcacagcctgctctgaccactatgctcgtctctgggagctgcacagccagcaggtcattcgccagtacaacggtcatcacagaggcgccgtctgcgttgctctgaacgactattcagaagccagatagactcaagagtctgcattgtcgtccgcaatcgagaacgctaaccgaattgctgagcttgctgatgatccttcccgctatgggttccagggcccggatagggacgtccacccaaccgactggactcttgaatttctcttcagggccaactggatcccgaatccaagactcgtgcgcgagcgagaggaggtctatgaggcaagactaagggtcatcgcggccatgtgtgagcctcaaacttaccttcaatctcccttgcctcctccccatggcatttatgatcgttccctgtccataagctttgacccttgtcctggaattgttcctgatacttacatcgacgtggatcccggactatatgtatttgtggacatgttctggagtgcatgtgtagagggagagggtgccgtgcttccagaagatggcaccaatgtggctgggtgggtatcctattatcttgtgaagaacgagacgggaagggagaagcaggaaataatcgatctgatcaaagggcagtggaccgcctcggaggtcgagcagttgatgcagagtatctggccaaacacaaggatctggagggatgtatccttggcaagaatcgagggtccagaattgcttgtaaaagcgctgaaggagggcgtagaggagccttgcatgatgatggtgctagagggatacttagagcctaagaaaaaagaggaaggggaaggatactggcttgatccataccggcacaccgaggagttagtacctggctggttttcaggggaagagaatgcattcaccccctggaatactggtctgtagtcagtgaccatgttgtctgggagctggatacaggatgagagtcttggagaggggaagagtatatcagtccaatgagtgttggaggtagttgtaccatccgttgcaatgtttctatcttccagagtggatatagcaatgaaaattgaatgcagctccactacatcagtgctaacggaactctttgatcaatctcgcccatagacttggatcgctggatagcatgtaaccatcctcttgcgtcagcacggtaactcaacgagagagatagtaggtgtatcaagaattcgattagaataacaactcaattttcatgcttaaaaacgcgaaatatatcttattccataaaacttgtcgcgtctctgctatagcagacacagacacgctatggtattggccatatgactctacaaccgatatcccctctgacaacatatactccagacgccgctctatgctgctttctggacgatatactaagactagtaacaatatttctcctttctgcttctgttctcaaaacttgcagtacccgcattggactctgcgatccggtgtatatccaatttccacgagaagcattactcttcaggtattagtataaatataagttccatgtatccaactgcctttttcctccactgttgcctaaattgcacactgaagactgggttaaaaatttgtcttctaccagccgtctccccacccatcgtcgtcaccacccgtgtctttgggcttcatatctaacttcttactcgctgccgatttcgcaccagatgccgttctagaaggcaagggtttctttgctgcggcaccgctcttcgctaaacctttgggcagtggtttactagaacccggatttttcttgttagcttgtgctgctaaccagcctgcgaaatcaggttctgagccatcgtctattgatgtagctggggcgggtgctggttttgatgattttgcggtggatggtcttgacgacgtggtagacttggtgacgggcggggtgttgaaggcatcttctgcatcaccccatgcgtttgccgcgtcatcgtccatgtctcccatgtcgccccaggcgtcgccggcgtcatcatcgtctggcgaggcgaaatatgtctctggtgcgggactgggagcagcgggcgcaggggtccgtgcagccgttgctggagacggggactttactgcctgtcggtggagagtggaggcggatgaggttgagggagctgaccgtttggtctctgcgggagaggccgcgcgtggagtcggtgtcccgttgccggcactttgcatctcacctgcggccgtagagagtttgttagtgaaagaggagattgcccagcctgcccacgacgaagcgtcgtttgactgggctgtgcttatacggggtgtgtttccgtcgcttgcttggggaggcggaagcacggattctggcatggttgcttgggctttgcggatgcgggcgaggtagacgtccattgttttatttgcttggtcgcggatcattttctccttgtctatcaacgaaggacagacgatgggtaagatcttgactgcgcagtcttcctctgagaaatactctcctgttgctgccaaggccatcaaagccgcatttcgcgcgtgaacgaaggggtcacggagggaacgcgtgaatgctgccacgagaactttggaccgggtcgatgtgctcaggttcttagcgatttttccaagcataatcgttgtatttgttctgatgccaggttgttcgtcgtttgctgtctttgcgagatatttcaacagttcgccgtttatgatgcgatcggagagcttgggaattacaataagtacagacttcagggtattttctcgcacgactggtgcgagatccgtgaaacccgagaccatgtgtgggaagatcttgtcgtttactaccttttgtggtagtctgtcgatcatgagcggtaagttatcgagcagacaaacgcgtatcgctctgtctgggttgccgaagaggcggatgacgactggttgaacacgggcttcgaagtcgtcgcttgagagctttgtggctattttcataacgatgccaaatgctttcggtccgccgccaccaaattcgacagattttaataattccggtagcaccttcattttgaagaagtcctctgggaagtcgtcggtgagctgatcgaggtcgtcaaggaactcggctcgctcttcctccgtcttgacaccaagattgtcaacgccctcagtaagcttgataaggggcgagtcgaaaaagccgccggagcgtagtccttgttcaagaaatgcccccaccgttatcctggctttgggattcgcgttcactaatcgtttataaccagcatgcatagttggcggtatgccttttgtctgtcccgcctgatcagggcccgtgaaatcgccattgaaggcctcaaatatggtcgttccgaagttatagctgtcgacagcagaatgtggactcttcttaattgcgtcccagccgttgcgtgctaactccggcggtgtaaagcggttggaatcgggcaccagactgccgtatgtgtatattatcgcctcgtcatctttgacattgctgagcacttcaaagccgccgagtttccattcaccactctcggaagtatatatcgacgataccctcaggcttccatgtatcgaagagccctcgtcattgatgaactttatagtgcgcccaatactgtatagcccccatttgatagtctcgggactcaagctctttcgcttgacgttccacctcagcggtacaacgcgttcggtggcgatgtatatgtatgactcggtctcgacagcgtccagcaccttgatgacgccggggtggcgcatggtgcgcagcttcttgagcgcattcttggcgaggggcagtcgtgacttgttggcgttgacgtcgaaggagaatatgctgcagttggccccgtcggccttgcgcgtgccgttgtatagggcccagatggaggcgtcgatgtcgaccttgtcgccaaaagaatacgggaacggcggcccctgagccgccatggccgaggcgacggccgacttgaggaagtccatggtcgtgcgatcagaccattcgtatggcttgcaatgtttgcagtgaagttttcgatagttcggtacacgactctgcagcaccccgggttgtcgcgtgggacgggggcgagcctgaagattacagtaggtacctgtctgtgttgcgacagatgccgtatctcggtttatttgtccacaacatgacgcgatagcacttggaaattgacccctccacacgctactg

SEQ ID NO: 12019 - DNA, 2388 bp, Muscodor strobelii
  misc_feature: SGI cDNA ID NO. 563881
  misc_feature: Encodes the peptide sequence at SEQ ID NO 12020
atggacttcctcaagtcggccgtcgcctcggccatggcggctcaggggccgccgttcccgtattcttttggcgacaaggtcgacatcgacgcctccatctgggccctatacaacggcacgcgcaaggccgacggggccaactgcagcatattctccttcgacgtcaacgccaacaagtcacgactgcccctcgccaagaatgcgctcaagaagctgcgcaccatgcgccaccccggcgtcatcaaggtgctggacgctgtcgagaccgagtcatacatatacatcgccaccgaacgcgttgtaccgctgaggtggaacgtcaagcgaaagagcttgagtcccgagactatcaaatgggggctatacagtattgggcgcactataaagttcatcaatgacgagggctcttcgatacatggaagcctgagggtatcgtcgatatatacttccgagagtggtgaatggaaactcggcggctttgaagtgctcagcaatgtcaaagatgacgaggcgataatatacacatacggcagtctggtgcccgattccaaccgctttacaccgccggagttagcacgcaacggctgggacgcaattaagaagagtccacattctgctgtcgacagctataacttcggaacgaccatatttgaggccttcaatggcgatttcacgggccctgatcaggcgggacagacaaaaggcataccgccaactatgcatgctggttataaacgattagtgaacgcgaatcccaaagccaggataacggtgggggcatttcttgaacaaggactacgctccggcggctttttcgactcgccccttatcaagcttactgagggcgttgacaatcttggtgtcaagacggaggaagagcgagccgagttccttgacgacctcgatcagctcaccgacgacttcccagaggacttcttcaaaatgaaggtgctaccggaattattaaaatctgtcgaatttggtggcggcggaccgaaagcatttggcatcgttatgaaaatagccacaaagctctcaagcgacgacttcgaagcccgtgttcaaccagtcgtcatccgcctcttcggcaacccagacagagcgatacgcgtttgtctgctcgataacttaccgctcatgatcgacagactaccacaaaaggtagtaaacgacaagatcttcccacacatggtctcgggtttcacggatctcgcaccagtcgtgcgagaaaataccctgaagtctgtacttattgtaattcccaagctctccgatcgcatcataaacggcgaactgttgaaatatctcgcaaagacagcaaacgacgaacaacctggcatcagaacaaatacaacgattatgcttggaaaaatcgctaagaacctgagcacatcgacccggtccaaagttctcgtggcagcattcacgcgttccctccgtgaccccttcgttcacgcgcgaaatgcggctttgatggccttggcagcaacaggagagtatttctcagaggaagactgcgcagtcaagatcttacccatcgtctgtccttcgttgatagacaaggagaaaatgatccgcgaccaagcaaataaaacaatggacgtctacctcgcccgcatccgcaaagcccaagcaaccatgccagaatccgtgcttccgcctccccaagcaagcgacggaaacacaccccgtataagcacagcccagtcaaacgacgcttcgtcgtgggcaggctgggcaatctcctctttcactaacaaactctctacggccgcaggtgagatgcaaagtgccggcaacgggacaccgactccacgcgcggcctctcccgcagagaccaaacggtcagctccctcaacctcatccgcctccactctccaccgacaggcagtaaagtccccgtctccagcaacggctgcacggacccctgcgcccgctgctcccagtcccgcaccagagacatatttcgcctcgccagacgatgatgacgccggcgacgcctggggcgacatgggagacatggacgatgacgcggcaaacgcatggggtgatgcagaagatgccttcaacaccccgcccgtcaccaagtctaccacgtcgtcaagaccatccaccgcaaaatcatcaaaaccagcacccgccccagctacatcaatagacgatggctcagaacctgatttcgcaggctggttagcagcacaagctaacaagaaaaatccgggttctagtaaaccactgcccaaaggtttagcgaagagcggtgccgcagcaaagaaacccttgccttctagaacggcatctggtgcgaaatcggcagcgagtaagaagttagatatgaagcccaaagacacgggtggtgacgacgatgggtggggagacggctggtag

SEQ ID NO: 12020 - protein, 795 aa, Muscodor strobelii
  misc_feature: SGI Peptide ID NO. 563881
  misc_feature (1)..(784): NCBI GI: 46137361 Blast Desc: FG10196.1 [Gibberella zeae PH-1]
  misc_feature (1)..(784): NCBI GI: 256731750 Blast Desc: [Nectria haematococca mpVI 77-13-4]
  misc_feature (1)..(782): NCBI GI: 171694257 Blast Desc: protein product [Podospora anserina] gi|170947077|emb|CAP73882.1| protein product [Podospora anserina]
  misc_feature (1)..(795): NCBI GI: 239611092 Blast Desc: protein kinase [Ajellomyces dermatitidis ER-3]
  misc_feature (1)..(795): NCBI GI: 261205904 Blast Desc: protein kinase [Ajellomyces dermatitidis SLH14081] gi|239592748|gb|EEQ75329.1| protein kinase [Ajellomyces dermatitidis SLH14081]
  misc_feature (1)..(782): NCBI GI: 164426423 Blast Desc: NCU04279 [Neurospora crassa OR74A] gi|157071331|gb|EAA31833.2| conserved [Neurospora crassa OR74A]
  misc_feature (1)..(795): NCBI GI: 225558881 Blast Desc: protein kinase [Ajellomyces capsulatus G186AR]
  misc_feature (1)..(795): NCBI GI: 238489865 Blast Desc: protein kinase family protein [Aspergillus flavus NRRL3357] gi|220698558|gb|EED54898.1| protein kinase family protein [Aspergillus flavus NRRL3357]
  misc_feature (1)..(795): NCBI GI: 145239185 Blast Desc: An08g01210 [Aspergillus niger] gi|134076743|emb|CAK39802.1| protein product [Aspergillus niger]
  misc_feature (1)..(782): NCBI GI: 115391809 Blast Desc: conserved [Aspergillus terreus NIH2624] gi|114194333|gb|EAU36033.1| conserved [Aspergillus terreus NIH2624]
MDFLKSAVASAMAAQGPPFPYSFGDKVDIDASIWALYNGTRKADGANCSIFSFDVNANKSRLPLAKNALKKLRTMRHPGVIKVLDAVETESYIYIATERVVPLRWNVKRKSLSPETIKWGLYSIGRTIKFINDEGSSIHGSLRVSSIYTSESGEWKLGGFEVLSNVKDDEAIIYTYGSLVPDSNRFTPPELARNGWDAIKKSPHSAVDSYNFGTTIFEAFNGDFTGPDQAGQTKGIPPTMHAGYKRLVNANPKARITVGAFLEQGLRSGGFFDSPLIKLTEGVDNLGVKTEEERAEFLDDLDQLTDDFPEDFFKMKVLPELLKSVEFGGGGPKAFGIVMKIATKLSSDDFEARVQPVVIRLFGNPDRAIRVCLLDNLPLMIDRLPQKVVNDKIFPHMVSGFTDLAPVVRENTLKSVLIVIPKLSDRIINGELLKYLAKTANDEQPGIRTNTTIMLGKIAKNLSTSTRSKVLVAAFTRSLRDPFVHARNAALMALAATGEYFSEEDCAVKILPIVCPSLIDKEKMIRDQANKTMDVYLARIRKAQATMPESVLPPPQASDGNTPRISTAQSNDASSWAGWAISSFTNKLSTAAGEMQSAGNGTPTPRAASPAETKRSAPSTSSASTLHRQAVKSPSPATAARTPAPAAPSPAPETYFASPDDDDAGDAWGDMGDMDDDAANAWGDAEDAFNTPPVTKSTTSSRPSTAKSSKPAPAPATSIDDGSEPDFAGWLAAQANKKNPGSSKPLPKGLAKSGAAAKKPLPSRTASGAKSAASKKLDMKPKDTGGDDDGWGDGW

SEQ ID NO: 12021 - DNA, 1041 bp, Muscodor strobelii
  misc_feature: SGI cDNA ID NO. 563882
  misc_feature: Encodes the peptide sequence at SEQ ID NO 12022
atggagacgtcgctgccgtatgcgaaactcataaaccaagctggcttcgccggaaatacgagcagtcaatatccagcagcattcatatttgccactgccattgtccagtcttggaaaaccatttcgtttcgtggacttgatactatgatcacaactgtcggtatgctcaaaacaccggacaaatatgccaatggaatccttcaatggaacgatgcgcaggttacggctaccgagtgcgcactttatttctgtgtcaaagcatacgactccttcgtacaaaatggcaatttgaacgaaacaaccattgcaacatggtctgatcgagactacgcttcttacgctaatctggaagcctttgatgaaaatatcaaggtctgtgataagctcaatcacaattcgttgatgctgcccggggtcgtcgaggacgcatacgttcgtgatgtatcacggagcgacctggttctaaacatccccctaggagacgttcgacgattgaatctttctcggaatactactaatttcaacataacgcagaatactgtgggaagccttatcaattggatcaacaatgacttctttttcgaaaagatgacctggccccctttggacgaccagcacggggatgatgtaatagtagcacaaacactattcgaaagcaagagtctggcgaagaccttcgagcaggctgctgatagtctatcacttaagatccgggatatttctaacagcttccatataggaacagtcgaagagattgtgttacgggttgacgtcgcatgggcatatctcacaattcctctcctaaccttcttcttggggacagtgttttgtctggtgactatttacaacactcggaggctgggattgaacgcatgtaaaacagatatgattactaccttgacatattctgttgacgccgaaacccgagcacttctgagacaatctcatttccttggaaacgtcgctaaaactgcaaagaatttgagagttcagctagaagacgtaggaactggcccggaattgcgaatgaagcaagaataa

SEQ ID NO: 12022 - protein, 346 aa, Muscodor strobelii
  misc_feature: SGI Peptide ID NO. 563882
  misc_feature (22)..(333): NCBI GI: 256728432 Blast Desc: NECHADRAFT_53935 [Nectria haematococca mpVI 77-13-4]
  misc_feature (39)..(338): NCBI GI: 46135647 Blast Desc: FG09346.1 [Gibberella zeae PH-1]
  misc_feature (39)..(342): NCBI GI: 85093286 Blast Desc: NCU08172 [Neurospora crassa OR74A] gi|28921111|gb|EAA30428.1| [Neurospora crassa OR74A]
  misc_feature (18)..(333): NCBI GI: 256725830 Blast Desc: NECHADRAFT_94612 [Nectria haematococca mpVI 77-13-4]
  misc_feature (39)..(346): NCBI GI: 156059576 Blast Desc: SS1G_03800 [Sclerotinia sclerotiorum 1980] gi|154701587|gb|EDO01326.1| SS1G_03800 [Sclerotinia sclerotiorum 1980]
  misc_feature (148)..(344): NCBI GI: 256725632 Blast Desc: NECHADRAFT_81555 [Nectria haematococca mpVI 77-13-4]
  misc_feature (73)..(342): NCBI GI: 145236391 Blast Desc: An06g00150 [Aspergillus niger] gi|134075297|emb|CAK44931.1| protein product [Aspergillus niger]
  misc_feature (73)..(342): NCBI GI: 169782207 Blast Desc: [Aspergillus oryzae RIB40] gi|83774309|dbj|BAE64433.1| protein product [Aspergillus oryzae]
  misc_feature (73)..(342): NCBI GI: 238500646 Blast Desc: conserved [Aspergillus flavus NRRL3357] gi|220691794|gb|EED48141.1| conserved [Aspergillus flavus NRRL3357]
METSLPYAKLINQAGFAGNTSSQYPAAFIFATAIVQSWKTISFRGLDTMITTVGMLKTPDKYANGILQWNDAQVTATECALYFCVKAYDSFVQNGNLNETTIATWSDRDYASYANLEAFDENIKVCDKLNHNSLMLPGVVEDAYVRDVSRSDLVLNIPLGDVRRLNLSRNTTNFNITQNTVGSLINWINNDFFFEKMTWPPLDDQHGDDVIVAQTLFESKSLAKTFEQAADSLSLKIRDISNSFHIGTVEEIVLRVDVAWAYLTIPLLTFFLGTVFCLVTIYNTRRLGLNACKTDMITTLTYSVDAETRALLRQSHFLGNVAKTAKNLRVQLEDVGTGPELRMKQE

SEQ ID NO: 12023 - DNA, 377 bp, Muscodor strobelii
  misc_feature: SGI EST ID NO. CUFF.28526.0
  misc_feature: Variant of the nucleotide sequence at SEQ ID NO 12021
aaacactattcgaaagcaagagtctggcgaagaccttcgagcaggctgctgatagtctatcacttaagatccgggatatttctaacagcttccatataggaacagtcgaagagattgtgttacgggttgacgtcgcatgggcatatctcacaattcctctcctaaccttcttcttggggacagtgttttgtctggtgactatttacaacactcggaggctgggattgaacgcatgtaaaacagatatgattactaccttgacatattctgttgacgccgaaacccgagcacttctgagacaatctcatttccttggaaacgtcgctaaaactgcaaagaatttgagagttcagctagaagacgtaggaactggcccg

SEQ ID NO: 12024 - DNA, 1506 bp, Muscodor strobelii
  misc_feature: SGI cDNA ID NO. 563883
  misc_feature: Reduced expression when VOC is produced
  misc_feature: Encodes the peptide sequence at SEQ ID NO 12025
atgacgctctctactaaagttaaggccttgctcgtaggcgctgctctcgttgcgaggggattggccgatacgtgtagtcaagtggaggctgagacttcgatcaagatccttgataagttgtcaatcgagtacgatacacagcagactgaatactggtcgacgagttgtagtaatctgctcccatcatgtatcttgatgcccactacgacggaggaggttgcagctcttgtctcgatcctggcttcgaacaacgagactttcgccgtcaagtccggtggccataatccgaataattggttcgcgagtgtagatggtggcccactgatctcgactcagagcttgaacgaaattatattcgacagaggggcagagacggtgacaattggacctgggaaccgttgggacgatgtctcggcgacgctcgatggcactggatacacggttgttggtggccgtattggaaatgtcggcgttggtggttacatgcttggaggtggcttgagcttcatgagcacgcagtatggatttgcagcaaacaatatcatcgagtttacgctggttctggcaaattcatccatcatcagtgtaacagagagcagtcatccggaccttttcctcgccttaaagggaggcggcagcaattttggtattgttacagcatacaaagtccaagcatatgagcaaggcgatgtctggggtggtacgctcaccatcacatctacaccggagaatgacgcagcgctacttaaagcagttcgcgacttcacggaatactatcccgacgagaaggccggtattatcgtgacagcagagcacacactcgcaacgttgttgaagatttgggtcatcttcctttattacaacggtccagaacctcctagtgatttgttcagcaatttcacatctgtcggtgcgcccctcagcacagctaagacgcagtcaatgaatgagcttttgagcggaaacaacatctacgtagtcagagggcaggtctacacgataggaaccgagacgctcccgctcccaagtgcggaggatggaccggaggttatgcaggctatctttgatcactggcagaatgtcagtgacacagctgccctcgtgccaggcgtcattgcaagcattgcattccagccagtgccaaaacgactcgctagcgtagctaaatcgaaaggcggcgatctgcttgacctagacacggacgtggatcgtatctttattgaactggattacagcttctcgttcaactcttcatacgatgaggtcgacacgataatgcgagagacctatggtggatttcaaactatagttcaggaataccagcagagcggtattctacctcaggatgcttacctgccgttattccaaaacgattgtttttacccgcaggattatttcggaaggctaaggcctgagaagttgacgcttgcgcaaacagtgcagcaggaactggacccaaatgggttttgggcgacgaggacgggcggattcaagattcctgcttag

SEQ ID NO: 12025 - protein, 501 aa, Muscodor strobelii
  misc_feature: SGI Peptide ID NO. 563883
  misc_feature (61)..(197): Pfam Id: PF01565 Pfam Desc: FAD binding domain
  misc_feature (15)..(499): NCBI GI: 261355383 Blast Desc: FAD binding domain-containing protein [Verticillium albo-atrum VaMs.102]
  misc_feature (3)..(498): NCBI GI: 171677732 Blast Desc: protein product [Podospora anserina] gi|170936934|emb|CAP61593.1| protein product [Podospora anserina]
  misc_feature (16)..(498): NCBI GI: 169623644 Blast Desc: SNOG_15066 [Phaeosphaeria nodorum SN15] gi|111056489|gb|EAT77609.1| SNOG_15066 [Phaeosphaeria nodorum SN15]
  misc_feature (22)..(498): NCBI GI: 116201297 Blast Desc: CHGG_08533 [Chaetomium globosum CBS 148.51] gi|88177051|gb|EAQ84519.1| CHGG_08533 [Chaetomium globosum CBS 148.51]
  misc_feature (8)..(499): NCBI GI: 39960153 Blast Desc: MGG_09376 [Magnaporthe grisea 70-15] gi|145014333|gb|EDJ98901.1| MGG_09376 [Magnaporthe grisea 70-15]
  misc_feature (24)..(499): NCBI GI: 39973761 Blast Desc: MGG_00973 [Magnaporthe grisea 70-15] gi|145018071|gb|EDK02350.1| MGG_00973 [Magnaporthe grisea 70-15]
  misc_feature (14)..(499): NCBI GI: 146324580 Blast Desc: FAD dependent oxidoreductase [Aspergillus fumigatus Af293] gi|129555401|gb|EAL84738.2| FAD dependent oxidoreductase, [Aspergillus fumigatus Af293] gi|159122984|gb|EDP48104.1| FAD
  misc_feature (4)..(499): NCBI GI: 121709342 Blast Desc: FAD dependent oxidoreductase, [Aspergillus clavatus NRRL 1] gi|119400540|gb|EAW10965.1| FAD dependent oxidoreductase, [Aspergillus clavatus NRRL 1]
  misc_feature (24)..(499): NCBI GI: 154286082 Blast Desc: [Ajellomyces capsulatus NAm1] gi|150407477|gb|EDN03018.1| [Ajellomyces capsulatus NAm1]
  misc_feature (24)..(499): NCBI GI: 225558356 Blast Desc: FAD binding domain-containing protein [Ajellomyces capsulatus G186AR]
  misc_feature: Useful for introducing or modulating the production of volatile compounds
MTLSTKVKALLVGAALVARGLADTCSQVEAETSIKILDKLSIEYDTQQTEYWSTSCSNLLPSCILMPTTTEEVAALVSILASNNETFAVKSGGHNPNNWFASVDGGPLISTQSLNEIIFDRGAETVTIGPGNRWDDVSATLDGTGYTVVGGRIGNVGVGGYMLGGGLSFMSTQYGFAANNIIEFTLVLANSSIISVTESSHPDLFLALKGGGSNFGIVTAYKVQAYEQGDVWGGTLTITSTPENDAALLKAVRDFTEYYPDEKAGIIVTAEHTLATLLKIWVIFLYYNGPEPPSDLFSNFTSVGAPLSTAKTQSMNELLSGNNIYVVRGQVYTIGTETLPLPSAEDGPEVMQAIFDHWQNVSDTAALVPGVIASIAFQPVPKRLASVAKSKGGDLLDLDTDVDRIFIELDYSFSFNSSYDEVDTIMRETYGGFQTIVQEYQQSGILPQDAYLPLFQNDCFYPQDYFGRLRPEKLTLAQTVQQELDPNGFWATRTGGFKIPA

SEQ ID NO: 12026 - DNA, 1663 bp, Muscodor strobelii
  misc_feature: SGI EST ID NO. CUFF.28536.0
  misc_feature: Variant of the nucleotide sequence at SEQ ID NO 12024
cgttcgactcgcgtcgttctcttctattgagtcgcagccgttgctctctgtacggtctttacaggcacgatgacgctctctactaaagttaaggccttgctcgtaggcgctgctctcgttgcgaggggattggccgatacgtgtagtcaagtggaggctgagacttcgatcaagatccttgataagttgtcaatcgagtacgatacacagcagactgaatactggtcgacgagttgtagtaatctgctcccatcatgtatcttgatgcccactacgacggaggaggttgcagctcttgtctcgatcctggcttcgaacaacgagactttcgccgtcaagtccggtggccataatccgaataattggttcgcgagtgtagatggtggcccactgatctcgactcagagcttgaacgaaattatattcgacagaggggcagagacggtgacaattggacctgggaaccgttgggacgatgtctcggcgacgctcgatggcactggatacacggttgttggtggccgtattggaaatgtcggcgttggtggttacatgcttggaggtggcttgagcttcatgagcacgcagtatggatttgcagcaaacaatatcatcgagtttacgctggttctggcaaattcatccatcatcagtgtaacagagagcagtcatccggaccttttcctcgccttaaagggaggcggcagcaattttggtattgttacagcatacaaagtccaagcatatgagcaaggcgatgtctggggtggtacgctcaccatcacatctacaccggagaatgacgcagcgctacttaaagcagttcgcgacttcacggaatactatcccgacgagaaggccggtattatcgtgacagcagagcacacactcgcaacgttgttgaagatttgggtcatcttcctttattacaacggtccagaacctcctagtgatttgttcagcaatttcacatctgtcggtgcgcccctcagcacagctaagacgcagtcaatgaatgagcttttgagcggaaacaacatctacgtagtcagagggcaggtctacacgataggaaccgagacgctcccgctcccaagtgcggaggatggaccggaggttatgcaggctatctttgatcactggcagaatgtcagtgacacagctgccctcgtgccaggcgtcattgcaagcattgcattccagccagtgccaaaacgactcgctagcgtagctaaatcgaaaggcggcgatctgcttgacctagacacggacgtggatcgtatctttattgaactggattacagcttctcgttcaactcttcatacgatgaggtcgacacgataatgcgagagacctatggtggatttcaaactatagttcaggaataccagcagagcggtattctacctcaggatgcttacctgccgttattccaaaacgattgtttttacccgcaggattatttcggaaggctaaggcctgagaagttgacgcttgcgcaaacagtgcagcaggaactggacccaaatgggttttgggcgacgaggacgggcggattcaagattcctgcttagtgcttgatcgaatttttaccttgaattagtattgacataatctgtagttgagggagatgaatctaatgaaagccatattagtgtcatc

SEQ ID NO: 12027 - DNA, 717 bp, Muscodor strobelii
  misc_feature: SGI cDNA ID NO. 563884
  misc_feature: Reduced expression when VOC is produced
  misc_feature: Encodes the peptide sequence at SEQ ID NO 12028
atgcttggcaaacaagtcggtggacttcatcatctcgatgacagccggttatttgacttttgcttgatgatagaacgtcatcctgacaacgttggcgccgcgctctttggcggctttgttggaacttatctaaagccattgacaccgcaagacgttgctcgtgttgagattcctctcagtgaagtattgcccgccccggccggcggcgaagacaccggaaagagaccgccggagccgccccacggaattggacaccacatcaaattcccatgggctaaagaaattaaggccgttgcaattatccccaatttcgaggtggccacggccaaagcacgagaggtgctgccgaaggaatatccgagagcggacgtgacgttcaacatgcagcgcattgcattactacccgttgccttgggtcaatcaccgcctgatccagaactcatcaatctggctatgcaagacaagctacaccaacaataccgccagacccttattccaggacttcaagatatcgttcagtccatgtcgccaagcactcaggaggggttactcggagtctgtctatcaggcgcaggccccacgatcttggccttggcgactagtcatttcgaagagatcgccgagagaataatagctaggttccgacaagagaatattgaatgccaatggaaactgttggaaccagcagaggggacgaaggtcaccaagacgagttag

SEQ ID NO: 12028 - protein, 238 aa, Muscodor strobelii
  misc_feature: SGI Peptide ID NO. 563884
  misc_feature (134)..(216): Pfam Id: PF08544 Pfam Desc: GHMP kinases C terminal
  misc_feature (1)..(236): NCBI GI: 145602656 Blast Desc: homoserine kinase, [Magnaporthe grisea 70-15] gi|145011053|gb|EDJ95709.1| homoserine kinase, [Magnaporthe grisea 70-15]
  misc_feature (1)..(236): NCBI GI: 116197863 Blast Desc: conserved [Chaetomium globosum CBS 148.51] gi|88178366|gb|EAQ85834.1| conserved [Chaetomium globosum CBS 148.51]
  misc_feature (1)..(237): NCBI GI: 171693701 Blast Desc: protein product [Podospora anserina] gi|170946799|emb|CAP73603.1| protein product [Podospora anserina]
  misc_feature (2)..(236): NCBI GI: 85100999 Blast Desc: homoserine kinase [Neurospora crassa OR74A] gi|11611461|emb|CAC18626.1| homoserine kinase [Neurospora crassa] gi|28922605|gb|EAA31831.1| homoserine kinase [Neurospora crassa
  misc_feature (1)..(236): NCBI GI: 256731824 Blast Desc: [Nectria haematococca mpVI 77-13-4]
  misc_feature (2)..(237): NCBI GI: 46137391 Blast Desc: FG10211.1 [Gibberella zeae PH-1]
  misc_feature (1)..(234): NCBI GI: 115438466 Blast Desc: homoserine kinase [Aspergillus terreus NIH2624] gi|114188888|gb|EAU30588.1| homoserine kinase [Aspergillus terreus NIH2624]
  misc_feature (1)..(234): NCBI GI: 145253849 Blast Desc: An17g02090 [Aspergillus niger] gi|134084013|emb|CAL00551.1| protein product [Aspergillus niger]
  misc_feature (1)..(236): NCBI GI: 259482943 Blast Desc: TPA: homoserine kinase (Eurofung) [Aspergillus nidulans FGSC A4]
  misc_feature (1)..(234): NCBI GI: 212536084 Blast Desc: homoserine kinase [Penicillium marneffei ATCC 18224] gi|210070597|gb|EEA24687.1| homoserine kinase [Penicillium marneffei ATCC 18224]
  misc_feature (1)..(229): SWISSPROT Homolog: EC 2.7.1.39 Homoserine kinase
  misc_feature: Useful for introducing or modulating the production of volatile compounds
MLGKQVGGLHHLDDSRLFDFCLMIERHPDNVGAALFGGFVGTYLKPLTPQDVARVEIPLSEVLPAPAGGEDTGKRPPEPPHGIGHHIKFPWAKEIKAVAIIPNFEVATAKAREVLPKEYPRADVTFNMQRIALLPVALGQSPPDPELINLAMQDKLHQQYRQTLIPGLQDIVQSMSPSTQEGLLGVCLSGAGPTILALATSHFEEIAERIIARFRQENIECQWKLLEPAEGTKVTKTS

SEQ ID NO: 12029 - DNA, 1714 bp, Muscodor strobelii
  misc_feature: SGI EST ID NO. CUFF.28542.0
  misc_feature: Variant of the nucleotide sequence at SEQ ID NO 12027
gcataagtcgctgttaattggtccgtcatcttgcttacacaaatgtagcttgccgaaggaaaaaaatttgagatcaaactatcgggaacagaattgtcctgattgttcccgagaaatttacagtcactcacgtctgagcaaattcaaaggatatcggcaacagttcaacgcgatggaatccttcaccatcaagactccatgctcttcagcaaatatagggcccggctttgatgtcatcggcctggctctctcggtatatttagagctgaaagtgactattgacagatcgaaaacgtcatcagaccagccattgaactgtcgggtcacatacgagggcgaaggcgaagatagcggggaggtgcccttggatcctgccgctaaccttataacccgcgttgctctatacgttctacgatgccatgaccagcgagctttcccagtcgacacacatgttcacattataaatccccattcccctgggccggggcctgggctcctccggagcagctgtggtggcaggcgttatgcttggcaaacaagtcggtggacttcatcatctcgatgacagccggttatttgacttttgcttgatgatagaacgtcatcctgacaacgttggcgccgcgctctttggcggctttgttggaacttatctaaagccattgacaccgcaagacgttgctcgtgttgagattcctctcagtgaagtattgcccgccccggccggcggcgaagacaccggaaagagaccgccggagccgccccacggaattggacaccacatcaaattcccatgggctaaagaaattaaggccgttgcaattatccccaatttcgaggtggccacggccaaagcacgagaggtgctgccgaaggaatatccgagagcggacgtgacgttcaacatgcagcgcattgcattactacccgttgccttgggtcaatcaccgcctgatccagaactcatcaatctggctatgcaagacaagctacaccaacaataccgccagacccttattccaggacttcaagatatcgttcagtccatgtcgccaagcactcaggaggggttactcggagtctgtctatcaggcgcaggccccacgatcttggccttggcgactagtcatttcgaagagatcgccgagagaataatagctaggttccgacaagagaatattgaatgccaatggaaactgttggaaccagcagaggggacgaaggtcaccaagacgagttagcgaggaagtttttacatgtttcgatctgtaacccatgtccgtctgcagtgtaacttactccgatccccgatgctacgtcgtacgtcacccgagaccgttatccattacaaccgctccagtcgtactggtattagaccagtctcgtcaatgactcgtgaatacgaagacagatacgaacacatttggcatcggaataaagtcaatggcattttgcccttggctaaaaggggttacgtactgagtgtcataacatggaaactccacgtgcggtgctcggttacaggcacagcccttcagcttccaggggtcccttaccaaacccctggaataactggaacttggtcgtaaaaggttatgattaatgtttatgccttgataatagatgcatttatagaatgtagctagactgactcgcgcttccttatagaaggagcgcattgtacaatcttgctcacgccttgactgaattctcc

SEQ ID NO: 12030 - DNA, 321 bp, Muscodor strobelii
  misc_feature: SGI cDNA ID NO. 563885
  misc_feature: Encodes the peptide sequence at SEQ ID NO 12031
atgcgtttcacaaacatccgtgccatcgcgctctttccgatgagcttgatgctatccaccatggttgtgggtgagcccatctcggttgtgaaagcgcccactgccattgacaagcgtctggatcaatggtgctgtcttgtgacctgcagagaatgcagccccaaagcctgccctggcggagatggagactgcaactactttttttacaacacctgctgtgctgctagccgcaagaaagctgaggatggtactttcgagtactataacaacgctttcgagaagatcacattcgtcgacccgactctagaggcaactcaataa

SEQ ID NO: 12031 - protein, 106 aa, Muscodor strobelii
  misc_feature: SGI Peptide ID NO. 563885
MRFTNIRAIALFPMSLMLSTMVVGEPISVVKAPTAIDKRLDQWCCLVTCRECSPKACPGGDGDCNYFFYNTCCAASRKKAEDGTFEYYNNAFEKITFVDPTLEATQ

SEQ ID NO: 12032 - DNA, 1161 bp, Muscodor strobelii
  misc_feature: SGI cDNA ID NO. 563886
  misc_feature: Reduced expression when VOC is produced
  misc_feature: Encodes the peptide sequence at SEQ ID NO 12033
atgcttaaagtactctctttcatctcgatcgtggctttggtacgaggcacagttctggtaccagagctcactggcccacacagcgttggcacaaccgttcttgaactaaaagattactcacgacaagaccctttcgcaccaagtccagtaacacgagatctagtcgtatctctattctatcctacttcgtcacgctgcggtcgcggtaacaactgcacgctggcaacgcagtttccgcctatcactgcacaagcgatcgtatccacttataacatcaccgctgatgttgcaggtattacaactcgatcctgtctcgacagccctttgaacaagccgcatctcccgtggctactcttcagccctggactgggaaactctcgtttgtactactctgacttggcggaggatttggccagtcacggctggaatgttgtcacaatcgaccatccttacgacagtctcatcgttgaatttcccgatggacatatcgtgcttgcttctcagtccccaaatgtggataacgccacgtacgaccaattgctcgatgtccgagttgccgatcttatatttgtccttgactcacttgcaaactcttcggttgtgtctcaaatccccggactcagcacaacaaagtcgcctcgagaaatcgagatgagccagtacaccacggccaagctaccaactcacagtgtaggggcctttgggcactcattcggaggtgcatcttctctgcaagcgatggctatggacaaacgcttcaaagttggcgcaaacatggatggcgcactgtttggggatgttgtctctgctggtacagataagcccttcgtttttattagcagacccgatcacaaccagaccacagatgaaacgtggagcgaggcgtggaagaatcttcggggatttaaacgagaatattccgttgaaggcgcactgcatggagctttcaccgatcttccggtactgagagatctgctcggtggtctgccgggtccactcagcgatcagcttggtacgatcagagggactagaatacaggagatcgagaccacgttcctcggggcgttgtttgatcgcttcttgaaagggaagaagggcgagttacttgatgagaaggagttttctcagtggccggaggtgagcttggtggattcttcctga

SEQ ID NO: 12033 - protein, 386 aa, Muscodor strobelii
  misc_feature: SGI Peptide ID NO. 563886
  misc_feature (12)..(373): Pfam Id: PF03403 Pfam Desc: Platelet-activating factor acetylhydrolase, plasma/intracellular isoform II
  misc_feature (18)..(382): NCBI GI: 119482435 Blast Desc: PAF acetylhydrolase family protein [Neosartorya fischeri NRRL 181] gi|119409400|gb|EAW19349.1| PAF acetylhydrolase family protein [Neosartorya fischeri NRRL 181]
  misc_feature (28)..(382): NCBI GI: 242805475 Blast Desc: PAF acetylhydrolase family protein [Talaromyces stipitatus ATCC 10500] gi|218715163|gb|EED14585.1| PAF acetylhydrolase family protein [Talaromyces stipitatus ATCC
  misc_feature (5)..(352): NCBI GI: 156046823 Blast Desc: SS1G_09495 [Sclerotinia sclerotiorum 1980] gi|154693890|gb|EDN93628.1| SS1G_09495 [Sclerotinia sclerotiorum 1980]
  misc_feature (3)..(380): NCBI GI: 71002852 Blast Desc: PAF acetylhydrolase family protein [Aspergillus fumigatus Af293] gi|66853745|gb|EAL94069.1| PAF acetylhydrolase family protein [Aspergillus fumigatus Af293]
  misc_feature (18)..(382): NCBI GI: 121704577 Blast Desc: PAF acetylhydrolase family protein [Aspergillus clavatus NRRL 1] gi|119398697|gb|EAW09126.1| PAF acetylhydrolase family protein [Aspergillus clavatus NRRL 1]
  misc_feature (2)..(380): NCBI GI: 115396058 Blast Desc: [Aspergillus terreus NIH2624] gi|114193237|gb|EAU34937.1| [Aspergillus terreus NIH2624]
  misc_feature (3)..(380): NCBI GI: 159130162 Blast Desc: PAF acetylhydrolase family protein [Aspergillus fumigatus A1163]
  misc_feature (7)..(380): NCBI GI: 154313952 Blast Desc: BC1G_04919 [Botryotinia fuckeliana B05.10] gi|150849065|gb|EDN24258.1| BC1G_04919 [Botryotinia fuckeliana B05.10]
  misc_feature (20)..(383): NCBI GI: 169763002 Blast Desc: [Aspergillus oryzae RIB40] gi|83770429|dbj|BAE60562.1| protein product [Aspergillus oryzae]
  misc_feature (20)..(383): NCBI GI: 238488837 Blast Desc: PAF acetylhydrolase family protein [Aspergillus flavus NRRL3357] gi|220698044|gb|EED54384.1| PAF acetylhydrolase family protein [Aspergillus flavus NRRL3357]
  misc_feature: Useful for introducing or modulating the production of volatile compounds
MLKVLSFISIVALVRGTVLVPELTGPHSVGTTVLELKDYSRQDPFAPSPVTRDLVVSLFYPTSSRCGRGNNCTLATQFPPITAQAIVSTYNITADVAGITTRSCLDSPLNKPHLPWLLFSPGLGNSRLYYSDLAEDLASHGWNVVTIDHPYDSLIVEFPDGHIVLASQSPNVDNATYDQLLDVRVADLIFVLDSLANSSVVSQIPGLSTTKSPREIEMSQYTTAKLPTHSVGAFGHSFGGASSLQAMAMDKRFKVGANMDGALFGDVVSAGTDKPFVFISRPDHNQTTDETWSEAWKNLRGFKREYSVEGALHGAFTDLPVLRDLLGGLPGPLSDQLGTIRGTRIQEIETTFLGALFDRFLKGKKGELLDEKEFSQWPEVSLVDSS

SEQ ID NO: 12034 - DNA, 1668 bp, Muscodor strobelii
  misc_feature: SGI EST ID NO. CUFF.28553.0
  misc_feature: Variant of the nucleotide sequence at SEQ ID NO 12032
gcagatcgcaacttggaagtcgctataattcgaagcctcactgtagttagctttacgtagccgcgcataaaacgcaattgtacggttacacacgatcagcctcgctaattttctccactaccgctcgctcagcgaagctgtgtactttgagaaactaataactgtcaacctcacttgcaggactctctctctatataaaaccgcaatgcaatgccattaggatgtgtttcgagcacctcagcccattgaaacatatatataatgcgatattcagctctcttccagacataatagaatggttaatcgaaatgcttaaagtactctctttcatctcgatcgtggctttggtacgaggcacagttctggtaccagagctcactggcccacacagcgttggcacaaccgttcttgaactaaaagattactcacgacaagaccctttcgcaccaagtccagtaacacgagatctagtcgtatctctattctatcctacttcgtcacgctgcggtcgcggtaacaactgcacgctggcaacgcagtttccgcctatcactgcacaagcgatcgtatccacttataacatcaccgctgatgttgcaggtattacaactcgatcctgtctcgacagccctttgaacaagccgcatctcccgtggctactcttcagccctggactgggaaactctcgtttgtactactctgacttggcggaggatttggccagtcacggctggaatgttgtcacaatcgaccatccttacgacagtctcatcgttgaatttcccgatggacatatcgtgcttgcttctcagtccccaaatgtggataacgccacgtacgaccaattgctcgatgtccgagttgccgatcttatatttgtccttgactcacttgcaaactcttcggttgtgtctcaaatccccggactcagcacaacaaagtcgcctcgagaaatcgagatgagccagtacaccacggccaagctaccaactcacagtgtaggggcctttgggcactcattcggaggtgcatcttctctgcaagcgatggctatggacaaacgcttcaaagttggcgcaaacatggatggcgcactgtttggggatgttgtctctgctggtacagataagcccttcgtttttattagcagacccgatcacaaccagaccacagatgaaacgtggagcgaggcgtggaagaatcttcggggatttaaacgagaatattccgttgaaggcgcactgcatggagctttcaccgatcttccggtactgagagatctgctcggtggtctgccgggtccactcagcgatcagcttggtacgatcagagggactagaatacaggagatcgagaccacgttcctcggggcgttgtttgatcgcttcttgaaagggaagaagggcgagttacttgatgagaaggagttttctcagtggccggaggtgagcttggtggattcttcctgaatccgttggagtaacatgggaaatggctccattttgttgtcaaaccactacaagctgacaatagagaacttgatgagaaggtgttcactataatacgaagtatctcaaacagatttgtttatcaaattctccgcataaactgaaagctaccgggtacatatgctgtttagatttgagtccttcctggcgcattatgtcc

SEQ ID NO: 12035 - DNA, 3456 bp, Muscodor strobelii
  misc_feature: SGI cDNA ID NO. 563887
  misc_feature: Reduced expression when VOC is produced
  misc_feature: Encodes the peptide sequence at SEQ ID NO 12036
atgagagtcgccatccgagaccagttggcggcactcgtgctagttgccgtgctcgtcgccctcactatcatatccgttccgacctgggtctacgtacataaattcgtcgtcaccgtcgagaccgatggccttgctctggctgcttcgctgaaagccgctcagatcgcttcctccctcgaactcgtgcaaacgtctgtcatctccatctcaacaagattgcttctccagaacgcgttccttaacttttaccgcggcgatcggacagaggcaaactggagtgtggcggaccaagatcttggaacgggcctgaactacggcggttcttccaacctcctgcaggcaagactgtactctcgcaacagcactggtgatgctcagcctctgaccagcatcgttgcggcgaacctcaccagaatcgccttgccgtacactaagtctgacggttcgcctgtatatcttggtgataatgacaccgcctacggcttccctccaccgctgtatcccaatatcacttactataacactacagacgtcgatcctctcgatccgaactacactctccaggttgcgagacctttccccgatattcgaatcgactcgaccgttaatggtctcgtgctggggcctctagtgatcaatgactcgtacgcccttatttccctgacagtacctgttcgaagaatcaacaacactgcacttatccttgggtatatgacagtggttgcagaagcaagttctcttataagcattgtccaatcaccggaaggccttggtgatactggtattgtttgcctcgtcgggccggctagtggttggaaccgctttagtaaatataacttgccagttaactcgacacatgcagcagctagcaatttctctaatgtcgacgttgaatttgtgctgccacctataatccgagatggtcataagaatcgacatcccgaacgggacttcgatacaggcgattataccaagactttcaaatccactgcctacaacgcggtttaccgggcattcacacgcaataacactaatcctagcaactccagcagtatgctctcaacgaaaaacgaggaaggcatcgcggtggccgttggctacgcacgccctcaaacacctctagtgaattggactctcatcgttgaaaaagaacgggctgaagcatatatcccgatcaatactctccaatacattctccttggcactgtctttggcaccgctgggctggtattgattttgatatttccatgtgctcactttagtgttcaaccgattcgtcgtctcaaagccgcgacagagaaatctattgcacctcctggttataccgaagcttacatcgacgatttcgattttgataacgaagaccacgccgcgtctggtagagccagtagcaaaggcgaaaagggcgttatggttcaccttagaagattgaccaagagatactcgaaaccgaaaccgccttcttcagagcataccagcgagaatgcacgacgcgtgttcaaaatccctggcaaagttcaggatcgcaaacattacataacagacgaattgaccgaactcactatcaccttcaatgagatgagcgatgagcttgtaaggcaatacacgtcactggaggataaagtggcccaaagaactagagaactcgaaattagcaagaaagctgcagaagctgcgaacgagagtaaaacactcttcattgccaatatctcacatgagctgaagacccctctgaatggcattttgggcatggctgctgtgtgcatggaggaagacgacctggttcggattaaacagtctttgaaagtgctctacaaatctggcgacttacttttccacctgctggaggaccttctgaatttctccaggaatcagattggacagcaacaactcagcctcgaggaaaaggaatttcgacttggcgatattcgatcacaagttcaaaatattttccaaaagcaagtcaaagagggagaaattgatttttctgttgactttgtcagtaccgacatggatcctgatcataatgcagagtgcgcaagcttggatggtagactcccagtgcttggccctggtggtaccggtcgcttgaaagacatgtgtttatggggcgatcaacacagaattctgcaggtgttgatcaatcttgttagcaacagtttgaagttcactccaaaacacggcaaagtgtctgtccgtatcaaatgtctgggcgaggcagagacgagcgacgagagtagtagggcttcctcgttctcgagaaacacagtcagtttccaaggaggaagatatggacaccgaggcggatccatgtctaatacatcgacgatgtccagggacatcacaacgcccgggacagccctgtccataaatcctatggacccaaaaatggcaccacatctattttcaccagacagagctcagacaccacccccagcaaataccaaaccgtatgttttcgagtttgaagtggaagatacaggtccgggtatcccggaaaacatgcagacacgtgttttcgaaccgtttgtccaaggagatttgggcttgagcaagaaatttggcggaactggactaggactcagtatttgccaacagttggcaaatctgatgggaggctccataacgatgagaagcacagtcggagttggaactgcattcacgatgcgcattcccctcaagtacacaaaggataggccatcaagtacagcatcgagcagtcttaagtcccgcacaccaagtgttggctctgtggagggcgacatccgaaggacttctttaccacagaccacagcagaagctaaagcaagtgttctcgaccaacaaccccgtcttgttggcttaagtcaacctttctttgccacggcgcctaagccctcaggcaaatcaccggatgaccagatgaaagttgccgagaaagctcgcgcggacaagagcgagggaaaactgcgagttctagtcgcagaagacaaccccaccaacattgaagtcgtcagtcggatgctgaagttagaggacgtctatgatgtcacaatcgccaaagacggccaggaagcatacgatatggtcaaagtgaacatggagaacaacaggccttttgatcttatcttcatggacatacaaatgcccaacctcgatggtatccagagcacacggctcatccggggaatgggcttttcgactcctattgtcgcgctgacggccttttctgacgaaagcaacgttaagagttgcatggagtcaggcatggacgagtttctcagcaaacccatacgtcggcctgccctcaagaatatattgaaaaagtttgctacgatcctggaagagccggagacggctaccatctcaagggagcctacccccgagaacggcgaggccgtcaaacctgggaacgggaaaccactcaacggacattcttcatctaaaaatatggaaccagctaaatcggtgccgtga

SEQ ID NO: 12036 - protein, 1151 aa, Muscodor strobelii
  misc_feature: SGI Peptide ID NO. 563887
  misc_feature (704)..(894): Pfam Id: PF02518 Pfam Desc: Histidine kinase-, DNA gyrase B-, and HSP90-like ATPase
  misc_feature (562)..(627): Pfam Id: PF00512 Pfam Desc: His Kinase A (phosphoacceptor) domain
  misc_feature (983)..(1101): Pfam Id: PF00072 Pfam Desc: Response regulator receiver domain
  misc_feature (1)..(1130): NCBI GI: 171691683 Blast Desc: protein product [Podospora anserina] gi|170945790|emb|CAP72590.1| protein product [Podospora anserina]
  misc_feature (1)..(1115): NCBI GI: 85091348 Blast Desc: NCU04615 [Neurospora crassa OR74A] gi|21622508|emb|CAD37055.1| related to protein histidine kinase [Neurospora crassa] gi|28920246|gb|EAA29622.1| NCU04615 crassa
  misc_feature (1)..(1142): NCBI GI: 116179770 Blast Desc: CHGG_00513 [Chaetomium globosum CBS 148.51] gi|88184810|gb|EAQ92278.1| CHGG_00513 [Chaetomium globosum CBS 148.51]
  misc_feature (1)..(1138): NCBI GI: 39726365 Blast Desc: histidine kinase HHK5p [Gibberella moniliformis]
  misc_feature (1)..(1138): NCBI GI: 46137053 Blast Desc: FG10042.1 [Gibberella zeae PH-1]
  misc_feature (1)..(1120): NCBI GI: 145612677 Blast Desc: MGG_07312 [Magnaporthe grisea 70-15] gi|145019819|gb|EDK04047.1| MGG_07312 [Magnaporthe grisea 70-15]
  misc_feature (1)..(1129): NCBI GI: 256731689 Blast Desc: [Nectria haematococca mpVI 77-13-4]
  misc_feature (1)..(1151): NCBI GI: 261351735 Blast Desc: osmosensing histidine protein kinase SLN1 [Verticillium albo-atrum VaMs.102]
  misc_feature (1)..(1091): NCBI GI: 154305384 Blast Desc: conserved [Botryotinia fuckeliana B05.10] gi|150853248|gb|EDN28440.1| conserved [Botryotinia fuckeliana B05.10]
  misc_feature (1)..(1059): NCBI GI: 39726319 Blast Desc: histidine kinase HHK5p [Botryotinia fuckeliana]
  misc_feature (29)..(1111): SWISSPROT Homolog: EC 2.7.13.3 Histidine kinase
  misc_feature: Useful for introducing or modulating the production of volatile compounds
MRVAIRDQLAALVLVAVLVALTIISVPTWVYVHKFVVTVETDGLALAASLKAAQIASSLELVQTSVISISTRLLLQNAFLNFYRGDRTEANWSVADQDLGTGLNYGGSSNLLQARLYSRNSTGDAQPLTSIVAANLTRIALPYTKSDGSPVYLGDNDTAYGFPPPLYPNITYYNTTDVDPLDPNYTLQVARPFPDIRIDSTVNGLVLGPLVINDSYALISLTVPVRRINNTALILGYMTVVAEASSLISIVQSPEGLGDTGIVCLVGPASGWNRFSKYNLPVNSTHAAASNFSNVDVEFVLPPIIRDGHKNRHPERDFDTGDYTKTFKSTAYNAVYRAFTRNNTNPSNSSSMLSTKNEEGIAVAVGYARPQTPLVNWTLIVEKERAEAYIPINTLQYILLGTVFGTAGLVLILIFPCAHFSVQPIRRLKAATEKSIAPPGYTEAYIDDFDFDNEDHAASGRASSKGEKGVMVHLRRLTKRYSKPKPPSSEHTSENARRVFKIPGKVQDRKHYITDELTELTITFNEMSDELVRQYTSLEDKVAQRTRELEISKKAAEAANESKTLFIANISHELKTPLNGILGMAAVCMEEDDLVRIKQSLKVLYKSGDLLFHLLEDLLNFSRNQIGQQQLSLEEKEFRLGDIRSQVQNIFQKQVKEGEIDFSVDFVSTDMDPDHNAECASLDGRLPVLGPGGTGRLKDMCLWGDQHRILQVLINLVSNSLKFTPKHGKVSVRIKCLGEAETSDESSRASSFSRNTVSFQGGRYGHRGGSMSNTSTMSRDITTPGTALSINPMDPKMAPHLFSPDRAQTPPPANTKPYVFEFEVEDTGPGIPENMQTRVFEPFVQGDLGLSKKFGGTGLGLSICQQLANLMGGSITMRSTVGVGTAFTMRIPLKYTKDRPSSTASSSLKSRTPSVGSVEGDIRRTSLPQTTAEAKASVLDQQPRLVGLSQPFFATAPKPSGKSPDDQMKVAEKARADKSEGKLRVLVAEDNPTNIEVVSRMLKLEDVYDVTIAKDGQEAYDMVKVNMENNRPFDLIFMDIQMPNLDGIQSTRLIRGMGFSTPIVALTAFSDESNVKSCMESGMDEFLSKPIRRPALKNILKKFATILEEPETATISREPTPENGEAVKPGNGKPLNGHSSSKNMEPAKSVP

SEQ ID NO: 12037 - DNA, 4724 bp, Muscodor strobelii
  misc_feature: SGI EST ID NO. CUFF.28576.0
  misc_feature: Variant of the nucleotide sequence at SEQ ID NO 12035
gtggactcccctatggtagaacgtgtcccattctgcatccaaatcggatcccatcgagcctggtaattttgacgtaccctggcgacattctcatcccgtggaacaaccttgttcccgccaagagccgctaccccggccgctattcacttcgcaaggtagttcctctcgtctcttttctcgccagctctacagtagagcggttctgcgttctaccatcccagacactccgtctgcttttacagtagctccggcttctatcccgtccctcatcaaatccagctcatgaaatatttcccttgcttcactccgtattcctcgaccgcaagacataagtcttcagttcgttgtactgcgactcgagtctcagacatatatcctcgtgcaaatagcaacagcattggtcaaaccccacgcttgttagagcgcccttcgtatccccaagaccgtccacgttccagtgctggggccgggggacacgcggctcagttgcgcacagcaatcagacgtctgacttcgctgcaactccctctcgccatctcctcacgccgtcgcgtgtgccacagcagtcgccaggcctgaatcatgtgtacgacgacgtgtggcctcctcatcccattataggcaagaaaacatgagagtcgccatccgagaccagttggcggcactcgtgctagttgccgtgctcgtcgccctcactatcatatccgttccgacctgggtctacgtacataaattcgtcgtcaccgtcgagaccgatggccttgctctggctgcttcgctgaaagccgctcagatcgcttcctccctcgaactcgtgcaaacgtctgtcatctccatctcaacaagattgcttctccagaacgcgttccttaacttttaccgcggcgatcggacagaggcaaactggagtgtggcggaccaagatcttggaacgggcctgaactacggcggttcttccaacctcctgcaggcaagactgtactctcgcaacagcactggtgatgctcagcctctgaccagcatcgttgcggcgaacctcaccagaatcgccttgccgtacactaagtctgacggttcgcctgtatatcttggtgataatgacaccgcctacggcttccctccaccgctgtatcccaatatcacttactataacactacagacgtcgatcctctcgatccgaactacactctccaggttgcgagacctttccccgatattcgaatcgactcgaccgttaatggtctcgtgctggggcctctagtgatcaatgactcgtacgcccttatttccctgacagtacctgttcgaagaatcaacaacactgcacttatccttgggtatatgacagtggttgcagaagcaagttctcttataagcattgtccaatcaccggaaggccttggtgatactggtattgtttgcctcgtcgggccggctagtggttggaaccgctttagtaaatataacttgccagttaactcgacacatgcagcagctagcaatttctctaatgtcgacgttgaatttgtgctgccacctataatccgagatggtcataagaatcgacatcccgaacgggacttcgatacaggcgattataccaagactttcaaatccactgcctacaacgcggtttaccgggcattcacacgcaataacactaatcctagcaactccagcagtatgctctcaacgaaaaacgaggaaggcatcgcggtggccgttggctacgcacgccctcaaacacctctagtgaattggactctcatcgttgaaaaagaacgggctgaagcatatatcccgatcaatactctccaatacattctccttggcactgtctttggcaccgctgggctggtattgattttgatatttccatgtgctcactttagtgttcaaccgattcgtcgtctcaaagccgcgacagagaaatctattgcacctcctggttataccgaagcttacatcgacgatttcgattttgataacgaagaccacgccgcgtctggtagagccagtagcaaaggcgaaaagggcgttatggttcaccttagaagattgaccaagagatactcgaaaccgaaaccgccttcttcagagcataccagcgagaatgcacgacgcgtgttcaaaatccctggcaaagttcaggatcgcaaacattacataacagacgaattgaccgaactcactatcaccttcaatgagatgagcgatgagcttgtaaggcaatacacgtcactggaggataaagtggcccaaagaactagagaactcgaaattagcaagaaagctgcagaagctgcgaacgagagtaaaacactcttcattgccaatatctcacatgagctgaagacccctctgaatggcattttgggcatggctgctgtgtgcatggaggaagacgacctggttcggattaaacagtctttgaaagtgctctacaaatctggcgacttacttttccacctgctggaggaccttctgaatttctccaggaatcagattggacagcaacaactcagcctcgaggaaaaggaatttcgacttggcgatattcgatcacaagttcaaaatattttccaaaagcaagtcaaagagggagaaattgatttttctgttgactttgtcagtaccgacatggatcctgatcataatgcagagtgcgcaagcttggatggtagactcccagtgcttggccctggtggtaccggtcgcttgaaagacatgtgtttatggggcgatcaacacagaattctgcaggtgttgatcaatcttgttagcaacagtttgaagttcactccaaaacacggcaaagtgtctgtccgtatcaaatgtctgggcgaggcagagacgagcgacgagagtagtagggcttcctcgttctcgagaaacacagtcagtttccaaggaggaagatatggacaccgaggcggatccatgtctaatacatcgacgatgtccagggacatcacaacgcccgggacagccctgtccataaatcctatggacccaaaaatggcaccacatctattttcaccagacagagctcagacaccacccccagcaaataccaaaccgtatgttttcgagtttgaagtggaagatacaggtccgggtatcccggaaaacatgcagacacgtgttttcgaaccgtttgtccaaggagatttgggcttgagcaagaaatttggcggaactggactaggactcagtatttgccaacagttggcaaatctgatgggaggctccataacgatgagaagcacagtcggagttggaactgcattcacgatgcgcattcccctcaagtacacaaaggataggccatcaagtacagcatcgagcagtcttaagtcccgcacaccaagtgttggctctgtggagggcgacatccgaaggacttctttaccacagaccacagcagaagctaaagcaagtgttctcgaccaacaaccccgtcttgttggcttaagtcaacctttctttgccacggcgcctaagccctcaggcaaatcaccggatgaccagatgaaagttgccgagaaagctcgcgcggacaagagcgagggaaaactgcgagttctagtcgcagaagacaaccccaccaacattgaagtcgtcagtcggatgctgaagttagaggacgtctatgatgtcacaatcgccaaagacggccaggaagcatacgatatggtcaaagtgaacatggagaacaacaggccttttgatcttatcttcatggacatacaaatgcccaacctcgatggtatccagagcacacggctcatccggggaatgggcttttcgactcctattgtcgcgctgacggccttttctgacgaaagcaacgttaagagttgcatggagtcaggcatggacgagtttctcagcaaacccatacgtcggcctgccctcaagaatatattgaaaaagtttgctacgatcctggaagagccggagacggctaccatctcaagggagcctacccccgagaacggcgaggccgtcaaacctgggaacgggaaaccactcaacggacattcttcatctaaaaatatggaaccagctaaatcggtgccgtgatgatgagaatactctcgagccatcatccaaaggcgtcgtcgataccagacaactgccaaaatcacaaacacagcgccatcattccacctactgccagcccttttggcttttcgtttttatagcatgctcaactcgtatctcagtctttgaatccgatcgtatcgggtgttctttttgcatggcgcggattatgaaatgcacacgaaaggcatggaaaaagacggagcttcgggcatgagatcaattttcaaaaaatgcatggcgttccggtctttctatttcctatcgtctcagagaaaggaaacacaccctcttgtttcaacatcttacaatcttataatcggttctgggagtgctgttggtcagaagacgaggtctagttttggatgtttttggcagagaacgggcgggatgatcacattgtgggaggtcattgtacattttataacggctctggtataagactagacttgcgaggctctcgaaattacctgagcgcagacggctcatcatatgcgaagccatatagttatatttataagagacgggcatcctggcccttgtgtagaagccgttagtagggagacatagctattctaacgacgctcccaagtatatatcaatggaatttctgcct

SEQ ID NO: 12038 - DNA, 600 bp, Muscodor strobelii
  misc_feature: SGI cDNA ID NO. 563888
  misc_feature: Encodes the peptide sequence at SEQ ID NO 12039
atgcgcatcccatacgtatccaacccaccgcccgcagcaacagaagaagaagccgcgatcatagcgcgggtagaagcccgacgggctcctaggccattgcagccgctggatttggcgctgctgcatagtccgcctgtggctgatgggtggaattctttcttaggcgctgtgaggacgaagacgggtctaagtgcgaggattagggagttggcgatttgtagggtggctgtttgtaatgaggcttggtatgagtgggggcatcattctcctcttgcggctgccgctggattaggaaacagggcgttggagttggtgaagaagagtgatctgaatgagataagcgaggaggaacggaaggatgctgaaaaggaggggttgggacaggtggagtgggcggtgttgaggtatactgatgagatgacgaggaatgttaaggtttctgatgagacttttacggcgctgaaggaggtttgtagtgagaaggaggttgttgaggttactgctactgtcgcggcgtataattgtgtcagccggttcctcgttgcgcttgatgtgggcgagaggaatgcgacgggacctgatgatgttgttgcgcactga

SEQ ID NO: 12039 - protein, 199 aa, Muscodor strobelii
  misc_feature: SGI Peptide ID NO. 563888
  misc_feature (44)..(107): Pfam Id: PF02627 Pfam Desc: Carboxymuconolactone decarboxylase family
  misc_feature (44)..(97): Pfam Id: PF02627 Pfam Desc: Carboxymuconolactone decarboxylase family
  misc_feature (1)..(199): NCBI GI: 46137047 Blast Desc: FG10039.1 [Gibberella zeae PH-1]
  misc_feature (1)..(195): NCBI GI: 145613806 Blast Desc: MGG_01347 [Magnaporthe grisea 70-15] gi|145020830|gb|EDK04959.1| MGG_01347 [Magnaporthe grisea 70-15]
  misc_feature (1)..(195): NCBI GI: 164425352 Blast Desc: NCU04594 [Neurospora crassa OR74A] gi|157070893|gb|EAA28626.2| conserved [Neurospora crassa OR74A]
  misc_feature (1)..(195): NCBI GI: 28950034 Blast Desc: conserved [Neurospora crassa]
  misc_feature (1)..(199): NCBI GI: 256732071 Blast Desc: [Nectria haematococca mpVI 77-13-4]
  misc_feature (1)..(194): NCBI GI: 171691717 Blast Desc: protein product [Podospora anserina] gi|170945807|emb|CAP72607.1| protein product [Podospora anserina]
  misc_feature (1)..(196): NCBI GI: 156044278 Blast Desc: SS1G_10242 [Sclerotinia sclerotiorum 1980] gi|154694631|gb|EDN94369.1| SS1G_10242 [Sclerotinia sclerotiorum 1980]
  misc_feature (1)..(196): NCBI GI: 154305420 Blast Desc: BC1G_08479 [Botryotinia fuckeliana B05.10] gi|150853266|gb|EDN28458.1| BC1G_08479 [Botryotinia fuckeliana B05.10]
  misc_feature (1)..(199): NCBI GI: 261351807 Blast Desc: 4-carboxymuconolactone decarboxylase family protein [Verticillium albo-atrum VaMs.102]
  misc_feature (1)..(193): NCBI GI: 46109828 Blast Desc: FG01796.1 [Gibberella zeae PH-1]
MRIPYVSNPPPAATEEEAAIIARVEARRAPRPLQPLDLALLHSPPVADGWNSFLGAVRTKTGLSARIRELAICRVAVCNEAWYEWGHHSPLAAAAGLGNRALELVKKSDLNEISEEERKDAEKEGLGQVEWAVLRYTDEMTRNVKVSDETFTALKEVCSEKEVVEVTATVAAYNCVSRFLVALDVGERNATGPDDVVAH

SEQ ID NO: 12040 - DNA, 3130 bp, Muscodor strobelii
  misc_feature: SGI EST ID NO. CUFF.28896.0
  misc_feature: Variant of the nucleotide sequence at SEQ ID NO 12038
gatatgtcgtaggccaggtaggctagtgtttcccaaacttggtgctttcctttcccgagacttggatgattggtacaaactatgattatcaccgagcatcagattttcaacctgctacattattaacacagttttatgtccattgatgctccgcgtatctacaactcgcctcctcagacaatctcatcacctctgcatcacatcaccaatcaaccccaataccaatatctcccacaacaaccttctccttccccttcccctttccctctcatcacccctcagcaccacgtgccaccccaaaatgcgcatcccatacgtatccaacccaccgcccgcagcaacagaagaagaagccgcgatcatagcgcgggtagaagcccgacgggctcctaggccattgcagccgctggatttggcgctgctgcatagtccgcctgtggctgatgggtggaattctttcttaggcgctgtgaggacgaagacgggtctaagtgcgaggattagggagttggcgatttgtagggtggctgtttgtaatgaggcttggtatgagtgggggcatcattctcctcttgcggctgccgctggattaggaaacagggcgttggagttggtgaagaagagtgatctgaatgagataagcgaggaggaacggaaggatgctgaaaaggaggggttgggacaggtggagtgggcggtgttgaggtatactgatgagatgacgaggaatgttaaggtttctgatgagacttttacggcgctgaaggaggtttgtagtgagaaggaggttgttgaggttactgctactgtcgcggcgtataattgtgtcagccggttcctcgttgcgcttgatgtgggcgagaggaatgcgacgggacctgatgatgttgttgcgcactgagagcacaaaatgatctaatgcagataaaggaggatagtatcagggtccgtttgccgaagtctccgactggaatatattgtaggaatttggattatcttataatgacccaaaagtgtcacgaatatcacttcacaatgagaatcgcaccgtgtcttggtacgtgaaatgacatattcaacacatctgtctaccttcgctgccctgccatgatcagccgggctcgtgaaaagcaacccattacgcataaacccactccctacctattccatccattgcctttccatgtccgtccgactcacctacacgcccaatatcccatacatactctacatccctgaaacacgcccttaaacccgaactacagtaccaataatagaaagacagcgatataaacaaagtgcggtggaagcgaacaacatgattaaaaaggggtatgtaacatcatgcgaccactcaaatcaataatgattaagtcaagtgcggatgaagtataattttaatgtgggaatgaggtcaattgaaagcgggatatgaagtgctatgcagaatagaaatagggggtatcttgagtaaaataatcgataagaccatcaactcctccgggaaatgtgaatatgagggtgtcgtgtattattcaggtgaagtgtgaaatgtctaaatttgccgcacacacggatctagtttttaaatgccgatccgatgtagggctgtaaatgctttatcggagccgtgagccgttgagccaggtcgtaagctgtaattttgaagtatcgtctgacgttattcattgctttgaatgtaggtcgtcgaattttgtgtatgattcgtttcttcataaaggcgtaagtcgtttgtgcgtttttaattcgtgaagcatcgggcttcagagacgtaaaggtcattttggcgcctcattatcttgtccataaattattcatagattgtgttgtatccctggtatgtcgcgcttcaacccaattttaatggtgtaggtgtagaattctccctcacgggactcagtgcagccaggggactacctataggcgacatagggggtggtgatcgcattgcctcctcaatgctcgcgtgtcgttgtctcaatattggcgatcgctgcagttccgctacgacgccaaaccaaccgctccgatgggtatgttcggttttctcgctatggccgattacctgtgtcgtaagccgtctcagaggtggcttctgtctgatgcgatctagtatctctttattcacgccgggccttggtgtttgcggcgtagtcttttcggacaaatccttgggtaccgatcttgcattgtcctttggcttttccggagcagtgtttgcgactattcccatatagacgactagaaagcgcatgcgcagcatatctagtctgcgcactctctcctctagttgtttcctatgacctgcccaaagcactctcgcactcgtgcgcaacgttgtgctgccctcttcaacaataagtctgtttaggtcctctctcaaatcgtctccttgtttctgtatctctctcaacaatcgccctaatcgcactttgtcttctaatcgcggcactttggacacgtcggcatcataactctcgttctccgtaattgagcaatcgacggtatcgacgaaggtcgtgatttcgcgtggcgcgacaatatacgcgtgtgtgaaggtcgcgagaatgagtccgatgacgccaaatgccagcgacagagcggttacgaggaggactactgtccagagcagcgaggaggcgtccgccatgatggtccgcccatgagggtctttaggtagggaggctgggacagtgggttacggtggtagatctatggaagtgtatgtatgtatgcagtatgctatcgcttggtttttctcataatctttcttgtttgtatggacacgaatatgaagacttgactagatgcagagagaggaatctgttctgtgtctagagagtcgagagtgttgggttgcggagaagaggagaggcgagcgttgcgaatatgacgttcaagcgcctccttttcaggtaccgatgtgcgcctctgtgtgcgcgtgagccgtgtagcaaacggattaggctgggcttggggggctggttggaccgttgggttaggtcgtaagggcttcatgtagacgggaggggcgcgactgcgaatgtggttccaattcacggaacaatatgcacacttcgtgggtgcatgcaagtctgtcactcacctc

SEQ ID NO: 12041 - DNA, 801 bp, Muscodor strobelii
  misc_feature: SGI cDNA ID NO. 563889
  misc_feature: Reduced expression when VOC is produced
  misc_feature: Encodes the peptide sequence at SEQ ID NO 12042
atggcggacgcctcctcgctgctctggacagtagtcctcctcgtaaccgctctgtcgctggcatttggcgtcatcggactcattctcgcgaccttcacacacgcgtatattgtcgcgccacgcgaaatcacgaccttcgtcgataccgtcgattgctcaattacggagaacgagagttatgatgccgacgtgtccaaagtgccgcgattagaagacaaagtgcgattagggcgattgttgagagagatacagaaacaaggagacgatttgagagaggacctaaacagacttattgttgaagagggcagcacaacgttgcgcacgagtgcgagagtgctttgggcaggtcataggaaacaactagaggagagagtgcgcagactagatatgctgcgcatgcgctttctagtcgtctatatgggaatagtcgcaaacactgctccggaaaagccaaaggacaatgcaagatcggtacccaaggatttgtccgaaaagactacgccgcaaacaccaaggcccggcgtgaataaagagatactagatcgcatcagacagaagccacctctgagacggcttacgacacaggtaatcggccatagcgagaaaaccgaacatacccatcggagcggttggtttggcgtcgtagcggaactgcagcgatcgccaatattgagacaacgacacgcgagcattgaggaggcaatgcgatcaccaccccctatgtcgcctataggtagtcccctggctgcactgagtcccgtgagggagaattctacacctacaccattaaaattgggttga

SEQ ID NO: 12042 - protein, 266 aa, Muscodor strobelii
  misc_feature: SGI Peptide ID NO. 563889
  misc_feature (1)..(243): NCBI GI: 46137045 Blast Desc: FG10038.1 [Gibberella zeae PH-1]
  misc_feature (1)..(238): NCBI GI: 116179774 Blast Desc: CHGG_00515 [Chaetomium globosum CBS 148.51] gi|88184812|gb|EAQ92280.1| CHGG_00515 [Chaetomium globosum CBS 148.51]
  misc_feature (2)..(235): NCBI GI: 171691715 Blast Desc: protein product [Podospora anserina] gi|170945806|emb|CAP72606.1| protein product [Podospora anserina]
  misc_feature (9)..(244): NCBI GI: 261351806 Blast Desc: conserved [Verticillium albo-atrum VaMs.102]
  misc_feature (26)..(235): NCBI GI: 39951401 Blast Desc: MGG_01343 [Magnaporthe grisea 70-15] gi|145020836|gb|EDK04965.1| MGG_01343 [Magnaporthe grisea 70-15]
  misc_feature (13)..(247): NCBI GI: 156044292 Blast Desc: SS1G_10249 [Sclerotinia sclerotiorum 1980] gi|154694638|gb|EDN94376.1| SS1G_10249 [Sclerotinia sclerotiorum 1980]
  misc_feature (5)..(247): NCBI GI: 154305406 Blast Desc: BC1G_08472 [Botryotinia fuckeliana B05.10] gi|150853259|gb|EDN28451.1| BC1G_08472 [Botryotinia fuckeliana B05.10]
  misc_feature: Useful for introducing or modulating the production of volatile compounds
MADASSLLWTVVLLVTALSLAFGVIGLILATFTHAYIVAPREITTFVDTVDCSITENESYDADVSKVPRLEDKVRLGRLLREIQKQGDDLREDLNRLIVEEGSTTLRTSARVLWAGHRKQLEERVRRLDMLRMRFLVVYMGIVANTAPEKPKDNARSVPKDLSEKTTPQTPRPGVNKEILDRIRQKPPLRRLTTQVIGHSEKTEHTHRSGWFGVVAELQRSPILRQRHASIEEAMRSPPPMSPIGSPLAALSPVRENSTPTPLKLG

SEQ ID NO: 12043 - DNA, 843 bp, Muscodor strobelii
  misc_feature: SGI cDNA ID NO. 563890
  misc_feature: Encodes the peptide sequence at SEQ ID NO 12044
atggcgtcaaccgacatagaaccaaccttccccctcccgcgaatcctcaccaacccctcctcgacctccccagtcctcataacccaaggcgcagaaggccgcctctacaaaacaacctacctcctcccctccatacccagcgcgctcaaataccgacctccaaagccctggcgacaccccgtcctcgacgctcgcctcaccaaacaccgtatcctcgccgaagcacgaatcctctccaaatgtcgacgtgatggagtccccgtccctgcagtatacgccgtcgacgaagcaagcggatggttaatgttagaatggatcaccggcgggccagtacgagtcttcatcaacaaatttcttgagaccaggagggaaagcgagatcgcggcgggcaaaacgggcgatgctgtagtgacgggcgaggaagaggccgacaaagatctcgttgcactcatgcgacggatagctgaggctgttgggaaattacataaagtcggtatcgtacacggcgatctaacgacaagcaacatgatgctacgaccttgggaacgcggaaaggagcctgccaatggacatactaccgagactactaccgagagcgaactagatggagagataataatcatcgacttcggtctcgcgtcccagagttcacacgaagaagatcgagcggtcgacttatacgtcctcgagcgggcgttcgccagcacgcatcccagagccgagggattgttcacgaaggtgttggagagtgcctataggggcgctcacaaacaggctcctaatgtgttgaggaagcttgaggatgttaggatgagggggaggaagaggagtatgattggctaa
